United States Patent Application Publication US 2009/0100536 A1 - sequence listing, part 2

SEQ ID NO: 3373 - protein, 430 aa, Mus musculus
MAVAPAGGQHAPALEALLGAGALRLLDSSQIVIISTAPDVGAPQLPAAPPTGPRDSDVLLFATPQAPRPAPSAPRPALGRPPVKRRLDLETDHQYLAGSSGPFRGRGRHPGKGVKSPGEKSRYETSLNLTTKRFLELLSRSADGVVDLNWAAEVLKVQKRRIYDITNVLEGIQLIAKKSKNHIQWLGSHTMVGIGKRLEGLTQDLQQLQESEQQLDHLMHICTTQLQLLSEDSDTQRLAYVTCQDLRSIADPAEQMVIVIKAPPETQLQAVDSSETFQISLKSKQGPIDVFLCPEESADGISPGKTSCQETSSGEDRTADSGPAGPPPSPPSTSPALDPSQSLLGLEQEAVLPRMGHLRVPMEEDQLSPLVAADSLLEHVKEDFSGLLPGEFISLSPPHEALDYHFGLEEGEGIRDLFDCDFGDLTPLDF

SEQ ID NO: 3374 - protein, 201 aa, Mus musculus
MSQQRTARRQPSLLVDPAQETVRRRCRDPINVENLLPSKIRINLEENVQYVSMRKALKVKSPRFDVSLVYLTRKFMDLVRSAPGGILDLNKVATKLGVRKRRVYDITNVLDGIELVEKKSKNHIRWIGSDLNNFGAAPQQKKLQAELSDLSAMEDALDELIKDCAQQLLELTDDKENERYPSISTFLRVSASRVDSVLGRA

SEQ ID NO: 3375 - protein, 206 aa, Mus musculus
IRHAQTVPSSVALGTSDDARPHGPEGQVVRCLPAGRLPEKEVGPGGEIGRLRSLNSGPKGKSIREDGLPSPKTPKSPGEKTHYDTSLGLLTKKFIYLLSESEDGVLDLNWAAEVLDVQKRRIYDITNVLEGNIQLIRKKSKNNIQWVGRELFEDPTRPSRQQQLGQELKELMNAEQTLDQLIQSCSLSFKHLTEDNANKNGPRGRI

SEQ ID NO: 3376 - protein, 300 aa, Rattus norvegicus
GGSSRHEKSLGLLTTKFVSLLQEAQDGVLDLKAAADTLAVRQKRRIYDITNVLEGIDLIEKKSKNSIQWKGVGAGCNTKEVIDRLRCLKAEIEDLELKERELDQQKLWLQQSIKNVMEDSINNRFSYVTHEDICSCFNGDTLLAIQAPSGTQLEVPIPEMGQNGQKKYQINLKSHSGPIHVLLINKESNSSKPVVFPVPPPDDLTQPSSQSSTSVTPPKSTMAAQNLPEQHVSERSQNFQQTPATEISSGSISGDIIDELMSSDVFPLLRLSPTPADDYNFNLDDNEGVCDLFDVQILNY

SEQ ID NO: 3377 - protein, 331 aa, Rattus norvegicus
MAEAGPQAPPPPGTPSRHEKSLGLLTTKFVSLLQEAKDGVLDLKLAADTLAVRQKRRIYDITNVLEGIGLIEKKSKNSIQWKGVGPGCNTREIADKLIELKAEIEELQQREQELDQHKASAVLLNPHTLAYVTHEDICRCFAGDTLLAIRAPSGTSLEVPIPEGLNGQKKYQIHLKSMSGPIEVLLVNKEAWSSPPVAVPVPPPDDLLQSPPAVSTPPPLPKPALAHPQETSRPSSPQITTPTPVLGSTEVSDVAGQTAEIAVLDLPKELSEIFDPTRECMSSELLEELMSSEVFAPLLRLSPPPGDHDYIYNLDESEGVCDLFDVPVLKL

SEQ ID NO: 3378 - protein, 189 aa, Rattus norvegicus
DPINVENLLPSKIRINLEENVQYVSMRKALKVKRPRFDVSLVYLTRKFMDLVRSAPGGILDLNKVATKLGVRKRRVYDITNVLDGIELVEKKSKNHIRWIGSDLNNFGAAPQQKKLQAELSDLSAMEDALDELIKDCAQQLLELTDDKENERLAYVTYQDIHGIQAFHEQIVIAVKAPEETRLDVPAPR

SEQ ID NO: 3379 - protein, 181 aa, Rattus norvegicus
MPSKIRINLEENVQYVSMRKALKVKRPRFDVSLVYLTRKFMDLVRSAPGGILDLNKVATKLGVRKRRVYDITNVLDGIELVEKKSKNHIRWIGSDLNNFGAAPQQKKLQAELSDLSAMEDALDELIKDCAQQLLELTDDKENERLAYVTYQDIHGIQAFHEQIVIAVKAPEETRLDVPAPR

SEQ ID NO: 3380 - protein, 388 aa, Rattus norvegicus
MAVAPAGGQHAPALEALLGAGALRLLDSSQIVIISTAPDVGAPQVKRRLDLETDHQYLAGSSGPFRGRGRHPGKGVKSPGEKSRYETSLNLTTKRFLELLSHSADGVVDLNWAAEVLKVQKRRIYDITNVLEGIQLIAKKSKNHIQWLGSRTMVGIGQRLEGLTQDLQQLQESEQQLDHLMHICTTQLQLLSEDSDIQRYPWVDLRSIADPAEQMVIVIKAPPETQLQAVDSAETFQISLKSKQGPIDVFLCPEESAEGISPGRTSYQETSGEDRNADSGTAGPPPSPPSTSPTLDPSQSLLGLEQEAVLPRIGNLRAPMEEDRLSPLVAADSLLEHVKEDFSGLLPGEFISLSPPHEAVDYHFGLEEGEGIRDLFDCDFGDLTPLDF

SEQ ID NO: 3381 - protein, 193 aa, Rattus norvegicus
MSQQRTARKLPSLLVDPAQETVRRRCRDPINVENLLPSKIRINLEENVQYVSMRKALKVKRPRFDVSLVYLTRKFMDLVRSAPGGILDLNKVATKLGVRKRRVYDITNVLDGIELVEKKSKNHIRWIGSDLNNFGAAPQQKKLQAELSDLSAMEDALDELIKDCAQQLLELTDDKENERYPSIQTFIEFLLPE

SEQ ID NO: 3382 - protein, 184 aa, Rattus norvegicus
MEDSINNRFSYVTHEDICSCFNGDTLLAIQAPSGTQLEVPIPEMGQNGQKKYQINLKSHSGPIHVLLINKESNSSKPVVFPVPPPDDLTQPSSQSSTSVTPPKSTMAAQNLPEQHVSERSQNFQQTPATEISSGSISGDIIDELMSSDVFPLLRLSPTPADDYNFNLDDNEGVCDLFDVQILNY

SEQ ID NO: 3383 - protein, 184 aa, Rattus norvegicus
MEDSINNRFSYVTHEDICSCFNGDTLLAIQAPSGTQLEVPIPEMGQNGQKKYQINLKSHSGPTHVLLINKESNSSKPVVFPVPPPDDLTQPSSQSSTSVTPPKSTMAAQNLPEQHVSERSQNFQQTPATEISSGSISGDIIDELMSSDVFPLLWLSPTPADDYNFNLDDNEGVWDLFDVQILNY

SEQ ID NO: 3384 - protein, 443 aa, Thlaspi caerulescens
MSESQQDSEQYPPSKRQYHPSVSSMKPPLVAPGEYHRFDAAETRGGGASDQLKRKTDMVNQIEEPNELNTGVLQTPVSGKGGKPKKSSRSVKSNKTGTQASGSNAGSPGNNFAQATCRYDSSLGLLTKKFINLIKQAEDGILDLNKAADTLEGTKETDIRYTNVLEGIGLIEKTLKNRIQWKDLDVSKPGETVESIANLQDEIQNLTAEEVKLDDQIRESQERLTSLSEDENNKRFLFVTEDDIKNLPCFQNKTLIAVKAPHGTTLEVPDPDEAGGYPQRRYRIILRSTMGPIDVYLVSQFEEKFEEIPNADEPSNLPSTSGLPENQDVAMPMEEDSSDKNMETQEVDDTQRVYSEIESHDFVDGIMKIVPPDLDMDVDYWLRSEVGEVSITDLWPNESGADWNQIVTFDQDHAGPSNTTLEQPRTPLSPAPENSTATKSTGS

SEQ ID NO: 3385 - protein, 386 aa, Thlaspi caerulescens
MAATSNSGEDPVLYNHRSPFRFELLQSLPPTDPRYSSQTPSSTNRPFSVSEPLPNAQSPQIPPHWDESYSQITQKVQKSRKNHRIQLGSISNMPGETIDIAKVIVKQESPQDTKRGIKSKVAKQLKAGKRMANTEAHNGGPNGTNNCRYDSSLGLLTKKFVNLIREAEDGSLDLNYCADVLEVQKRRIYDITNVLEGIGLIEKTTKNHIRWKGADNLGQNGLGDQISRLKLEVESMQSEESRLDELIRERQEALRSLEEDEYCKRYMFMTEEDITSIPRFQNQTLLAIKAPTASYIEVSDPDKVMSFPQRQYRMVIRSRMGPIDVYLLSKYKRDSGETSESDQNTQSGVDTPSLKIVTSDTDLKTDYWFESDAEVSLTDLWNNNFS

SEQ ID NO: 3386 - protein, 198 aa, Anopheles gambiae str. PEST
MSDSKQQRAKALALRGLSSPTPSMLLEEDDDGEFEPTSKRRFDKSLTMLTRSVVKMLRETPDGVLYLRDVSSTLSNRQKRRIYDVTNVLEGIGLVKKQVKNHIKWVGEELTTESCLGTARQIGVHMRKRRQLELREAWFDAQLEAMRKSTQMLHADEALRSFLYVTSDDLTTVFGDKRQLLVLSENEFAPRSNNQSSS

SEQ ID NO: 3387 - protein, 400 aa, Physcomitrella patens
MKRRNECEEHHVEMNGWNGYTNSDLSPAPTPTGPRGRGSRAKTVKQTKNGPQTPGPSGIGSPTSSAPTPTSTCRYDSSLGLLTKKFIDLIKQADDGVLDLNKAADTLHVQKRRIYDITNVLEGIGLIEKKLKNRIRWKGLGMVRNAEAKDDAAGLLAEVEDLRIKEKKLDESISEMRERLRSLSEDEHNKQWLYVTEDDIKNLHCFQNETLIAIKAPLGTTLEVPDPDEAVEYPHRRFQILLRSTLGPIDVYLVSRFEGRTEVPMETLPDSQEAGPSSSVDGMSHQENMVMVPEVGYGLSDLVPPVSHESASQAPEPTGSHPDFAGGIMRIAPAEVNTDTDYWLLSDAGVGISDMWRSDPSNAMWDEVVRLNPEFGSENIGSPRPHTPPSNNALEVDPVS

SEQ ID NO: 3388 - protein, 454 aa, Chenopodium rubrum
MSTPKATNHQSQPQPLKRQLPFTSMKPPFVPSPGDYHRFSDNRAPPAPDPETIVVKTPPMKRKSDTAEYDAESSDWTASPGYTEVVSSPHQTPVSGKAGKGRGSRISKCNRPGPQTPMSNVGSPGNNLTPVGPCRYDSSLGLGTKKFINLIKHAEEGILDLNKAADTLEVQKRRIYDITNVLEGIGLIEKKLKNRIQWKGLDVSRPGEVDDSVTSLQADVENLSIEERRLDEQIREMQERLREMSEDENNQKWLFVTEEDIKGLPCFQNETLIAIKAPHGTTLEVPDPDEAVDYPQRRYRIVLRSTMGPIDVYLVSQFEEKFEEISGAEPPPSIPSTSGYNEDTTTAAKEENRDDETKMQGQETHRICSDANAQQDFVSGIMKIVPEVDSDADYWLLSDADVSITDMWRTDSGVEWNELGTIHEDYTVANVGTPQPQSPPPSATEVLPTNTTGR

SEQ ID NO: 3389 - protein, 483 aa, Arabidopsis thaliana
MSGVVRSSPGSSQPPPPPPHHPPSSPVPVTSTPVIPPIRRHLAFASTKPPFHPSDDYHRFNPSSLSNNNDRSFVHGCGVVDREEDAVVVRSPSRKRKATMDMVVAPSNNGFTSSGFTNIPSSPCQTPRKGGRVNIKSKAKGNKSTPQTPISTNAGSPITLTPSGSCRYDSSLGLLTKKFVNLIKQAKDGMLDLNKAAETLEVQKRRIYDITNVLEGIDLIEKPFKNRILWKGVDACPGDEDADVSVLQAEIENLALEEQALDNQIRQTEERLRDLSENEKNQKWLFVTEEDIKSLPGFQNQTLIAVKAPHGTTLEVPDPDEAADHPQRRYRIILRSTMGPIDVYLVSEFEGKFEDTNGSGAAPPACLPIASSSGSTGHHDIEALTVDNPETAIVSHDHPHPQPGDTSDLNYLQEQVGGMLKITPSDVENDESDYWLLSNAEISMTDIWKTDSGIDWDYGIADVSTPPPGMGEIAPTAVDSTPR

SEQ ID NO: 3390 - protein, 485 aa, Arabidopsis thaliana
MSGVVRSSPGSSQPPPPPPHHPPSSPVPVTSTPVIPPIRRHLAFASTKPPFHPSDDYHRFNPSSLSNNNDRSFVHGCGVVDREEDAVVVRSPSRKRKATMDMVVAPSNNGFTSSGFTNIPSSPCQTPRKGGRVNIKSKAKGNKSTPQTPISTNAGSPITLTPSGSCRYDSSLGLLTKKFVNLIKQAKDGMLDLNKAAETLEVQKRRIYDITNVLEGIDLIEKPFKNRILWKGVDACPGDEDADVSVLQLQAEIENLALEEQALDNQIRQTEERLRDLSENEKNQKWLFVTEEDIKSLPGFQNQTLIAVKAPHGTTLEVPDPDEAADHPQRRYRIILRSTMGPIDVYLVSEFEGKFEDTNGSGAAPPACLPIASSSGSTGHHDIEALTVDNPETAIVSHDHPHPQPGDTSDLNYLQEQVGGMLKITPSDVENDESDYWLLSNAEISMTDIWKTDSGIDWDYGIADVSTPPPGMGEIAPTAVDSTPR

SEQ ID NO: 3391 - protein, 485 aa, Arabidopsis thaliana
MSGVVRSSPGSSQPPPPPPHHPPSSPVPVTSTPVIPPIRRHLAFASTKPPFHPSDDYHRFNPSSLSNNNDRSFVHGCGVVDREEDAVVVRSPSRKRKATMDMVVAPSNNGFTSSGFTNIPSSPCQTPRKGGRVNIKSKAKGNKSTPQTPISTNAGSPITLTPSGSCRYDSSLGLLTKKFVNLIKQAKDGMLDLNKAAETLEVQKRRIYDITNVLEGIDLIEKPFKNRILWKGVDACPGDEDADVSVLQLQAEIENLALEEQALGNQIRQTEERLRDLSENEKNQKWLFVTEEDIKSLPGFQNQTLIAVKAPHGTTLEVPDPDEAADHPQRRYRIILRSTMGPIDVYLVSEFEGKFEDTNGSGAAPPACLPIASSSGSTGHHDIEALTVDNPETAIVSHDHPHPQPGDTSDLNYLQEQVGGMLKITPSDVENDESDYWLLSNAEISMTDIWKTDSGIDWDYGIADVSTPPPGMGEIAPTAVDSTPR

SEQ ID NO: 3392 - protein, 469 aa, Arabidopsis thaliana
MSEEVPQQFPSSKRQLHPSLSSMKPPLVAPGEYHRFDAAETRGGGAVADQVVSDAIVIKSTLKRKTDLVNQIVEVNELNTGVLQTPVSGKGGKAKKTSRSAKSNKSGTLASGSNAGSPGNNFAQAGTCRYDSSLGLLTKKFINLIKQAEDGILDLNKAADTLEVQKRRIYDITNVLEGIGLIEKTLKNRIQWKGLDVSKPGETIESIANLQDEVQNLAAEEARLDDQIRESQERLTSLSEDENNKRLLFVTENDIKNLPCFQNKTLIAVKAPHGTTLEVPDPDEAGGYQRRYRIILRSTMGPIDVYLVSQFEESFEDIPQADEPSNVPDEPSNVPDEPSNLPSTSGLPENHDVSMPMKEESTERNMETQEVDDTQRVYSDIESHDFVDGIMKIVPPDLDMGVDYWFRSEVGEVSITDMWPDESGPDWNQMITFDQDHAGPSDNKILEQPQTPSSPTPEESTATRSPTGS

SEQ ID NO: 3393 - protein, 391 aa, Arabidopsis thaliana
SASVAGVLQTPVSGKGGKAKKTSRSAKSNKSGTLASGSNAGSPGNNFAQAGTCRYDSSLGLLTKKFINLIKQAEDGILDLNKAADTLEVQKRRIYDITNVLEGIGLIEKTLKNRIQWKGLDVSKPGETIESIANLQDEVQNLAAEEARLDDQIRESQERLTSLSEDENNKRLLFVTENDIKNLPCFQNKTLIAVKAPHGTTLEVPDPDEAGGYQRRYRIILRSTMGPIDVYLVSQFEESFEDIPQADEPSNVPDEPSNVPDVPSNLPSTSGLPENHDVSMPMKEESTERNMETQEVDDTQRVYSDIESHDFVDGIMKIVPPDLDMGVDYWFRSEVGEVSITDMWPDEYWNQMITFDQDHAGPSDNKILEQPQTPSSPTPEESTATRSPTGS

SEQ ID NO: 3394 - protein, 469 aa, Arabidopsis thaliana
MSEEVPQQFPSSKRQLHPSLSSMKPPLVAPGEYHRFDAAETRGGGAVADQVVSDAIVIKSTLKRKTDLVNQIVEVNELNTGVLQTPVSGKGGKAKKTSRSAKSNKSGTLASGSNAGSPGNNFAQAGTCRYDSSLGLLTKKFINLIKQAEDGILDLNKAADTLEVQKRRIYDITNVLEGIGLIEKTLKNRIQWKGLDVSKPGETIESIANLQDEVQNLAAEEARLDDQIRESQERLTSLSEDENNKRLLFVTENDIKNLPCFQNKTLIAVKAPHGTTLEVPDPDEAGGYQRRYRIILRSTMGPIDVYLVSQFEESFEDIPQADEPSNVPDEPSNVPDVPSNLPSTSGLPENHDVSMPMKEESTERNMETQEVDDTQRVYSDIESHDFVDGIMKIVPPDLDMGVDYWFRSEVGEVSITDMWPDESGPDWNQMITFDQDHAGPSDNKILEQPQTPSSPTPEESTATRSPTGS

SEQ ID NO: 3395 - protein, 532 aa, Arabidopsis thaliana
MSGVVRSSPGSSQPPPPPPHHPPSSPVPVTSTPVIPPIRRHLAFASTKPPFHPSDDYHRFNPSSLSNNNDRSFVHGCGVVDREEDAVVVRSPIFPSEIGLEIRGCFGDFDCYLLLLSLIQKLRSVRLSSIRVNFCRLFSFAMSRKRKATMDMVVAPSNNGFTSSGFTNIPSSPCQTPRKGGRVNIKSKAKGNKSTPQTPISTNAVRSFYEISFMSRVTSSPITLTPSGSCRYDSSLGLLTKKFVNLIKQAKDGMLDLNKAAETLEVQKRRIYDITNVLEGIDLIEKPFKNRILWKGVDACPGDEDADVSVLQLQAEIENLALEEQALDNQIRWLFVTEEDIKSLPGFQNQTLIAVKAPHGTTLEVPDPDEAADHPQRRYRIILRSTMGPIDVYLVSEFEGKFEDTNGSGAAPPACLPIASSSGSTGHHDIEALTVDNPETAIVSHDHPHPQPGDTSDLNYLQEQVGGMLKITPSDVENDESDYWLLSNAEISMTDIWKTDSGIDWDYGIADVSTPPPGMGEIAPTAVDSTPR

SEQ ID NO: 3396 - protein, 514 aa, Arabidopsis thaliana
MSGVVRSSPGSSQPPPPPPHHPPSSPVPVTSTPVIPPIRRHLAFASTKPPFHPSDDYHRFNPSSLSNNNDRSFVHGCGVVDREEDAVVVRSPIFPSEIGLEIRGCFGDFDCYLLLLSLIQKLRSVRLSSIRVNFCRLFSFAMSRKRKATMDMVVAPSNNGFTSSGFTNIPSSPCQTPRKGGRVNIKSKAKGNKSTPQTPISTNAVRSFYEISFMSRVTSLLTKKFVNLIKQAKDGMLDLNKAAETLEVQKRRIYDITNVLEGIDLIEKPFKNRILWKGVDACPGDEDADVSVLQLQAEIENLALEEQALDNQIRWLFVTEEDIKSLPGFQNQTLIAVKAPHGTTLEVPDPDEAADHPQRRYRIILRSTMGPIDVYLVSEFEGKFEDTNGSGAAPPACLPIASSSGSTGHHDIEALTVDNPETAIVSHDHPHPQPGDTSDLNYLQEQVGGMLKITPSDVENDESDYWLLSNAEISMTDIWKTDSGIDWDYGIADVSTPPPGMGEIAPTAVDSTPR

SEQ ID NO: 3397 - protein, 396 aa, Arabidopsis thaliana
MAATSNSGEDPTLSYHHRSPFRFELLQSISSSDPRYSSLTPSSTNRPFSVSQSLPNSQLSPLISPHWDDSYSQITQKVQKSRKNHRIQLGSIANMSGGESIDIAKVIVKQESSPQNVKRVYNKSKGGTKLLKAGKRMANGEVQNGGLNGASINCRYDSSLGLLTKKFVKLIQEAEDGTLDLNYCAVVLEVQKRRIYDITNVLEGIGLIEKTTKNHIRWKGADNLGQKDLGDQISRLKSEVESMQSEESRLDDLIRERQEALRSLEEDDYCRRYMFMTEEDITSLPRFQNQTLLAIKAPTASYIEVPDPDEMSFPQQYRMVIRSRMGPIDVYLLSKYKGDSAETSDKLGNESDQKAPVGVDTPSLKIVTSDTDLKADYWFESDAEVSLTDLWSNFNS

SEQ ID NO: 3398 - protein, 396 aa, Arabidopsis thaliana
MAATSNSGEDPTLSYHHRSPFRFELLQSISSSDPRYSSLTPSSTNRPFSVSQSLPNSQLSPLISPHWDDSYSQITQKVQKSRKNHRIQLGSIANMSGGESIDIAKVIVKQESSPQNVKRVYNKSKGGTKLLKAGKRMANGEVQNGGLNGASINCRYDSSLGLLTKKFVKLIQEAEDGTLDLNYCAVVLEVQKRRIYDITNVLEGIGLIEKTTKNHIRWKGADNLGQKDLGDQISRLKSEVESMQSEESRLDDLIRERQEALRSLEEDDYCRRYMFMTEEDITSLPRFQNQTLLAIKTPTASYIEVPDPDEMSFPQQYRMVIRSRMGPIDVYLLSKYKGDSAETSDKLGNESDQKAPVGVDTPSLKIVTSDTDLKADYWFESDAEVSLTDLWSNFNS

SEQ ID NO: 3399 - protein, 426 aa, Arabidopsis thaliana
MAATSNSGEDPTLSYHHRSPFRFELLQSISSSDPRYSSLTPSSTNRPFSVSQSLPNSQLSPLISPHWDDSYSQITQKVQKSRKNHRIQLGSIANMSGGESIDIAKVIVKQESSPQNVKRVYNKSKGGTKLLKAGKRMANGEVQNGGLNGASINCRYDSSLGLLTKKFVKLIQEAEDGTLDLNYCAVVLEVQKRRIYDITNVLEGIGLIEKTTKNHIRWKGADNLGQKDLGDQISRLKSEVESMQSEESRLDDLIRERQEALRSLEEDDYCRRYMFMTEEDITSLPRFQNQTLLAIKAPTASYIEVPDPDEMSFPQQYRMVIRSRMGPIDVYLLRYLVTHSTLCVWSYLYICQSVLITGNKHDRSKYKGDSAETSDKLGNESDQKAPVGVDTPSLKIVTSDTDLKADYWFESDAEVSLTDLWSNFNS

SEQ ID NO: 3400 - protein, 276 aa, Glycine max
  unsure (1)..(276): unsure at all Xaa locations
IRLEGIGLIEKKLKNRIQWKGLDVSRPGEADDSFASLQAEVENLTMKERQLDEQIREMQERLRDLSEDENNDKLLFVTEEDIKNLPCFQNETLIAIKAPHGTTLEVPDPDEAVDYLQRRYRIVLRSTMGPIDLYLVSQFEEKFEEINGADVAPKLPSSPDVTKQQSTVVPEXXRGKHIEVQGQAAPGPSSDFTPSQDFVSGIMKIVPSDVASEADYWLLSDADVSITDMWRTEPGVEWNELEPLQEDYCMTDENTTTPSHPSNVGEVSSASKPTGG

SEQ ID NO: 3401 - protein, 260 aa, Glycine max
  unsure (1)..(260): unsure at all Xaa locations
MSSAAGAPDRRASPPRVAAGAPTRPPLKRHLAFITKPPFAPPDEYHSFSSIGSRRAADEAVVVRSPYIMKRKSGMNDSEGESLAQKWSNSPGYTNVSNVTNNSPFKTPVSAKGGRTQKAKASKGXXSCPPTPISNAGSPSPLTPASSCRYDSSLGLLTKKFINLVKHAEGGILDLNKAAETLEVQKRRIYDITNVLEGIGLIEKKLKNRIHWKGIESATSGDVDGDISLLKAEVEKLSLEEQGIDDQIREMQERLRNLSE

SEQ ID NO: 3402 - protein, 196 aa, Glycine max
  unsure (1)..(196): unsure at all Xaa locations
MSASRAPPAANPPDQIMPMKRQLPFSSMKPPFVAAGDYHRHXXPPKXIVVKTPLLKRKSEVADFEADSGDRMTAGFTEAANSPFQTPVSGKTGKGGKSSRLTKGNRVGTQTPGSNIGSPAGSNLTPAGPCRYDSSLGLLTKKFINLIKQAEDGILDLNKAADTLEVQKMRIYDITNVLEGIGLIEKRLQDRIQWKG

SEQ ID NO: 3403 - protein, 198 aa, Glycine max
  unsure (1)..(198): unsure at all Xaa locations
MDQYQDDYDFEGGNGKSGKGGRDKSKXSYVGPGRRDNSLNVLTRKFIDLIRKSPNQTVDLNNAVKILNVQKRRIYDITNVLEGIQYIEKVLKNKIKWVGXXQVTEELDDKINELEELENLQKEESDIDHWINYLQENLGDLTKDEVNNNYSYVTFDDVKSVNXPCQRNQPFLVIRAPKGTVLEVPSPCFINKKKKKKK

SEQ ID NO: 3404 - protein, 181 aa, Glycine max
  unsure (1)..(181): unsure at all Xaa locations
TRIKAPHGTTLEVPDPEEAVDYPQRRYRIILRSTMGPIDGYLISHFEEKFEEVNGAEPPMIPLASSSGSNEQLMTEMVPAGSGKELEPQTQLSSHAFSDSFXXEFAGGMLKGQSSDVDNDADYWLLSDADVSITDMWRTDSTVDWNGIDMLHPDFGIISRPQSPSSGLAEVPSTGANSIQK

SEQ ID NO: 3405 - protein, 182 aa, Glycine max
TRIKAPHGTTLEVPDPEEAVDYPQRRYRIILRSTMGPIDGYLISHCEENFEEVNGAEPPMIPLASSSGSNEQLMTEMVPAGSGKELEPQTQLSSHAFSDLNASQEFAGGMLKGQSSDVDNDADYWLLSDADVSITDMWRTDSTVDWNGIDMLHPDFGIISRPQSPSSGLAEVPSTGANSIQK

SEQ ID NO: 3406 - protein, 123 aa, Glycine max
  unsure (1)..(123): unsure at all Xaa locations
XAVNNCRYDSSLGLLTKKFVSLIQDAKDGTLDLNRTAEILEVQKRRIYDITNVLEGVGLIEKTSKNHIQWKGCDGLGPQELEDQVNSLKVLILFTCQLVQMFYIIYAFRLLYMVALNCEPHLX

SEQ ID NO: 3407 - protein, 115 aa, Glycine max
  unsure (1)..(115): unsure at all Xaa locations
XSVADPAPVTPSRHEKSLGLLTSKFVSLLQEAEDGVLDLKAAADTLAVRQKRRIYDITNVLEGIGLIEKKSKNSIQWKGVGPGCNTREIADKLIDLKAELADLEQREQELDQQRV

SEQ ID NO: 3408 - protein, 181 aa, Glycine max
  unsure (1)..(181): unsure at all Xaa locations
XTKEDILSLPCFQNQEIIAIKAPKASCIEVPDPDEELGFRQRQYKMIVRSAIGPINLYLLSKDDSKFEDDSAKRMKLMDPSWNSDPIRKRGVGLLESQHDEKNPSEXXFSLQGSQAFGIQEITPTDFEMEDDYWFQSDPGVSQTELWEXRXAAVAISSNQSLLYEFDSWISPLHKNTRWPI

SEQ ID NO: 3409 - protein, 226 aa, Glycine max
  unsure (1)..(226): unsure at all Xaa locations
XNPKILSHRSHQFNSIPCKLNETLIAIKALHGTTLEVPNPEEAVDHRERRYKIILRSTMGXIDVYLMSQFEEVSGADLPMIPLASSFGSIEQLMTEMATKCSGKELEPQTQLSSQAFSDLXXILHRWVVDLWSSCGDEMMXTXLGADHLIQTTNIWMMPLPVKEDKSGXXTPLPMNEDKSGXTPQGLSXXSMRLVQQGTQRETLTKFYQVPKVSLLKIKTNTYSVF

SEQ ID NO: 3410 - protein, 471 aa, Oryza sativa (japonica cultivar-group)
MDGSAAIPPRPAPTPPAPAPAPPQVFLRRSVLPPPPAPHHAPPPPGAHVHYFRAASPIPIFRAAASSRPPRPPPPSTTTAPPPPAAPAVTPARPPPQQPAVAVAAPPPATTMATATEEVAAPATGNPMANAADNEEKNERETVQSEVAKGETVQGPDKECTTGAVKGIKRPRKPKGFKKGDAGPSLFSPNNCRYDSSLGLLTKKFINLLEGAEDGTLDLNKAAETLEVQKRRIYDITNVLEGVDLIEKTLKNMIRWKGFDMSKPKERERQISALKEEIESLYDEESRLDDEIMEAQEKLNALRVDEDRRKLLYVSKEDINAIPRFQGSTLIAVNAPRGTYIEVPDPNLDMDIYKDLDNQEKHYQIVFRSAMGPVDCFLISNHQETFNADQQMADNLDAAVTSGSSQAPQQMDYVQASEIGESNGVREHTSEPSKRDDPVPGIVKIVPSDDIAADYWLSSDADVSMTDTWGT

SEQ ID NO: 3411 - protein, 431 aa, Daucus carota
MKPPFVPSDDYYRFGESRGVADHEADVIIVKSTPSKRKPGNYNEVESSRLSMSPAYTNTVKSPNQTPVSGKGGRVYGRSNATKSLASVPQTPMSNAGSPSPLTPAGSCRYDSSLGLLTKKFINLIKQAEDGTLDLNNAAETLEVQKRRIYDITNVLEGIGLIEKKLKNRIHWKGIDASRPGEMEDDSNVLQAEVEKLSLEEKRLDDRIREMQEKLRDLSEDEANQKWLFVTEEDIKGLECFMNKTLIAIKAPHGTTLEVPDPDEVVDYPQRRYRIILRSTMGPIDVYLVSQFEEKFDEMNSVQPSMSLPLASSTGSNDNPAAETAIVGHGLENGTMTQDGHGVNSDLYTSEDISGGIMKILPSELDNDADYWLLTDPSISMTDMWKTDAGVEWDGASLLNEEFELPCISPRPQTPPSGVADVSTVANGTQR

SEQ ID NO: 3412 - protein, 439 aa, Nicotiana tabacum
MQQPHHQQRELPFTSSKPPLGDYHRFSTDPLQQPEAILVKSTPLKRKSETTNYKQGVGAQITDSGYADVSSPMQTPISGKVGKAQKVPRTSKARSASQAATSNLGSPSGNNATPVGPCRYDSSLGLLTKKFINLIKHAEDGILDLNKAADTLEVQKRRIYDITNVLEGIGLIEKKLKNRIQWKGLDVSRPGEVDDSVTSLQAEVENMTIEERRLNEQTREMQERLTDLCEDENNQRWLLVTEDDIKSLPCLQNETLIAIKAPHGTTLEVPDPDEAVDYPQRRYRIVLRSTMGPIDVYLVSQFEEKFEEINAVEAPSAMPSTSGFNENDTATLPTEENGGVDGRIDEKENQSVCADVGTSQDFASGIMKIVSDVDNEEDYWLLSDADVSITDIWRADSVLDWNELNVIHEDYSIANVSTPRAQTPPSSTTELPSANTTGS

SEQ ID NO: 3413 - protein, 165 aa, Populus alba
LTKKFINLIKHAEDGILDLNKAAETLEVQKRRIYDITNVLEGIGLIEKKLKNRIQWKGLDVSRPGEADDNNVATLQAEVENLTMEERRLDEQTREMQERLRDLSEDENNQKWLFVTEEDIKSLPGFQNETLIAIKAPHGTTLEVPDPDEAVDYPQRRYRILLRST

SEQ ID NO: 3414 - protein, 319 aa, Triticum aestivum
  unsure (1)..(319): unsure at all Xaa locations
XPFAVPAEYHRFPLPPSSSAPAAASRGSAGGDVEEGIVITTPLKRKAPCERNDAIESTEWMITSPGFTGRPRMTPGSGKAARTYKSKAKGSKDGLQTPISNAGSPGTPLTPGSSRAEHSLGELTKKCISLLKHAEDGILDLNNVAEILVVKKRRIYDITNVLEGIGLLEKEXLKNRIRWEGLDDSXANLDNEISILETELENLKLQEKALDNRISEMHEKVRELTEEENNQRWLYLTEDDIKGLPCFQNETLIAIKAPHGTTLEVPDPDEAGDYVQRRYTIVIRSTMGSIDLYLVSKFEENMEELVGVTTPPRHANVAX

SEQ ID NO: 3415 - protein, 151 aa, Triticum aestivum
RWKGLDDSGVELDDGLSGLQTEVENLNLQEQALDERISDMREKLRGLTEDENSQRWLYVTEDDIKGLPCFQNETLIAIKAPHGTTLEVPDPDEAGDYLQRRYRIVLRSTLCPIDVYLVSQYDDGFENLCGAATPARHTNVPKSGPCEDLHA

SEQ ID NO: 3416 - protein, 147 aa, Triticum aestivum
  unsure (1)..(147): unsure at all Xaa locations
MAAAAGGTSSEGAARVLLQRYQPFGSPPGEYHHFGPADGGGSADMTEAVVLRTPLKRKHNREDNEVAESNDWMMSPGYANAANSPIPTPPSGKGSKMSAKPKAAKGQKSCPQTPLFSGSPGNPATPVGGCRYDSSLGLLTKKFLNLX

SEQ ID NO: 3417 - protein, 112 aa, Triticum aestivum
KHYQLLLRSSMGPIDCFLISDHQGVSDPEQVAQDNLGHASTAGGSDAPRPVDESQAPEKGEGDTVGKHTSEPSSTHEPMSGILKILLPDTDVDADYWLASDIDATMTETWAT

SEQ ID NO: 3418 - protein, 458 aa, Triticum sp.
MSGGGRPPAAQKILQSLRPPPVFSTPSRPPFASPDDYHRFHAPTTPSATGSGGIGSGGVGGDIDEGLVIRTQLKRKATREENNAAESSDCMIVTTGVTGNPLLTPVSGKAVKNSKSKTKNNKAGPQTPTPNVGSPLNPSTPAGTCRYDSSLGLLTKKFINLLKQAEDGILDLNNAAETLEVQKRRIYDITNVLEGIGLIEKTLKNRIRWKGLDDSGVELDNGLSGLQTEVENLNLQEQALDERISDMREKLRGLTEDENSQRWLYVTEDDIKGLPCFQNETLIAIKAPHGTTLEVPDPDEAGDYLQRRYRIVLRSTLGPIDVYLVSQFDDGFENLGGAATPPRHTNVPKPGPCEDLHATNATQSSKSINVEYNIQHRQNTPQDPSSSNDYGGMTRIIPSDVNTDADYWLLTEGDVSITDMWETAPEVQWDTAVFLPEDVSIPHAHHSPRMQVPSMDQP

SEQ ID NO: 3419 - protein, 480 aa, Zea mays
  unsure (1)..(480): unsure at all Xaa locations
MSGVGSGRPPAAQKILQSLRPPLSFATPSRPPFAAPDDYHRFPTPAAATAPAATSGGVGAGAPPRDTIEEGLVIRTPLKRKATSEENDAAAEPSDCIITSPMPTSVSGKTVKASKAKAKNSKTGPQTPTSNVGSPLNPPTPVGTCRYDSSLGLLTKKFINLLKQAPDGILDLNNAAETLEVQKRRIYDITNVLEGIGLIEKTLKNRIRWKALDDSSVQLDNGISALQAEVENLSLQEQALDERISDMREKLRGLTEDENNKRWLYVTEDDIKGLPSFQNETLIAIKAPHGTTLEVPDPDEAGDYLQRRYRIVLRSTMGPIDVYLVSQFDEKFEELGGVATPVKHSNVPRHQPVEDFNTYAGQSSTPMDVAHDVQHGQKIPQDPSALHDFGGMTRISPSDVHTDSDYWLLTEGDVSMTDMWKTGQEVQWDQIDFLSEDVVTPRAHNQQPVTVDGPHMEVPSMDPXYHNGPTKLTSGAVSFE

SEQ ID NO: 3420 - protein, 196 aa, Encephalitozoon cuniculi
MTRKPTSDRLSSTRSENSLYNLTRRFLKLVSMSPDRNVSIHQASIELNVGKRRIYDITNVLEGLGLLSKWSVSNAKWIGGNVDRYILDGEEKENKENHRLDPEGILRGDDLDATLCRLNEEISMLSQSEKNLANAYVTYADLQRLPSLDGSLVFAVKAPSETTMEYPRYEKGFYKLKLSSEQGTINIFYVSDEKKD

SEQ ID NO: 3421 - protein, 342 aa, Caenorhabditis elegans
MEDSYNDMEDPGFRQLSDMELQKALEMTKQSSIKNNLMLGLDNELDFDFDFDEDEDLDQPQMGTRADKSLGLLAKRFIRMIQYSPYGRCDLNTAAEALNVRQKRRIYDITNVLEGIGLIEKRSKNMIQWKGGDFMLNVKEGKRQSATTEEEDRMEQLKAEIEQLNKEEELIEQRQRWLQQSLRNMTESVENNKLSYVLRSQLAEIQGSDLTIGIQTRVGTQVRLSDPEQVEIHGGPSWCYLKDPSGPLRAAIVSNHELHDFVQRERAKRPGEEHVDADAPDEMMDDSRYRNRRTINDDEMFGFEQKVPAMKHLEPPPASDDYVYSSTGDEYRGDSIVDLYGD

SEQ ID NO: 3422 - protein, 287 aa, Caenorhabditis elegans
MQSMDPSSIDLGSIPGGSEQQQHEDGAAAAAGSPKEVFRSQQSLGLITQRFMSLRQRNEVLNLNEVAKELNISKRRVYDVINVLEGLGYVEKVEKNNIRWIGDNNNSEEQNALEARVEMLRQQEKLLELMIRDAQAIIELHFEDPIERPYNYVSKEDIRKTAEPNTKSIIVKSELDTSSSFEIQVTDPSTSGSHDMIVRNKNGVKSHALLFTNDPPEYGDEEDEDDVKKLSSQKRFETSEALRVTLAEMLTDPTTISSSPKHIKLEEPEEIDTEDLGARNSQNSEKI

SEQ ID NO: 3423 - protein, 470 aa, Caenorhabditis elegans
MPRNRRSQPDHAHKMGVAYCTLYSESYSFSHENRSEHGFQLKICDFLELNRFISVMQSMDPSSIDLGSIPGGSEQQQHEDGAAAAAGSPKEVFRSQQSLGLITQRFMSLRQRNEVLNLNEVAKELNISKRRVYDVINVLEGLGYVEKVEKNNIRWIGDNNNSEEQNALEARVEMLRQQEKLLELMIRDAQAIIELHFEDPIERPYNYVSKEDIRKTAEPNTKSIIVKSELDTSSSFEIQVTDPSTSGSHDMIVRNKNGVKSHALLFTNDPPEYGDEEDEDDVKKLSSQKRFETSEALRVTLAEMLTDPTTISSSPKHIKLEEPEEIDTEDLETFAPPEFSENKWSQKIGGGLAILWAWLALMPRPQNGNFFSAKFFKFFPETVARKTFVLPPSTSASQSNAPYLPETPGRGLFFSPFKSLIDPCILPSFSDDLTSGYINITTPSRATGAGAGASGQEDEEPVSVMDFFSD

SEQ ID NO: 3424 - protein, 412 aa, Caenorhabditis elegans
MDPSSIDLGSIPGGSEQQQHEDGAAAAAGSPKEVFRSQQSLGLITQRFMSLRQRNEVLNLNEVAKELNISKRRVYDVINVLEGLGYVEKVEKNNIRWIGDNNNSEEQNALEARVEMLRQQEKLLELMIRDAQAIIELHFEDPIERPYNYVSKEDIRKTAEPNTKSIIVKSELDTSSSFEIQVTDPSTSGSHDMIVRNKNGVKSHALLFTNDPPEYGDEEDEDDVKKLSSQKRFETSEALRVTLAEMLTDPTTISSSPKHIKLEEPEEIDTEDLETFAPPEFSENKWSQKIGGGLAILWAWLALMPRPQNGNFFSAKFFKFFPETVARKTFVLPPSTSASQSNAPYLPETPGRGLFFSPFKSLIDPCILPSFSDDLTSGYINITTPSRATGAGAGASGQEDEEPVSVMDFFSD

SEQ ID NO: 3425 - protein, 805 aa, Drosophila melanogaster
MSKFFVNVAPINNSNSSSSHTTTSSNTQRHQQHQQHYGGSGTTGHTMVARRLNYDLHGGTTSINNNNNIVIKNESVDLDYDHVLSSSDSNSNGGVAAHLRDHVYISLDKGHNTGAVATAAAAATAGQTQQQLQQQHHHQNQQQRKATGKSNDITNYYKVKRRPHAVSDEIHPKKQAKQSAHHQTVYQKHTASSAPQQLRHSHHQLRHDADAELDEDVVERVAKPASHHPFSLSTPQQQLAASVASSSSSGDRNRADTSLGILTKKFVDLLQESPDGVVDLNEASNRLHVQKRRIYDITNVLEGINILEKKSKNNIQWRCGQSMVSQERSRHIEADSLRLEQQENELNKAIDLMRENLAEISQEVENSGGMAYVTQNDLLNVDLFKDQIVIVIKAPPEAKLVLPNTKLPREIYVKAENSGEINVFLCHDTSPENSPIAPGAGYVGAPGAGCVRTATSTRLHPLTNQRLNDPLFNNIDAMSTKGLFQTPYRSARNLSKSIEEAAKQSQPEYNNICDIAMGQHHNLNQQQQQQQQQLLQQPEEDDVDVELNQLVPTLTNPVVRTHQFQQHQQPSIQELFSSLTESSPPTPTKRRREAAAAAIAAGSSTTATTTLNSHNNRNHSNHSNHSNHSSSNNSKSQPPTIGYGSSQRRSDVPMYNCAMEGATTTSATADTTAATSRSAAASSLQMQFAAVAESNNGSSSGGGGGGGGYGSIAGAGANADPHQPYSHDRNSLPPGVADCDANSNSSSVTLQGLDALFNDIGSDYFSNDIAFVSINPPDDNDYPYALNANEGIDRLFDFGSDAYGP

SEQ ID NO: 3426 - protein, 805 aa, Drosophila melanogaster
MSKFFVNVAPINNSNSSSSHTTTSSNTQRHQQHQQHYGGSGTTGHTMVARRLNYDLHGGTTSINNNNNIVIKNESVDLDYDHVLSSSDSNSNGGVAAHLRDHVYISLDKGHNTGAVATAAAAATAGHTQQQLQQQHHHQNQQQRKATGKSNDITNYYKVKRRPHAVSDEIHPKKQAKQSAHHQTVYQKHTASSAPQQLRHSHHQLRHDADAELDEDVVERVAKPASHHPFSLSTPQQQLAASVASSSSSGDRNRADTSLGILTKKFVDLLQESPDGVVDLNEASNRLHVQKRRIYDITNVLEGINILEKKSKNNIQWRCGQSMVSQERSRHIEADSLRLEQQENELNKAIDLMRENLAEISQEVENSGGMAYVTQNDLLNVDLFKDQIVIVIKAPPEAKLVLPNTKLPREIYVKAENSGEINVFLCHDTSPENSPIAPGAGYVGAPGAGCVRTATSTRLHPLTNQRLNDPLFNNIDAMSTKGLFQTPYRSARNLSKSIEEAAKQSQPEYNNICDIAMGQHHNLNQQQQQQQQQLLQQPEEDDVDVELNQLVPTLTNPVVRTHQFQQHQQPSIQELFSSLTESSPPTPTKRRREAAAAAIAAGSSTTATTTLNSHNNRNHSNHSNHSNHSSSNNSKSQPPTIGYGSSQRRSDVPMYNCAMEGATTTSATADTTAATSRSAAASSLQMQFAAVAESNNGSSSGGGGGGGGYGSIAGAGANADPHQPYSHDRNSLPPGVADCDANSNSSSVTLQGLDALFNDIGSDYFSNDIAFVSINPPDDNDYPYALNANEGIDRLFDFGSDAYGP

SEQ ID NO: 3427 - protein, 370 aa, Drosophila melanogaster
MYKRKTASIVKRDSSAAGTTSSAMMMKVDSAETSVRSQSYESTPVSMDTSPDPPTPIKSPSNSQSQSQPGQQRSVGSLVLLTQKFVDLVKANEGSIDLKAATKILDVQKRRIYDITNVLEGIGLIDKGRHCSLVRWRGGGFNNAKDQENYDLARSRTNHLKMLEDDLDRQLEYAQRNLRYVMQDPSNRSYAYVTRDDLLDIFGDDSVFTIPNYDEEVDIKRNHYELAVSLDNGSAIDIRLVTNQGKSTTNPHDVDGFFDYHRLDTPSPSTSSHSSEDGNAPACAGNVITDEHGYSCNPGMKDEMKLLENELTAKIIFQNYLSGHSLRRFYPDDPNLENPPLLQLNPPQEDFNFALKSDEGICELFDVQCS

SEQ ID NO: 3428 - protein, 429 aa, Xenopus laevis
MRKGFQGGHEKLLLPGLQGTDKGSGLAGGFIAGGGGASVVGAGGGGYVQIISSPGPPLHHHGLCITEQAASFIYSTPHGPAARAGQLQPVLGRPPAKRRLELGDGSHQYLSDVLKTPKGKGRAATHCPDSPKTPKSPLEKTRYDTSLGLLTKKFIQLLSQSSDGVVDLNKAAEVLKVQKRRIYDITNVLEGIHLIKKKSKNNIQWMGCSLPDDGGNLAKSQELSKELSELAQEENKLDELIKNCTLDLKHLTENAENQRLAYVTYQDIRKISGLKEQTVIVIRAPPETRLEVPDPVESLQIHLSSSQGAIEVYLCPEENESSSPVKQCNQDHNGNVSKPKPHTKDSLSPNMENVNGSVEGISPLTSPTNLLQQTEDQISLNLDAPFVNLLPPSMQEDYLLSLGDEEGISDLFDAYELEKLPSLDDFMCS

SEQ ID NO: 3429 - protein, 403 aa, Gallus gallus
MATAGGAAGLAALLGGASPHLLIVSASEEPAGGCRPDADLLLFATPQPSRPGPAPRRPALGRPPVKRKLNLETDHQYIAESLPAARGRARIPGRGAKSPGEKSRYETSLNLTTKRFLELLSQSPDGVVDLNWAAEVLKVQKRRIYDITNVLEGIQLITKKSKNNIQWLGSQVAAGASSRQRLLEKELRDLQAAERQLDDLIQTCTVRLRLLTEDPSNQHAAYVTCQDLRSIVDPSEQMVMVIKAPPETQLQVSDPGEAFQVSVRSTQGPIDVFLCPEDSSGVCSPVKSPFKAPAEELSPGSSQQRASPLLHSAQDVNMLLPEALLPGTALPTKCPTEDVSLSPLASMDTLLEHGKDDFPGFLADEFIALSPPQPQDYHFGLEEGEGISELFDCDFGDFTHLDF

SEQ ID NO: 3430 - protein, 281 aa, Macaca fascicularis
MSQQRPARKLPSLLLDPAEETVRRRCRDPINVEGLLPSKIRINLEDNVQYVSMRKALKVKRPRFDVSLVYLTRKFMDLVRSAPGGILDLNKVATKLGVRKRRVYDITNVLDGIDLVEKKSKNHIRWIGSDLSNFGAVPQQKKLQEELSDLSAMEDALDELIKDCAQQLFELTDDEENERLAYVTYQDIHSIQAFHEQIVIAVKAPAETRLDVPAPREDSITVHIRSTNGPIDVYLCEVEQGQTGSKRSEGVGTSSSESTHAEGPEEEENPQQSEELLEVSN

SEQ ID NO: 3431 - protein, 334 aa, Homo sapiens
AKRRLELGESGHQYLSDGLKTPKGKGRAALRSPDSPKTPKSPSEKTRYDTSLGLLTKKFIQLLSQSPDGVLDLNKAAEVLKVQKRRIYDITNVLEGIHLIKKKSKNNVQWMGCSLSEDGGMLAQCQGLSKEVTELSQEEKKLDELIQSCTLDLKLLTEDSENQRLAYVTYQDIRKISGLKDQTVIVVKAPPETRLEVPDSIESLQIHLASTQGPIEVYLCPEETETHSPMKTNNQDHNGNIPKPASKDLASTNSGHSDCSVSMGNLSPLASPANLLQQTEDQIPSNLEGPFVNLLPPLLQEDYLLSLGEEEGISDLFDAYDLEKLPLVEDFMCS

SEQ ID NO: 3432 - protein, 465 aa, Homo sapiens
MRKGIQPALEQYLVTAGGGEGAAVVAAAAAASMDKRALLASPGFAAAAAAAAAPGAYIQILTTNTSTTSCSSSLQSGAVAAGPLLPSAPGAEQTAGSLLYTTPHGPSSRAGLLQQPPALGRGGSGGGGGPPAKRRLELGESGHQYLSDGLKTPKGKGRAALRSPDSPKTPKSPSEKTRYDTSLGLLTKKFIQLLSQSPDGVLDLNKAAEVLKVQKRRIYDITNVLEGIHLIKKKSKNNVQWMGCSLSEDGGMLAQCQGLSKEVTELSQEEKKLDELIQSCTLDLKLLTEDSENQRLAYVTYQDIRKISGLKDQTVIVVKAPPETRLEVPDSIESLQIHLASTQGPIEVYLCPEETETHSPMKTNNQDHNGNIPKPASKDLASTNSGHSDCSVSMGNLSPLASPANLLQQTEDQIPSNLEGPFVNLLPPLLQEDYLLSLGEEEGISDLFDAYDLEKLPLVEDFMCS

SEQ ID NO: 3433 - protein, 465 aa, Homo sapiens [sequence omitted]

SEQ ID NO: 3434 - protein, 421 aa, Homo sapiens
VDPGAAGAMAEAGPQAPPPPGTPSRHEKSLGLLTTKFVSLLQEAKDGVLDLKLAADTLAVRQKRRIYDITNVLEGIGLIEKKSKNSIQWKGVGPGCNTREIADKLIELKAEIEELQQREQELDQHKVWVQQSIRNVTEDVQNSCLAYVTHEDICRCFAGDTLLAIRAPSGTSLEVPIPEGLNGQKKYQIHLKSVSGPIEVLLVNKEAWSSPPVAVPVPPPEDLLQSPSAVSTPPPLPKPALAQSQEASRPNSPQLTPTAVPGSAEVQGMAGPAAEITVSGGPGTDSKDSGELSSLPLGPTTLDTRPLQSSALLDSSSSSSSSSSSSSNSNSSSSSGPNPSTSFEPIKADPTGVLELPKELSEIFDPTRECMSSELLEELMSSEVFAPLLRLSPPPGDHDYIYNLDESEGVCDLFDVPVLNL

SEQ ID NO: 3435 - protein, 413 aa, Homo sapiens
MAEAGPQAPPPPGTPSRHEKSLGLLTTKFVSLLQEAKDGVLDLKLAADTLAVRQKRRIYDITNVLEGIGLIEKKSKNSIQWKGVGPGCNTREIADKLIELKAEIEELQQREQELDQHKVWVQQSIRNVTEDVQNSCLAYVTHEDICRCFAGDTLLAIRAPSGTSLEVPIPEGLNGQKKYQIHLKSVSGPIEVLLVNKEAWSSPPVAVPVPPPEDLLQSPSAVSTPPPLPKPALAQSQEASRPNSPQLTPTAVPGSAEVQGMAGPAAEITVSGGPGTDSKDSGELSSLPLGPTTLDTRPLQSSALLDSSSSSSSSSSSSSNSNSSSSSGPNPSTSFEPIKADPTGVLELPKELSEIFDPTRECMSSELLEELMSSEVFAPLLRLSPPPGDHDYIYNLDESEGVCDLFDVPVLNL

SEQ ID NO: 3436 - protein, 416 aa, Homo sapiens
MAEAGPQAPPPPGTPSRHEKSLGLLTTKFVSLLQEAKDGVLDLKLAADTLAVRQKRRIYDITNVLEGIGLIEKKSKNSIQWKGVGPGCNTREIADKLIELKAEIEELQQREQELDQHKVWVQQSIRNVTEDVQNSCLAYVTHEDICRCFAGDTLLAIRAPSGTSLEVPIPEGLNGQKKYQIHLKSVSGPIEVLLVNKEAWSSPPVAVPVPPPEDLLQSPSAVSTPPPLPKPALAQSQEASRPNSPQLTPTAVPGSAEVQGMAGPAAEITVSGGPGTDSKDSGELSSLPLGPTTLDTRPLQSSALLDSSSSSSSSSSSSSSSSNSNSSSSSGPNPSTSFEPIKADPTGVLELPKELSEIFDPTRECMSSELLEELMSSEVFAPLLRLSPPPGDHDYIYNLDESEGVCDLFDVPVLNL

SEQ ID NO: 3437 - protein, 345 aa, Homo sapiens
MAAAEPASSGQQAPAGQGQGQRPPPQPPQAQAPQPPPPPQLGGAGGGSSRHEKSLGLLTTKFVSLLQEAKDGVLDLKAAADTLAVRQKRRIYDITNVLEGIDLIEKKSKNSIQWKGVGAGCNTKEVIDRLRYLKAEIEDLELKERELDQQKLWLQQSIKNVMDDSINNRFSYVTHEDICNCFNGDTLLAIQAPSGTQLEVPIPEMGQNGQKKYQINLKSHSGPIHVLLINKESSSSKPVVFPVPPPDDLTQPSSQSLTPVTPQKSSMATQNLPEQHVSERSQALQQTSATDISSGSISGDIIDELMSSDVFPLLRLSPTPADDYNFNLDDNEGVCDLFDVQILNY

SEQ ID NO: 3438 - protein, 346 aa, Homo sapiens
MAAAEPASSGQQAPAGQGQGQRPPPQPPQAQAPQPPPPPQLGGAGGGSSRHEKSLGLLTTKFVSLLQEAKDGVLDLKAAADTLAVRQKRRIYDITNVLEGIDLIEKKSKNSIQWKGVGAGCNTKEVIDRLRYLKAEIEDLELKERELDQQKLWLQQSIKNVMDDSINNRFSYVTHEDICNCFNGDTLLAIQAPSGTQLEVPIPEMGQNGQKKYQINLKSHSGPIHVLLINKESSSSKPVVFPVPPPDDLTQPSSQSLTPVTPQKSSMATQNLPEQHVSERSQALQQTSATDISSAGSISGDIIDELMSSDVFPLLRLSPTPADDYNFNLDDNEGVCDLFDVQILNY

SEQ ID NO: 3439 - protein, 346 aa, Homo sapiens
MAAAEPASSGQQAPAGQGQGQRPPPQPPQAQAPQPPPPPQLGGAGGGSSRHEKSLGLLTTKFVSLLQEAKDGVLDLKAAADTLAVRQKRRIYDITNVLEGIDLIEKKSKNSIQWKGVGAGCNTKEVIDRLRYLKAEIEDLELKERELDQQKLLLQQSIKNVMDDSINNRFSYVTHEDICNCFNGDTLLAIQAPSGTQLEVPIPEMGQNGQKKYQINLKSHSGPIHVLLINKESSSSKPVVFPVPPPDDLTQPSSQSLTPVTPQKSSMATQNLPEQHVSERSQALQQTSATDISSAGSISGDIIDELMSSDVFPLLRLSPTPADDYNFNLDDNEGVCDLFDVQILNY

SEQ ID NO: 3440 - protein, 437 aa, Homo sapiens
MLQGPRALASAAGQTPKVVPAMSPTELWPSGLSSPQLCPATATYYTPLYPQTAPPAAAPGTCLDATPHGPEGQVVRCLPAGRLPAKRKLDLEGIGRPVVPEFPTPKGKCIRVDGLPSPKTPKSPGEKTRYDTSLGLLTKKFIYLLSESEDGVLDLNWAAEVLDVQKRRIYDITNVLEGIQLIRKKAKNNIQWVGRGMFEDPTRPGKQQQLGQELKELMNTEQALDQLIQSCSLSFKHLTEDKANKRLAYVTYQDIRAVGNFKEQTVIAVKAPPQTRLEVPDRTEDNLQIYLKSTQGPIEVYLCPEEVQEPDSPSEEPLPSTSTLCPSPDSAQPSSSTDPSIMEPTASSVPAPAPTPQQAPPPPSLVPLEATDSLLELPHPLLQQTEDQFLSPTLACSSPLISFSPSLDQDDYLWGLEAGEGISDLFDSYDLGDLLIN

SEQ ID NO: 3441 - protein, 281 aa, Homo sapiens
MSQQRPARKLPSLLLDPTEETVRRRCRDPINVEGLLPSKIRINLEDNVQYVSMRKALKVKRPRFDVSLVYLTRKFMDLVRSAPGGILDLNKVATKLGVRKRRVYDITNVLDGIDLVEKKSKNHIRWIGSDLSNFGAVPQQKKLQEELSDLSAMEDALDELIKDCAQQLFELTDDKENERLAYVTYQDIHSIQAFHEQIVIAVKAPAETRLDVPAPREDSITVHIRSTNGPIDVYLCEVEQGQTSNKRSEGVGTSSSESTHPEGPEEEENPQQSEELLEVSN

SEQ ID NO: 3442 - protein, 275 aa, Homo sapiens
HEKLPSLLLDPTEETVRRRCRDPINVEGLLPSKIRINLEDNVQYVSMRKALKVKRPRFDVSLVYLTRKFMDLVRSAPGGILDLNKVATKLGVRKRRVYDITNVLDGIDLVEKKSKNHIRWIGSDLSNFGAVPQQKKLQEELSDLSAMEDALDELIKDCAQQLFELTDDKENERLAYVTYQDIHSIQAFHEQIVIAVKAPAETRLDVPAPREDSVTVHIRSTNEPIDVYLCEVEQGQTSNKRSEGVGTSSSESTHPEGPEEEENPQQSEELLEVSN

SEQ ID NO: 3443 - protein, 437 aa, Homo sapiens
MALAGAPAGGPCAPALEALLGAGALRLLDSSQIVIISAAQDASAPPAPTGPAAPAAGPCDPDLLLFATPQAPRPTPSAPRPALGRPPVKRRLDLETDHQYLAESSGPARGRGRHPGKGVKSPGEKSRYETSLNLTTKRFLELLSHSADGVVDLNWAAEVLKVQKRRIYDITNVLEGIQLIAKKSKNHIQWLGSHTTVGVGGRLEGLTQDLRQLQESEQQLDHLMNICTTQLRLLSEDTDSQRLAYVTCQDLRSIADPAEQMVMVIKAPPETQLQAVDSSENFQISLKSKQGPIDVFLCPEETVGGISPGKTPSQEVTSEEENRATDSATIVSPPPSSPPSSLTTDPSQSLLSLEQEPLLSRMGSLRAPVDEDRLSPLVAADSLLEHVREDFSGLLPEEFISLSPPHEALDYHFGLEEGEGIRDLFDCDFGDLTPLDF

SEQ ID NO: 3444 - protein, 476 aa, Homo sapiens
LCRQRRPGAERDRALAEACRHGPAPPPPPVTRAARAVSVMALAGAPAGGPCAPALEALLGAGALRLLDSSQIVIISAAQDASAPPAPTGPAAPAAGPCDPDLLLFATPQAPRPTPSAPRPALGRPPVKRRLDLETDHQYLAESSGPARGRGRHPGKGVKSPGEKSRYETSLNLTTKRFLELLSHSADGVVDLNWAAEVLKVQKRRIYDITNVLEGIQLIAKKSKNHIQWLGSHTTVGVGGRLEGLTQDLRQLQESEQQLDHLMNICTTQLRLLSEDTDSQRLAYVTCQDLRSIADPAEQMVMVIKAPPETQLQAVDSSENFQISLKSKQGPIDVFLCPEETVGGISPGKTPSQEVTSEEENRATDSATIVSPPPSSPPSSLTTDPSQSLLSLEQEPLLSRMGSLRAPVDEDRLSPLVAADSLLEHVREDFSGLLPEEFISLSPPHEALDYHFGLEEGEGIRDLFDCDFGDLTPLDF

SEQ ID NO: 3445 - protein, 437 aa, Homo sapiens [sequence omitted]

SEQ ID NO: 3446 - protein, 282 aa, Homo sapiens
MSQQQPAGKLTDLPINPAEETVRRRDATNAECPLPSTIRINSKDDVQPESKRETVNMKPHNKTSLACTTRKFIDILKSAPGGVLSLSQVAAKLAVHRRRIYDIISVLQGVKLIEKTSKNHIQWIGPDFNSGATPEEKKLEEEVSKLSATEDALDKLIEDCSQQLCELTNDKELGKLAYVTLEDIHNLERFQEQTVFVAKLPVEITLEIPISEDSFSLRLSNNDGPVDAYLCLSKKDYEANYTSESAGTSSESTGTSSESRHPEHPEEEENPQQGEELLDMSN

SEQ ID NO: 3447 - protein, 430 aa, Homo sapiens
MDTCQVWPVHTALPTSPALHQHLTGLSHRARPPCGFLRRSPAHARAEVLSSTAFKSSIAKSTTACGFDRHCYRDRSQLSQKGEKAASGLPEIGGVALAAPHLVPEPTDHPPRTPGIRNGGWKVWQWSGTNLSASNSLETGFLAGAVPARALKQLKVKRPPPRSAAFLSGTRLPGSGGTARAVIDSAPLETRRRSHRPPPPQCPRRGADRRQPPLHHAAGTLQQSRAAAATSAGTRRQWPSGKVKSGARRKRSSVPLGWFKNPQGQRKSCTKKSRYSKNSKIYLRKNTKFIQLLNQSPDGVLVLNKAAEVLKVQNRRIYDITKALKGIHLIKKKSKNNVQWMGCSLSADGGMLTQCQGLSKEMTKLTQEEKKLDELIPSCTLDLKLLTEDSDRQRLAYVTYQHIRKISGLKDQTVIVVKAPPEIRLECLTQ

SEQ ID NO: 3448 - protein, 76 aa, Homo sapiens
PPGTPSRHEKSLGLLTTKFVSLLQEAKDGVLDLKLAADTLAVRQKRRIYDITNVLEGIGLIEKKSKNSIQWKGVGP

SEQ ID NO: 3449 - protein, 154 aa, Mus musculus
  unsure (1)..(154): unsure at all Xaa locations
MAXDLDFYTGDAGASSTFPMQCSALRKNGFVVLKGRPCKIVEMSTSKTGKHGHAKVHLVGIDIFTGKKYEDICPSTHNMDVPNIKRNDFQLIGIQDGYLSLLQDSGEVREDLRLPEGDLGKEIEQKYDCGEEILITVLFAMTKEAAVAIKAMAK

SEQ ID NO: 3450 - protein, 100 aa, Mus musculus
MADDLDFETGDAGPSATFPMQCSALRKNGFVVLKGGPCKIVEMSTSKTGKHGHAKNSEEVREDLRLPEGDLGKEIEQKYDCGEEILITVLSAMTEEAMAK

SEQ ID NO: 3451 - protein, 61 aa, Mus musculus
MADEIDFTTGDAGASSTYPMQCSALRKNGFVVLKGRPCKIVEMSTSKTGKHGHAKVHLVGI

SEQ ID NO: 3452 - protein, 49 aa, Rattus norvegicus
GDAGASSTYPMQCSALRKNGFVVLKGRPCKIVEMSTSKTGKHGHAKVHL

SEQ ID NO: 3453 - protein, 131 aa, Sulfolobus tokodaii
MSIQYTTVGDLKVGNYVVIDGEPCRVVEISKAKTGKHGSAKANIVAIGLFTGQKRTLMAPVDQQVEVPIIEKHIGQILADKGDTITIMDMENYETFDIEKPTDADIVDKIRPGAEVEYWEIMGRKKIVRVK

SEQ ID NO: 3454 - protein, 138 aa, Pyrobaculum aerophilum
MVLKWVMSTKYVEAGELKEGSYVVIDGEPCRVVEIEKSKTGKHGSAKARIVAVGVFDGGKRTLSLPVDAQVEVPIIEKFTAQILSVSGDVIQLMDMRDYKTIEVPMKYVEEEAKGRLAPGAEVEVWQILDRYKIIRVK

SEQ ID NO: 3455 - protein, 136 aa, Pyrobaculum aerophilum
  unsure (1)..(136): unsure at all Xaa locations
KWVXSTKYVEAGELKEGSYVVIDGEPCRVVEIEKSKTGKHGSAKARIVAVGVFDGGKRTLSLPVDAQVEVPIIEKFTAQILSVSGDVIQLXDXRDYKTIEVPXKYVEEEAKGRLAPGAEVEVWQILDRYKIIRVKG

SEQ ID NO: 3456 - protein, 132 aa, Pyrobaculum aerophilum str. IM2
MSTKYVEAGELKEGSYVVIDGEPCRVVEIEKSKTGKHGSAKARIVAVGVFDGGKRTLSLPVDAQVEVPIIEKFTAQILSVSGDVIQLMDMRDYKTIEVPMKYVEEEAKGRLAPGAEVEVWQILDRYKIIRVK

SEQ ID NO: 3457 - protein, 203 aa, Anopheles gambiae str. PEST
CRGSSNRKNSASFLAPTPPLCSFFSLSVCERLIVPPQKPQSIKMTEMEDTHFETADSGASQTFPMQCSALRKNGHVMLKGRPCKIVEMSTSKTGKHGHAKVHMVGIDIFTGKKYEDICPSTHNMDVPNVKREDYQLTDIDDGFLVLMSDNGDLREDLKIPDGELGTQLRSEFDSGKEIVCTVLKSCGEETVIAIKNNTSGDKN

SEQ ID NO: 3458 - protein, 149 aa, Giardia lamblia ATCC 50803
MSAAGEPMYPKQAGNLKKGDYIVMKDVFPCKVTEISTSKTGKHGHAKCSITAVDIFTGKKYEDSCPSSHNIMCPNVSRTDYLLINIDDEYAFYFDQNDAEQQVRLPLENEELVADLRAAFEAGDKTIMINIQRAMNTEGIVAFKTETNK

SEQ ID NO: 3459 - protein, 136 aa, Methanopyrus kandleri AV19
MDVAVKKVEVRQLKKGKYIMIDDEPCKIVEYTTSSPGKHGSAKARIVAVGLFDGKKRTLTKPVDAKVDVPVIERKTAQVVSDMGDTVQLMDMETYETFEVQKPEDEELASQLEPGTMVEYMEAAGKRKIVGIKEEE

SEQ ID NO: 3460 - protein, 135 aa, Methanocaldococcus jannaschii
MIIMPGTKQVNVGSLKVGQYVMIDGVPCEIVDISVSKPGKHGGAKARVVGIGIFEKVKKEFVAPTSSKVEVPIIDRRKGQVLAIMGDMVQIMDLQTYETLELPIPEGIEGLEPGGEVEYIEAVGQYKITRVIGGK

SEQ ID NO: 3461 - protein, 132 aa, Methanocaldococcus jannaschii
MPGTKQVNVGSLKVGQYVMIDGVPCEIVDISVSKPGKHGGAKARVVGIGIFEKVKKEFVAPTSSKVEVPIIDRRKGQVLAIMGDMVQIMDLQTYETLELPIPEGIEGLEPGGEVEYIEAVGQYKITRVIGGK

SEQ ID NO: 3462 - protein, 136 aa, Methanocaldococcus jannaschii
MVIIMPGTKQVNVGSLKVGQYVMIDGVPCEIVDISVSKPGKHGGAKARVVGIGIFEKVKKEFVAPTSSKVEVPIIDRRKGQVLAIMGDMVQIMDLQTYETLELPIPEGIEGLEPGGEVEYIEAVGQYKITRVIGGK

SEQ ID NO: 3463 - protein, 135 aa, Methanocaldococcus jannaschii
VIIMPGTKQVNVGSLKVGQYVMIDGVPCEIVDISVSKPGKHGGAKARVVGIGIFEKVKKEFVAPTSSKVEVPIIDRRKGQVLAIMGDMVQIMDLQTYETLELPIPEGIEGLEPGGEVEYIEAVGQYKITRVIGGK

SEQ ID NO: 3464 - protein, 128 aa, Archaeoglobus fulgidus DSM 4304
MKQQVEVRQLREGGYVVIDDEPCEILSISVSKPGKHGAAKARIDAIGIFDSQKRSIVQPVTAKIYVPIVERKRAQIISVTGNVAQLMDLETYETFELEVPEELKDKMEQGREVIYLESLGKRKIERMA

SEQ ID NO: 3465 - protein, 135 aa, Sulfolobus acidocaldarius
MGIQMSIQYTTVGDLKVGSYVMIDGEPCRVVEITKAKTGKHGSAKANVVAIGLFTGQKRSLMAPVDQQVEVPIIEKHVGQILADKGDNLTIMDLESYETFDLEKPTENEIVSKIRPGAEIEYWSVMGRRKIVRVK

SEQ ID NO: 3466 - protein, 131 aa, Sulfolobus acidocaldarius
MSIQYTTVGDLKVGSYVMIDGEPCRVVEITKAKTGKHGSAKANVVAIGLFTGQKRSLMAPVDQQVEVPIIEKHVGQILADKGDNLTIMDLESYETFDLEKPTENEIVSKIRPGAEIEYWSVMGRRKIVRVK

SEQ ID NO: 3467 - protein, 131 aa, Sulfolobus solfataricus
MSITYTTVGELKVGSYVVIDGEPCRVVEVTKAKTGKHGSAKANVVAIGVFSGAKKTLMAPVDQQVEVPIIEKHIGQIIADMGNKIQVMDLESYETFEIEKPTEDELASKIKPNAELEYWEIMGRRKIVRVK

SEQ ID NO: 3468 - protein, 129 aa, Thermoplasma acidophilum
MSWQEAEVRELKVGRYILIDDAPCKIVEITMSKPGKHGEAKGRIVAIGVFDNQKRSVVYPVKHKVKIPIIEKKNAQVLSVQNNEVQLMDSETFETFVLPLDPEIADKIKPGMEVPYWETMGMRKIMLQN

SEQ ID NO: 3469 - protein, 162 aa, Crypthecodinium cohnii
MSDEDHTFESTDAGASATYPQQAGEIRKGSYLMIKGRPCKCIEVSTSKTGKHGHAKAHIVALDIFSGKKYEDLCPTSHNLDVPFVKRTEYLLTADGTLARACDGHKDDLNLPTVVKVGEPTDRDKKVTAEILESVEKGTTIFVIVQAASGEEKIIQTKTTSG

SEQ ID NO: 3470 - protein, 160 aa, Dianthus caryophyllus
MSDDDHHFESSADAGASKTYPQQAGTIRKSGHIVIKNRPCKVVEVSTSKTGKHGHAKCHFVAIDIFNGKKLEDIVPSSHNCDVPHVNRVDYQLLDITEDGFVSLLTDSGDTKDDLKLPADEALVKQMKEGFEAGKDLILSVMCAMGEEQICAVKDVSGGK

SEQ ID NO: 3471 - protein, 161 aa, Plasmodium falciparum 3D7
MSDHEMYDNIDAGASQTYPVQAGAIKKNGHVMLKEHPCKVVDYSTSKTGKHGHAKAHIVGIDIFTGRKYEDICPTSHNMDVPVVKRTELQLIDITEDGFVSLLYDNGDTKDDLSLPKDTEGNLDEVAKQIRNLFDNGKSVLVSVLSACGQEKIIAAKELSS

SEQ ID NO: 3472 - protein, 158 aa, Arabidopsis thaliana
MSDEEHHFESSDAGASKTYPQQAGTIRKNGYIVIKNRPCKVVEVSTSKTGKHGHAKCHFVAIDIFTSKKLEDIVPSSHNCDVPHVNRTDYQLIDISEDGYVSLLTDNGSTKDDLKLPNDDTLLQQIKSGFDDGKDLVVSVMSAMGEEQINALKDIGPK

SEQ ID NO: 3473 - protein, 158 aa, Arabidopsis thaliana
MSDDEHHFESSDAGASKTYPQQAGNIRKGGHIVIKGRPCKVVEVSTSKTGKHGHAKCHFVAIDIFTSKKLEDIVPSSHNCDVPHVNRVDYQLIDISEDGFVSLLTDNGSTKDDLKLPTDEALLTQLKNGFEEGKDIVVSVMSAMGEEQMCALKEVGPK

SEQ ID NO: 3474 - protein, 158 aa, Arabidopsis thaliana
MSDDEHHFESSDAGASKTYPQQAGNIRKGGHIVIKGRPCKVVEVSTSKTGKHGHAKCHFVAIDIFTSKKLEDIVPSSHNCDVPHVNRVDYQLIDISEDGFVSLLTDNGSTKDDLKLPTDEALLTQLKNGFEEGKDIVVSVMSAIGEEQMCALKEVGPK

SEQ ID NO: 3475 - protein, 159 aa, Arabidopsis thaliana
MSDDEHHFEASESGASKTYPQSAGNIRKGGHIVIKNRPCKVVEVSTSKTGKHGHAKCHFVAIDIFTAKKLEDIVPSSHNCDVPHVNRVDYQLIDITEDGFVSLLTDSGGTKDDLKLPTDDGLTAQMRLGFDEGKDIVVSVMSSMGEEQICAVKEVGGGK

SEQ ID NO: 3476 - protein, 216 aa, Arabidopsis thaliana
MSDDEHHFEASESGASKTYPQSAGNIRKGGHIVIKNRPCKVVEVSTSKTGKHGHAKCHFVAIDIFTAKKLEDIVPSSHNCDVPHVNRVDYQLIDITEDGFVSLLTDSGGTKDDLKLPTDDGLTAQMRLGFDEGKDIVVSVMSSMGEEQICAVKEVGGGNVRYVIEYLWKHRVTQAAIVFDILTGFDITRFCIPCTKSGKTVIARKGQCFPLLRNWN

SEQ ID NO: 3477 - protein, 191 aa, Arabidopsis thaliana
MSDEEHHFESSDAGASKTYPQQAGTIRKNGYIVIKNRPCKVSFSNISPLSSSDLIRSVHYLDSSDSFFCHLHDVVEVSTSKTGKHGHAKCHFVAIDIFTSKKLEDIVPSSHNCDVPHVNRTDYQLIDISEDGYVSLLTDNGSTKDDLKLPNDDTLLQQIKSGFDDGKDLVVSVMSAMGEEQINALKDIGPK

SEQ ID NO: 3478 - protein, 149 aa, Glycine max
  unsure (1)..(149): unsure at all Xaa locations
XEAGSSATYPMQCSALRKNGHVVIKNRPCKIVDMSTSKTGKHGHAKVHLVAIDIFTGKKLEELSPSTHNMDVPHVSRKEYQLLDIQDDGFLSLMSEDGTMKDDVKSPEGEIGAKIEKLFRDEEKDTNVIILTAMGEETAIEAKEAPRGA

SEQ ID NO: 3479 - protein, 160 aa, Glycine max
MSDEEHHFESKADAGASKTYPQQAGTIRKNGYIVIKGRPCKVVEVSTSKTGKHGHAKCHFVGIDIFTAKKLEDIVPSSHNCDVPHVNRTDYQLIDIAEDGFLSLLTENGNTKDDLKLPTDESLLTQIKDGFAEGKDLVVSVMSAMGEEQICALKDIGPKN

SEQ ID NO: 3480 - protein, 161 aa, Glycine max
  unsure (1)..(161): unsure at all Xaa locations
MSDEEHHFESXRADAGASKTYPQQAGTIRKNGYIVIKGRPCKVVEVSTSKTGKHGHAKCHFVGIDIFTAKKLEDIVPSSHNCDVPHVNRTDYQLIDIAEDGFLSLLTENGNTKDDLKLPTDESLLTQIKDGFAEGKDLVVSVMSAMGEEQICALKDIGPKN

SEQ ID NO: 3481 - protein, 159 aa, Glycine max
MSDEEHHFESSDAGASKTYPQQAGNIRKGGHIVIKGRPCKVVEVSTSKTGKHGHAKCHFVAIDIFTAKKLEDIVPSSHNCDVPHVNRIDYQLIDIFEDGFVSLLTDSGGTKDDLKLPTDDSLSALMKSGFEEGKDVVVSVMSSMGEEQICAVKEVGGGK

SEQ ID NO: 3482 - protein, 160 aa, Glycine max
MSDEEHHFDSQADAGASKTYPQQAGTIRKNGYIVIKSRPCKVVEVSTSKTGKHGHAKCHFVAIDIFNGKKLEDIVPSSHNCDVPHVNRTDYQLIDISEDGFVSLLTDNGNTKDDLKLPTDEALLAQIKDGFSEGKDLVVSVMSAMGEEQICSLKDIGPKN

SEQ ID NO: 3483 - protein, 160 aa, Glycine max
MSDEEHHFDRQADAGASKTYPQQAGTIRKNGYIVIKSRPCKVVEVSTSKTGKHGHAKCHFVAIDIFNGKKLEDIVPSSHNCDVPHVNRTDYQLIDISEDGFVSLLTDNGNTKDDLKLPTDEALLAQIKDGFSEGKDLVVSVMSAMGEEQICSLKDIGPKN

SEQ ID NO: 3484 - protein, 126 aa, Glycine max
  unsure (1)..(126): unsure at all Xaa locations
MTMADDAQHEHTFESADAGASQTFPMQCSALRKNGFVVIKNRPCKIVEMTTSKTGKHGHAKVHLVAIDIFTSKKLEELCPSTHNMNVPNVRRQEYQLLDVTDDGFLSFMSDDGTTQDDVKLPDGEX

SEQ ID NO: 3485 - protein, 162 aa, Glycine max
  unsure (1)..(162): unsure at all Xaa locations
MSDSEEHHFESKADAGASKTYPQQAGTVRKNGFIVIKNRPCKVVEVSTSKIGKHGHAKCHFVAIDIFNGKKLEDIVPSSHNCDIPHVNRTEYQLIDISEDGFVSLLTXDGNTKDDLRLPTDETLVAQIKEGFESGKDLVVTVQSAMGEEQICALXDVGPSNS

SEQ ID NO: 3486 - protein, 160 aa, Glycine max
  unsure (1)..(160): unsure at all Xaa locations
MSDEEHHFESKADAGASKTFPQQAGTIRKNGYIVIKNRPCKVVEVSTSKTGKHGHAKCHFVGIDIFTGKKLEDIVPSSHNCDVPHVNRIDYQLIDISEDGFVSLQTETGGTKDDLRLPTDENLLTQIKDGFAEGKDLVVSVMSSMGEEQICALKDIGPKX

SEQ ID NO: 3487 - protein, 165 aa, Glycine max
  unsure (1)..(165): unsure at all Xaa locations
MADETFEQVTSGASLTFPQQASALRKNGFVLLKGFPCKIVDMSTSKTGKHGHAKISITGVDIFTGKKYEDVTPSTHNMDVPHVSRLDYQLIDIWXRXEKAPVSLLTEAGETKDDLNLPDDAELAGEIRAAFDEGKDIIVSVLAAMGIEQIISWKVDTKAXMAISL

SEQ ID NO: 3488 - protein, 162 aa, Glycine max
  unsure (1)..(162): unsure at all Xaa locations
MSDEEHHFESKADAGASKTYPQQAGTIRKNGYIVIKGTPXCKVVEVSTSXKTGKHGHAKCHFVGIDIFTAKKLEDIVPSSHNCDVPHVNRTDYQLIDIAEDGFLSLLTENGNTKDDLKLPTDESLLTQIKDGFAEGKDLVVSVMSAMGEEQICALKDIGPKN

SEQ ID NO: 3489 - protein, 126 aa, Glycine max
  unsure (1)..(126): unsure at all Xaa locations
MAESGEHDHDFTSGESGAAATYPKQCSALRKNEFVMIKGRPCKVVEMSTSKTGKHGHAKVHLVALDIFTNKKLEDICPSTHNMEVPVVKRKEYQLLSTNEDGFISLMDLETCDTKDDLRLPEGEIX

SEQ ID NO: 3490 - protein, 183 aa, Glycine max
  unsure (1)..(183): unsure at all Xaa locations
SLVWPSLGIFCALPGAEFGTRSDEEHHFESKADAGASKTFPQQAGTIRKNGXYIVIKNRPCKVVEVSTSKTGKHGHAKCHFVAIDIFTGKKLEDIVPSSHNCDVPHVNRIDYQLIDISEDGFVSLLTETGGTKDDLRLPTDENLLSQXLIKDGFAEGKDXLVVSVMSSMGEEQICALKDIGPK

SEQ ID NO: 3491 - protein, 161 aa, Glycine max
  unsure (1)..(161): unsure at all Xaa locations
MSDEEHHFESKADAGASKTYPQQAGTIRKNGYIVIKGRPCKVVEVSTSKTGKHGHAKCHFVGIDIFTAKKLEDIVPSSHNCDVPHVNRTDYQLIDIAEDGFLSLLTENGNTKDDLKLPTDLCTEGYWAKELASIAGSLLFSFMQKLYIFVXSCXTPELWRL

SEQ ID NO: 3492 - protein, 165 aa, Glycine max
  unsure (1)..(165): unsure at all Xaa locations
MSDEEHHFESXKADAGASKTYPQQAGTIXRKNGYIVIKGRPCKVVEVSTSKTGKHGPXAKCHFVGIDIFTAKKLEDIVPSSHNCDVPHVNRTDYQLIDIAEDGFLSLLTENGNHPQDDLKLPTDESLLTQIKDGFAEGKDXLVVSVMSAMGEEQICALKDIGPKN

SEQ ID NO: 3493 - protein, 139 aa, Glycine max
  unsure (1)..(139): unsure at all Xaa locations
MSETDEHHFESKADSGASKTYPQQAGAIRKGGHIVIKARPCKVVEVSTSKTGKHGHAKCHFVAIDIFNGKKLEDIVPSSHNCDVPHVDRQDYQLIDITDDGYVSLLTESGNTKDDHEASTDDVLLGQIKTGFAXGKDLX

SEQ ID NO: 3494 - protein, 150 aa, Glycine max
  unsure (1)..(150): unsure at all Xaa locations
MKDEEHHFESKADAGASNSYPQQAVTRRKNGYIVIKGRPCKVVEVSPPKTGKHXHAKCHFGGIDIFTGQKLEDIGPSSHNCDXPHVNXPGXQLIDXGGDGXXGXXTXXGXPKDDXKLXTXERRVTXXKGGXAEGQGXXXXXXGAXGGEEQ

SEQ ID NO: 3495 - protein, 115 aa, Glycine max
  unsure (1)..(115): unsure at all Xaa locations
MSDEEHHFESKADAGASKTYPQQAGTIRKNGYIVIKGRPCXVGEGSTSKTGKHXHAKGYLVEXDFFTCQKLGEIGPFXYHCEGPQVNWADYQLIDIAEDGVLRLLYENGDTQEDL

SEQ ID NO: 3496 - protein, 97 aa, Glycine max
  unsure (1)..(97): unsure at all Xaa locations
MSDQEHHFESKAHSGASKTDSHQAGTIRTNGYLVIKGRPCKVVEVSTSKTGKHGHAXCHFVGIDIFTAKKLXDIVPSSHNCDVPHVNRTDYQLIDIX

SEQ ID NO: 3497 - protein, 126 aa, Glycine max
  unsure (1)..(126): unsure at all Xaa locations
MDVAEPHFKSKADAGACTTYPNQAGTILHNSYIVINGRPCKDVRCPTYKTGKHGHAKRHFAGIDIITAKKLEDIVHSTDNCDAPYVNRTHYQLIDIPADGFFILLTENGDTKDDLKLTTDESMLTX

SEQ ID NO: 3498 - protein, 97 aa, Glycine max
  unsure (1)..(97): unsure at all Xaa locations
MSDDEHHFDSKADAGASNTFPQHAGTIRINGYIVNINMPCNVVDVSTSKTGXHGYAKCHIVAIDIFTGKKLEDNVTSSHNCDVPHVNRIEYQLIDIX

SEQ ID NO: 3499 - protein, 123 aa, Glycine max
  unsure (1)..(123): unsure at all Xaa locations
MMSDEXHHFDSEADAGASKTYSQLAGTMRKNGLIAIRSMPCRAVECCTXNTGEHGPAKWHSVAIDIINGKEIEDVERSSDKCDVTHVNRTDYELIDIYEDGYVSVMTDNGHTKDDLKLSTDEA

SEQ ID NO: 3500 - protein, 94 aa, Glycine max
  unsure (1)..(94): unsure at all Xaa locations
MSDEDHHFDSHADAGASNTYPQQAGTIRNNGYIFITSRPCTVVXVSTLNTGNHGHAKCHFVAIDIFNGKSLHDIFPSSHSCDVPHVTRTDYHLX

SEQ ID NO: 3501 - protein, 147 aa, Glycine max
  unsure (1)..(147): unsure at all Xaa locations
MSLYQXHFEXKADAAASKTFPQEAATIRKNCYIVIKNSSCKAVEASTSKTXGKHGHAKVSTYXYAIVHLSLAKKLEDIAPSSHNCDVPHANHIDYHLIDISEDVLVMLLTDTGDTNDDLRLPTDENLLSHINDXSFAEGKDLVVYVX

SEQ ID NO: 3502 - protein, 102 aa, Glycine max
  unsure (1)..(102): unsure at all Xaa locations
MSDEEHHFXSKADAGAXKTXXXQAGTIRXXGXIVXXGXPCKVVEVSTXXKTXKHXHAKXHXVXIDIFTAKKLEDIVPSSHNCDVPHVNRTDYQXXIDIAEDX

SEQ ID NO: 3503 - protein, 123 aa, Glycine max
  unsure (1)..(123): unsure at all Xaa locations
MPDEQHQMEXKADGGASKPYPQHAGPIRTNGYIVTKRRPCKVAEDATCKPAKHGHAQRHSGEIDIPTATKPEDIGPSCHNCDVPHLNRTGYKLIHLAEDGCPSPLTESGHTNDDLMLSTEESX

SEQ ID NO: 3504 - protein, 159 aa, Glycine max
  unsure (1)..(159): unsure at all Xaa locations
WFRAYARNSAIGLGSLLPPCFVYIESTILSDGERXFNFKDGAGPFNTYAQXAEPIRKNCCTDIIGRPCKVVPVTTSNTVKLGPAXCHLVGMDIHSANNLEDIVPWSHKCDVPHVNRTDYQLIDIAEDGFLSLLTDNGNTXDDLKLPTDDSLLTHINDRX

SEQ ID NO: 3505 - protein, 119 aa, Glycine max
  unsure (1)..(119): unsure at all Xaa locations
MSDEEHHFESKADAGASKTFPQQAGTIRKNGYIVIKNRPCKVPHVNRIDYQLIDISEDGFVSLLTETGGTKDDLRLPTDENLLTQIKDGFAEGKDLVVSVMSSMGEEQICALKDIGPKX

SEQ ID NO: 3506 - protein, 83 aa, Glycine max
  unsure (1)..(83): unsure at all Xaa locations
XEHHFESKADAGASNTYPQQATTIHKNGYILIKGHPYKVIKFSTSKTVKHSHTKFHFIMINISTANKLKDIIPSSHNYNVPHV

SEQ ID NO: 3507 - protein, 123 aa, Glycine max
  unsure (1)..(123): unsure at all Xaa locations
MPDDHHRVEYXAGGGAFKPYPQHAGPIPKNGYIAIKRRPCNVVQIATCKPANHGHPQRHYGEIDIPTAKNLEDIAHSSHNCDGPHDNRTDYQLIHLAXDGCQNPLTENGHTKDEPKLSTDKSX

SEQ ID NO: 3508 - protein, 128 aa, Glycine max
  unsure (1)..(128): unsure at all Xaa locations
XVRCNSNSDRGASRTIDTRAXTILLNCYMAIKGRSXCTNGCGCTTQTMAHVPPKCDSAGIEILTGKKLDYIVPSSHSCDVPHVNRTDYQLIDIADDGYLSLLTENGNTKDDLKLPTDESLLTQIKDGX

SEQ ID NO: 3509 - protein, 99 aa, Glycine max
  unsure (1)..(99): unsure at all Xaa locations
VGXGQVVEVSTSKTGKHGHAKCHFVAIDIFTGKKLEDIVPSSHNCDVPHVNRIDYQLIDISEDGFVRFQLHFXNXVSLIHSPFLLSYIYEILIPLSDLM

SEQ ID NO: 3510 - protein, 159 aa, Glycine max
  unsure (1)..(159): unsure at all Xaa locations
GPEPQGRPTPTLGIESTTTGERERQKRKPKLDRTNKNKTDEEHQHKHKADAGATKTNPQQAGTKRKNGXNDNKGRPRKAAEETTPKXGKHGHAKSHKDGKETNTAKKQDDNAPXNHNRDEPQEKRTDNQPXDRDEEGNKRQTTEKGNTKDXTQAPTEEX

SEQ ID NO: 3511 - protein, 122 aa, Glycine max
  unsure (1)..(122): unsure at all Xaa locations
MSLEEHHSYSHADAXAVHTYPXQAATIRMIHYIPIKSIPCKVVAVSTSKTGKHAHPKXSHFVAXSIFMGQKLXEDIGPSSHICDGPHVIRTDYXLIVIHKDLSASQLSDIAYTRILRMLSTX

SEQ ID NO: 3512 - protein, 81 aa, Glycine max
  unsure (1)..(81): unsure at all Xaa locations
MXDEXHHFXSKXDAGXXXTYPQQXGXIRKXGYIVIKGRPCKVVXXSXXXTXKHGXAKCHFVXIXIFXXKXLEDLVXXSXNC

SEQ ID NO: 3513 - protein, 76 aa, Glycine max
  unsure (1)..(76): unsure at all Xaa locations
MSDXEDHFESXGDCGASKTYPQQAGTIRKSGYIVMIGPPCKVVEVSTSKTGKHGHRXGHFGGIDIFTWQKPGDSGX

SEQ ID NO: 3514 - protein, 65 aa, Glycine max
  unsure (1)..(65): unsure at all Xaa locations
MSDDEHDFNSHADAGASNTYPQQAGTIRTNGYILIXSSPCKVVEVSTSTTGXHGRAQCHSVSLDX

SEQ ID NO: 3515 - protein, 94 aa, Glycine max
  unsure (1)..(94): unsure at all Xaa locations
MVXADYDHHPESKAYAGAYKSXPKQARTMSENGYLVLKDSPYKAVEFSTSITAKHDHAECHFVGIDIVTAKKLEAIEPYSDNCDVPHENPTDYX

SEQ ID NO: 3516 - protein, 129 aa, Glycine max
  unsure (1)..(129): unsure at all Xaa locations
LNSFNFTTFSYXXHHFXFESISKAFKTYPXQFGTILKNGYIVFKCLPXIVFLIFSYIIVMHXHAIFXFYLIVIFTSQKLDDILPYSYNYDVPHVNRSDYHLIDIAQDGFLSLLTENCNTNVDLKLSTDX

SEQ ID NO: 3517 - protein, 137 aa, Glycine max
  unsure (1)..(137): unsure at all Xaa locations
MSDEEHHLEYKDDAGAYKAYNQHAGTIRENGYIENKGRPCKVWNGPTSQNXKNGTSKKKLLGELRINXANTLCDICAKTENXDVANVKKTDNQPIDNPGDGKKSLLTEPVYTDDDIRPCTGDTPITPIIDGXEDGLD

SEQ ID NO: 3518 - protein, 72 aa, Glycine max
  unsure (1)..(72): unsure at all Xaa locations
XCEVVEVGTSKTGKHGHAKCHFSGIDVFTAKKLIDIVPSSGDWNIPHGNRTHYHLIDITKDRWGTLLTKNNN

SEQ ID NO: 3519 - protein, 136 aa, Glycine max
  unsure (1)..(136): unsure at all Xaa locations
PASGHGRWYTLWVRGVSGGGVSLGAGGTVFDEEHHFQSEADAGASKTYSXQAGSILTTATYVVKGGPCXDDEIATFKTGLAGTAKGDFVGKESVNANMVDDIXEPFSHNCEVXDVNRAECHMIDIDGEGXVILITX

SEQ ID NO: 3520 - protein, 81 aa, Glycine max
  unsure (1)..(81): unsure at all Xaa locations
XKGYTGACNTYPKEAETICKNGYIAIKRRACMGEEGTTFKTGKHGHRQSHCVGSDKCTVKTLEDIEPSSHNCDGPHESCTD

SEQ ID NO: 3521 - protein, 96 aa, Glycine max
  unsure (1)..(96): unsure at all Xaa locations
SFQQITKESYARSIADYVHNFQSKGDAVTSNVDTHQPGFSRSISYIVIMGXSCLVVAVTTSYTGSHGHTCCHFVGPDIFTAKQLEDLAPSSHNCDV

SEQ ID NO: 3522 - protein, 99 aa, Glycine max
  unsure (1)..(99): unsure at all Xaa locations
LLTISYHQHHFXSKSYSLTSKTFPQQTLTIRKNFYILINNKPFNIFXFSTYKTIKHXHPKSHLFIIDIFTLKNLQYIIPSYHNYHPSHFNLIYYQLINI

SEQ ID NO: 3523 - protein, 54 aa, Glycine max
  unsure (1)..(54): unsure at all Xaa locations
MSDDEHHFESKADAGASKTYTQHAGTIRSIGYIVIKGGPCRVMVVSTPKTGTHX

SEQ ID NO: 3524 - protein, 159 aa, Medicago sativa
MSDEEHHFEPAADAGASKTYPQQAGTIRKNGYIVIKSRPCKVVEVSTSKTGKHGHAKCHFVAIDIFNGKKLEDIVPSSHNCDVPHVNRTDYQLIDISEDGFVSLLTDNGSTKDDLKLPTDDSLLTQIKDGFADGKDLVVSVMSAMGEEQICALKDIGPK

SEQ ID NO: 3525 - protein, 161 aa, Medicago sativa
MSDEEHQFESKADAGASKTYPQQAGTIRKNGYIVIKNRPCKVVEVSTSKTGKHGHAKCHFVAIDIFTSKKLEEVYVPSSHNCDVPHVNRTDYQLIDISEDGFVSLLTENGNTKDDLKLPTDDSLLTQIKDGFAEGKDLVVSVMSAMGEEQICALKDIGGKN

SEQ ID NO: 3526 - protein, 160 aa, Manihot esculenta
MSDEEHHFESKADAGASKTFPQQAGTIRKNGYIVIKNRPCKVMEVSTSKTGKHGHAKCHFVGIDIFNGKKLEDIVPSSHNCDVPHVNRTDYQLIDISEDGFVSLLTETGNTKDDLRLPTDENLLSQIKDGFAEGKDLVVSVMSAMGEERICSLKDIGPKN

SEQ ID NO: 3527 - protein, 160 aa, Manihot esculenta
  unsure (1)..(160): unsure at all Xaa locations
MSDEEHHFESKADAGASKTFPQQAGTIRKNGYIVIKNRPCKVMEVSTSKTGXHGHAKCHFVGIDIFNGKKLEDIVPSSHNCDVPHVNRTDYQLIDISEDGFVSLLTETGNTKDDLRLPTDENLLSQIKDGFAEGKDLVVSVMSAMGEERICSLKDIGPKN

SEQ ID NO: 3528 - protein, 156 aa, Euphorbia esula
HEDHFESKADAGASKTYPQQAGTIRKNGYIVIKNRPCKVVEVSTSKTGKHGHAKCHFVGIDIFNGKKLEDIVPSSHNCDVPHVTRTDYQLIDISEDGFVSLLTENGNTKDDLRLPTDESLLSQIKDGFGDGKDLVVTVMSSMGEEQICALKDIGPK

SEQ ID NO: 3529 - protein, 161 aa, Oryza sativa (japonica cultivar-group)
MSDSEEHHFESKADAGASKTYPQQAGTIRKNGHIVIKNRPCKVVEVSTSKTGKHGHAKCHFVAIDIFNGKKLEDIVPSSHNCDVPHVNRTDYQLIDISEDGFVSLLTESGGTKDDLRLPSDEALLTQIKDGFAEGKDLIVTVMSAMGEEQICALKDIGPKN

SEQ ID NO: 3530 - protein, 162 aa, Oryza sativa (japonica cultivar-group)
MSDSEEHHFESKADAGASKTYPQQAGTIRKNGYIVIKNRPCKVVEVSTSKTGKHGHAKCHFVGIDIFNGKKLEDIVPSSHNCDVPHVDRTDYQLIDISEDGFVSLLTESGNTKDDLRLPTDDTLTNQIKNGFGEEGKDMILTVMSAMGEEQICAVKEIGAKN

SEQ ID NO: 3531 - protein, 159 aa, Lycopersicon esculentum
MSDEEHQFESKADAGASKTYPQQAGTIRKNGYIVIKGRPCKVVEVSTSKTGKHGHAKCHFVAIDIFTGKKLEDIVPSSHNCDVPHVNRTDYQLIDISEDGFVSLLTDNGNTKDDLRLPTDENLLSLIKDGFAEGKDLVVSVMSAMGEEQINALKDIGPK

SEQ ID NO: 3532 - protein, 160 aa, Lycopersicon esculentum
MSDEEHHFESKADAGASKTYPQQAGTIRKNGYIVIKGRPCKVVEVSTSKTGKHGHAKCHFVAIDIFNAKKLEDIVPSSHNCDVPHVNRTDYQLIDISEDGFVSLLTENGNTKDDLRLPTDDTLLNQVKGGFEEGKDLVLSVMSAMGEEQICAVKDIGTKT

SEQ ID NO: 3533 - protein, 160 aa, Lycopersicon esculentum
MSDEEHHFESKADAGASKTFPQQAGTIRKNGYIVIKGRPCKVVEVSTSKTGKHGHAKCHFVAIDIFNGKKLEDIVPSSHNCDVPHVNRTDYQLIDISEDGFVSLLTESGNTKDDLRLPTDENLLKQVKDGFQEGKDLVVSVMSAMGEEQINAVKDVGTKN

SEQ ID NO: 3534 - protein, 159 aa, Lycopersicon esculentum
MSDEEHHFESKADAGASKTYPQQAGTIRKGGHIVIKNRPCKVVEVSTSKTGKHGHAKCHFVAIDIFTGKKLEDIVPSSHNCDVPHVNRTDYQLIDISEDGFVSLLTENGNTKDDLRLPTDDTLLAQVKDGFAEGKDLVLSVMSAMGEEQICGIKDIGPK

SEQ ID NO: 3535 - protein, 159 aa, Nicotiana plumbaginifolia
MSDEEHQFESKADAGASKTYPQQAGTIRKNGHIVIKGRPCKVVEVSTSKTGKHGHAKCHFVAIDIFTGKKLEDIVPSSHNCDVPHVNRTDYQLIDISEDGFVSLLTENGNTKDDLRLPTDDNLLTQIKDGFAEGKDLVVSVMSAMGEEQICALKDIGPK

SEQ ID NO: 3536 - protein, 145 aa, Nicotiana plumbaginifolia
GASKTYPQQAGTIRKNGHIVIKNRPCKVVEVSTSKTGKHGHAKCHFVAIDIFTGKKLEDIVPSSHNCDVPHVNRTDYQLIDISEDGFVSLLTENGNTKDDLRLPTDDNLLALIKDGFAEGKDLVLSVMSAMGEEQICGIKDVGPK

SEQ ID NO: 3537 - protein, 159 aa, Nicotiana tabacum
MSDEEHHFESKADAGASKTYPQQAGTIRKNGHIVIKNRPCKVVEVSTSKTGKHGHAKCHFVAIDIFTGKKLEDIVPSSHNCDVPHVNRTDYQLIDISEDGFVSLLTENGNTKDDLRLPTDDNLLALIKDGFAEGKDLVLSVMSAMGEEQICGIKDVGPK

SEQ ID NO: 3538 - protein, 160 aa, Solanum tuberosum
MSDEEHHFESKADAGASKTYPQQAGTIRKNGYIVIKGRPCKVVEVSTSKTGKHGHAKCHFVAIDIFNGKKLEDIVPSSHNCDVPHVNRTDYQLIDISEDGFVSLLTESGNTKDDLRLPTDESLLKQVKDGFQEGKDLVVSVMSAMGEEQINAIKDIGTKN

SEQ ID NO: 3539 - protein, 159 aa, Solanum tuberosum
MSDEEHQFESKADAGASKTYPQQAGTIRKSGYIVIKGRPCKVVEVSTSKTGKHGHAKCHFVAIDIFTGKKLEDIVPSSHNCDVPHVNRTDYQLIDISEDGFVSLLTDNGNTKDDLRLPTDDSLLSQIKDGFAEGKDLVVSVMSAMGEEQINALKDIGPK

SEQ ID NO: 3540 - protein, 160 aa, Solanum tuberosum
MSDEEHHFESKADAGASKTYPQQAGTIRKSGYIVIKGRPCKVVEVSTSKTGKHGHAKCHFVAIDIFNGKKLEDIVPSSHNCDVPHVNRTDYQLIDISEDGFVSLLTENGNTKDDLRLPTDDALLNQVKGGFEEGKDLVLSVMSAMGEEQICAVKDIGTKS

SEQ ID NO: 3541 - protein, 159 aa, Solanum tuberosum
MSDEEHHFESKADAGASKTYPQQAGTIRKSGHIVIKNRPCKVVEVSTSKTGKHGHAKCHFVAIDIFTGKKLEDIVPSSHNCDVPHVNRTDYQLIDISEDGFVSLLTENGNTKDDLRLPTDDTLLAQVKDGFAEGKDLVLSVMSAMGEEQICGIKDIGPK

SEQ ID NO: 3542 - protein, 169 aa, Dictyostelium discoideum
MKPLIMEYNKMSDNEALDVEDYAQAGSGASLTFPIQCSALRKNGFVVIKGFPCKIVDMSTSKTGKHGHAKVNITAIDIFTGKKYEEICPSTHNIDVPNVSRKEYTVMDVQDGYLSLLDAGGEVKEDLALPEDDIGKEITQMLKEGKEPLVSVISALGKEGVVSVKVSNN

SEQ ID NO: 3543 - protein, 160 aa, Oryza sativa
MSDSEEHHFESKADAGASKTYPQQAGTIRKNGYIVIKNRPCKVVEVSTSKTGKHGHAKCHFVAIDIFNGKKLEDIVPSSHNCDVPHVNRTEYQLIDISEDGFVSLLTESGNTKDDLRLPTDDSLLGQIKTGFGEGKDLVVTVMSAMGEEQICALKDIGPK

SEQ ID NO: 3544 - protein, 160 aa, Oryza sativa; identical to SEQ ID NO: 3543

SEQ ID NO: 3545 - protein, 160 aa, Oryza sativa; identical to SEQ ID NO: 3543

SEQ ID NO: 3546 - protein, 160 aa, Oryza sativa
MSDSEEHHFESKADAGASKTYPQQAGTIRKNGYIVIKNRPCKVVEVSTSKTGKHGHAKCHFVAIDIFTAKKLEDIVPSSHNCDVPHVNRTEYQLIDISEDGFVSLLTENGNTKDDLRLPTDDNLLSQIKDGFGEGKDLVVTVMSAMGEEQICALKDIGPK

SEQ ID NO: 3547 - protein, 161 aa, Oryza sativa
MSDSEEHHFESKADAGASKTYPQQAGTIRKTGHIVIKNRPCKVVEVSTSKTGKHGHAKCHFVAIDIFNGKKLEDIVPSSHNCDVPHVNRTDYQLIDISEDGFVSLLTESGGTKDDLRLPSDEALLTQIKDGFAEGKDLIVTVMSAMGEEQICALKDIGPKN

SEQ ID NO: 3548 - protein, 162 aa, Oryza sativa; identical to SEQ ID NO: 3530

SEQ ID NO: 3549 - protein, 161 aa, Oryza sativa
  unsure (1)..(161): unsure at all Xaa locations
MSDSEEHHFESKADAGASKTYPQQAGTIRKNGHIVIKNRPCKVVEVSTSKTGKHGHAKCHFVGIDIFNGKKLEDIVPSSHNCDVPHVDRTDYQLIDISEDGFVSLLTESGNIXDDLRLPTDDTLTNQIKNGFEEGKGMILTVMSAMGEEQICAVKEIGAKN

SEQ ID NO: 3550 - protein, 163 aa, Oryza sativa
  unsure (1)..(163): unsure at all Xaa locations
MSDSEEHHFESKADAGASXKTYPQQAGTIRKTGHIVIKNRPXCKVVEVSTSKTGKHGHAKCHFVAIDIFNGKKLEDIVPSSHNCDVPHVNRTDYQLIDISEDGFVSLLTESGGTKDDLRLPSDEALLTQIKDGFAEGKDLIVTVMSAMGEEQICALKDIGPKN

SEQ ID NO: 3551 - protein, 185 aa, Oryza sativa
  unsure (1)..(185): unsure at all Xaa locations
EIKRGRLSWLSXLHNKSKAHPGAXKTYPQQAGTIRKNGYIVIKNRPCKVVEVSTLKSGTRGHAGCPFVAIDIFNAXXLEDIVPSSHNCDVPHVNRTEYQLIDISEDGFVSLLTESGNTKDDLRLPTDDSLLGQIKTGFGEGKDLVVTVMSAMGEEQICALKDIGPQVTPSSGRQNRRDPYVSNLN

SEQ ID NO: 3552 - protein, 131 aa, Oryza sativa
  unsure (1)..(131): unsure at all Xaa locations
MSDSEEHHFESKADAGASKTYPQQAGTIRKNGYIVIKNRPCKVVEVSTSKTGKHGHAKCHFVAIDIFTAKKLEDIVPSSHNCDVPHVNRTEYXQLIDISEGXGFXSLVNLKMGNTRDDXRXPLLDDNXLRX

SEQ ID NO: 3553 - protein, 176 aa, Oryza sativa
  unsure (1)..(176): unsure at all Xaa locations
SDSEEHHFXSKAXXAGTIRKNGYIVIKNRPCKVVEVSTSKTSKHGHAKCHFVAXXDIVPSSHNCDVPHXNRTNYQLIDISEDGLFVSLLTESGNTKDDLGLPTYDNLLGQIKTGFGEGKDVVVTVMSAMXEEQICALKDIGPNGRQAAASFLMHCFFQLRLYFVIGPNLEGRSTLV

SEQ ID NO: 3554 - protein, 121 aa, Oryza sativa
MSDSEEHHFESKADAGASKTYPQQAGTIRKNGYIVIKNRPCKVPHVDRTDYQLIDISEDGFVSLLTESGNTKDDLRLPTDDTLTNQIKNGFGEEGKDMILTVMSAMGEEQICAVKEIGAKN

SEQ ID NO: 3555 - protein, 106 aa, Oryza sativa
  unsure (1)..(106): unsure at all Xaa locations
XTIHRNGYIIIKNRPCKAVEASTYKTGKHGDAKCHFVAHDIFTANKLENIVPSCNNCDEPHVNRTECQLIDICEDRTESPVTGNGNIQDDLTLPTDDNLLSQIHDG

SEQ ID NO: 3556 - protein, 78 aa, Oryza sativa
  unsure (1)..(78): unsure at all Xaa locations
MSDSXEHHFESKADAGXSKTYPXQAGTIRXNGHXVIKNXPCKXVEVSTSKTGKXRHAKCHXXAIDIFNGKKLEDIVPX

SEQ ID NO: 3557 - protein, 111 aa, Oryza sativa
  unsure (1)..(111): unsure at all Xaa locations
XGKHGHPKCPFVALAIFNGKKLXNIVPPPPNCDVPPVTRFDFHLIALFXNGFFTPLPESGGPKDALRLPSYKALLSQIKDGSPQGKDFIVPLMFPLGEEQICPFKDFGPKN

SEQ ID NO: 3558 - protein, 167 aa, Triticum aestivum
  unsure (1)..(167): unsure at all Xaa locations
MSAPNDNEHEMTFDSADAGASLTYPMQCSALRKNGFVVIKNRPCKIVDMSTSKTGKHGHAKVHLVATDIFTGKKYEDLSPSTHNMDVPNVSRREYQLLDISDDGFLSLMTDDGDTKDDVPLPDNEVGQKITKLFKEEEKDTNVIVLTSMGEECAMEAKEAPNQGXII

SEQ ID NO: 3559 - protein, 160 aa, Triticum aestivum
MSDSEEHQFESKADAGASKTYPQQAGTIRKNGYIVIKNRPCKVVEVSTSKTGKHGHAKCHFVAIDIFTGKKLEDIVPSSHNCDVPHVNRTEYQLIDISEDGFVSLLTDNGNTKDDLKLPTDETLLGQIKDGFAEGKDLVVSVMSAMGEEQINALKDIGPK

SEQ ID NO: 3560 - protein, 162 aa, Triticum aestivum
  unsure (1)..(162): unsure at all Xaa locations
MSDSEEHHFESKADAGASKTYPQQAGTIRKNGYIVIKNRPCKVVEVSTSKTGKHGHAKCHFVGIDIFTGKKLEDIVPSSHNCDVPHVNRVEYQLIDISEDGFVSLXLTESGNTKDDTKLPSDEALQAQIKSGYDEGKDILLTVMSAMGEEQICAVKEIGGKN

SEQ ID NO: 3561 - protein, 240 aa, Triticum aestivum
  unsure (1)..(240): unsure at all Xaa locations
MRWSPPGPRELITYHHQRPFLPPSSSSRVLIHHPAQVMIKVAMSDSEDHHFESKADAGASKTYPMQAGAIRKGGFLVIKNRPCKVVEVSTSKTGKHGHAKCHFVALDIFNGKKLEDIVPSSHNCDVPHVDRTEYQLIDISEDGFVSLLTDNGSTKDDLKLPTDDAILTQLKDGFAEGKDLALTVMSAMGEEQICAVKDVGPRXLPRSEGQDKRRDPLSVKFKLKKDESIKGGMLSSETFT

SEQ ID NO: 3562 - protein, 180 aa, Triticum aestivum
  unsure (1)..(180): unsure at all Xaa locations
MSDSEDHHFESKADAGASKTYPMQAGAIRKGGFLVIKNRPCKVVEVSTSKTGKHGHAKCHFVALDIFNGKKLEDIVPSSHNCDVPHVDRTEYQLIDISEDGFVSLLTDNGSTKDDLKLPTDDAILTQLKDGFAEGKDLALTVMSAMGEEQICAVKDVGPRXLPWSEGQDKQRDPLSVKLS

SEQ ID NO: 3563 - protein, 233 aa, Triticum aestivum
  unsure (1)..(233): unsure at all Xaa locations
MSDSEDHHFESKADAGASKTYPMQAGAIRKGGFLVIKNRPCKVVEVSTSKTGKHGHAKCHFVALDIFNGKKLEDIVPSSHNCDVPHVDRTEYQLIDISEDGFVSLLTDNGSTKDDLKLPTDDAILTQLKDGFAEGKDLALTVMSAMGEEQICAVKDVGPRXLPRIEVQDKRRDPVSVKFKLKKDEVLKEESYRVRHSPKPESSAVIAGCSISAYHYLSSVTFGTLAYVCAWCQ

SEQ ID NO: 3564 - protein, 198 aa, Triticum aestivum
  unsure (1)..(198): unsure at all Xaa locations
MSDSEDHHFESKADAGASKTFPMQAGAIRKGGYLVIKNRPCKVVEVSTSKTGKHGHAKCHFVALDIFNGKKLEDIVPSSHNCDVPHVDRTEYQLIDISEDGFVSLLTDNGSTKDDLKLPTDDAILTQLKDGFAEGKDLALTVMSAMGEEQICAVKDVGPRXLPRSEGQDKRRDPLSVKFKLKKDKSIKEGMLSSETFT

SEQ ID NO: 3565 - protein, 148 aa, Triticum aestivum
  unsure (1)..(148): unsure at all Xaa locations
MSDEEHHFESSDAGASKTYPQQAGNIRKGGHIVIKGRPCKVVEVSTSKTGKHGHAKCHFVAIDIFTAKKLEDIVPSSHNCDVPHVNRVDYQLIDISEDGFVSLLTDSGGTKDDLKLPTDDNLSALMKSGFEEGKDVVVSXVMSSMGEX

SEQ ID NO: 3566 - protein, 161 aa, Triticum aestivum
MSDTDEHHFESKADSGASKTYPQQAGAIRKGGHIVIKARPCKVVEVSTSKTGKHGHAKCHFVAIDIFNGKKLEDIVPSSHNCDVPHVDRQDYQLIDITDDGYVSLLTESGNTKDDLKLPTDDVLLGQIKTGFADGKDLILSVMSAMGEEQICAVKEIGGGK

SEQ ID NO: 3567 - protein, 161 aa, Triticum aestivum
  unsure (1)..(161): unsure at all Xaa locations
MSDSEDHHFESKADAGASKTYPMQAGAIRKGGFLVIKNRPCXVVEVSTSKTGKHGHAKCHFVALDIFNGXKLEXIVPSSHNXDVPHVDRQDYQLIDITDDGYVSLLTESGNTKDDLKLPTDDVLLGQIKTGFADGKDLILSVMSAMGEEQICAVKEIGGGK

SEQ ID NO: 3568 - protein, 162 aa, Triticum aestivum
  unsure (1)..(162): unsure at all Xaa locations
MSDSEEHHFESKADAGASKTYPQQAGTVRKNGFLVIKGRPXXRVVEVSTSKTGKHGHAKCHFVAIDIFNGKKLEDIVPSSHNCDIPHVNRTEYQLIDISEGXGFVSLLTSDGNTKDDLRLPTDETLVAQIKEGFESGKDLVVTVQSAMGEEQICALKDIGPK

SEQ ID NO: 3569 - protein, 162 aa, Triticum aestivum
  unsure (1)..(162): unsure at all Xaa locations
MSDTDEHHFESKADFGASKTYPQQAGAIRMGGHIVIKARPCKAVEVYTSKTGKHGHAKCHFVAIDIFNGKKLEDIVPSSHNCDVPHVDRPXDYQLIDITDDGYVSLLTESANTKDDLKLPTDDALLGQSKIGFADGKDLILSGMAAMGEEQICAEKEIADGT

SEQ ID NO: 3570 - protein, 167 aa, Triticum aestivum
  unsure (1)..(167): unsure at all Xaa locations
MSDTDEHHFESKADSGASKTYPQQAGAIRKGGHIVXIKARPCKVVEVSTSXKTGKHGHAKCHFVAIDIFNGKKLEDIVPSSHNCDVPHVDRPXDYQLIDITDDGYVSLLTESGNXTKDDLKLPTDDVLLGXQIKTGFADGXKDLILSVMSAMGEEQICAVKEIGGGK

SEQ ID NO: 3571 - protein, 122 aa, Triticum aestivum
  unsure (1)..(122): unsure at all Xaa locations
MSDSEDHHLEYKADAGAFKTYPMQAVAIRKGGFLVIKNRPCKVGEDSXTSDTGKHGHAKCHFVGLDIFNGKKLEDISASSHICDVPHVDRSEYQLIDISEAGFESPRTDNGCTMDDLKLPTX

SEQ ID NO: 3572 - protein, 160 aa, Triticum aestivum
  unsure (1)..(160): unsure at all Xaa locations
MWHCKDHHLKFKADAPASNTTPMQAAVIHKGVLLVIKNRPCKGKEATTXILATHEHPKSDYIALDIFNALELEDIVPSSHNCDVPHVDRTEYQLIDISEDGFVSLLTDNGSTKDDLKLPTDDAILTQLKDGFAEGKDLALTVMSAMGEEQICAVKDLGPR

SEQ ID NO: 3573 - protein, 104 aa, Triticum aestivum
  unsure (1)..(104): unsure at all Xaa locations
MSDTDEHHFKSKGDFCAYKTYPQQAGAIRKGGHIVIKARPCKVVEVTTSKTGKQWHAXXYFVAIDIFNGKKLEDLDSSYNNXDVPHGDRQDYQLYDITEDGYVX

SEQ ID NO: 3574 - protein, 136 aa, Triticum aestivum
  unsure (1)..(136): unsure at all Xaa locations
MEHTHEHHWXSKDDSGPCYTYPQRGGAIHTGGHIAIKAHTCQVVEACTYKTAKHGHAMCDFVAIDIFNRKKLDDIVPXCHNCDLPHVVRLDNHLIDITEDGYASLLTESGHTNDDLQLPTDDAVLGQIKNGCADGX

SEQ ID NO: 3575 - protein, 56 aa, Triticum aestivum
PTTPNKNHTFDSVDASASLIYPMQCSALRKNGFVLIKGRPCKIVDMSTSKTGKHGH

SEQ ID NO: 3576 - protein, 78 aa, Triticum aestivum
  unsure (1)..(78): unsure at all Xaa locations
GGSFGVGDTCEHHFESKADSCAFKTYPXQAGAIRKGGHIAIKALPCKGGEVSTCKTGKHGHAXDHLVCIDXIFNGKEA

SEQ ID NO: 3577 - protein, 57 aa, Triticum aestivum
  unsure (1)..(57): unsure at all Xaa locations
MKVSMSDSEDHHFQSKADAGASKTYPMQAGAIRKGGLLVMKNPPCKVADVSTSKTGX

SEQ ID NO: 3578 - protein, 144 aa, Triticum aestivum
  unsure (1)..(144): unsure at all Xaa locations
ESAAEGATPEHLINSXKPSAGPPITTPXHVYAFHTGGHXIKMKCRVLQENVGFAHRYGKRGHSKSHFGDIDIFDGKQXLVDMVPXYKKGDRPHGDRLTYQLIEITEDGYVRLITRXGNTEDDLKLCKEDVLLGQIKTGFDDGKD

SEQ ID NO: 3579 - protein, 182 aa, Triticum aestivum
  unsure (1)..(182): unsure at all Xaa locations
WIPRAAGIRHQXXTLASXSXHTPXXXAXYRIXHPXXXGTXXDXXXXXHTXENXLXSKDDSGPAXTYPXXXGAXRXXXHXXIXXHXCXVXEXCXXXTXXHXXAMCXFVAIDIFNXKXLXDIVPXXCHNCDXPHVXRXXXHLIDITDDGXXSLLTEXXXTXDXLXLXXDDAXLGQXXXGCADXX

SEQ ID NO: 3580 - protein, 160 aa, Triticum aestivum
  unsure (1)..(160): unsure at all Xaa locations
SASAGSAATPASVPNTVTIPCHHIRMGDILMLQGRPCQVIRISTSAATGQHRYLGVDLFTKQLHEESSFISNPAPSVFVQTMLGPILKQYRVLDLQDGNVVAMTESGEVKTSLPVVDQGGLWERLSRAFSTGRGSXRILVISDNGRELAVDCKVVHGASL

SEQ ID NO: 3581 - protein, 174 aa, Zea mays
  unsure (1)..(174): unsure at all Xaa locations
MAEEEHQTFETADAGASLTFPMQCSALRKNGHVVIKGRPCKIIDMSTSKTGKHGHAKVNLVAIDIFTGKKYEDLSPSTHNMDVPNINRQEYQLINIDDGYLNLMTQDGSTKDDVKLPEGDLGEKIQEEFDEGKDLLVTVVTAMGEEHALTYKEAPKXIASFSSFLYHFIKKYSF

SEQ ID NO: 3582 - protein, 248 aa, Zea mays
  unsure (1)..(248): unsure at all Xaa locations
MADNDAQHEHTFDSADAGASKTYPMQCSALRKNGFVCIKNRPCKIVDMSTSKTGKHGHAKVHLVAIDLFTGKKLEELCPSTHNMDVPNVTRREYQLLDVTDDGFLSLMTDDGATKDDVKIPDGEVGDKITKLFTEEGKDTNVIVLTAMGEEAAIDAKEAPKXMIGWFCRLFGRMRGAECEQLTDGAATLFACILQSCTLVANEAFSSAICAGRPVLDVLRTDLVSLNCHVGETYHESFPCLQKKKKKK

SEQ ID NO: 3583 - protein, 167 aa, Zea mays; identical to SEQ ID NO: 3558
  unsure (1)..(167): unsure at all Xaa locations

SEQ ID NO: 3584 - protein, 161 aa, Zea mays
  unsure (1)..(161): unsure at all Xaa locations
YIMADDEFESVGSGASTCFPMQCSAIKKNGYAVLKNRPCKVVETSTSKTGKHGHAKVHMVGIDIFTGKKYEEICPSTHNMMVPNVDRRDFQVINIEEGFVSLLKDDGSTKDDLKVPEGELGDKLKEAFDDGKDVVATVLAAMDEECIISWKEASNKSXTYI

SEQ ID NO: 3585 - protein, 187 aa, Zea mays
SPSLAVEDPSCKSPLILLHRIPVRFPEMSDEEHQFESKADAGASKTYPQQAGTIRKNGYIVIKGRPCKVVEVSTSKTGKHGHAKCHFVGIDVFTGKKLEDIVPSSHNCDVPHVDRTEYQLIDITEDGFVSLLTDSGNTKDDLRLPTDEALEGQIKSGYDDGKDLLLTVMSSMGEEQICAVKEIGGKN

SEQ ID NO: 3586 - protein, 187 aa, Zea mays
SPSLAVADPSCKSPLILLHRIPVRFPEMSDEEHQFESKADAGASKTYPQQAGTIRKNGYIVIKGCPCKVVEVSTSKTGKHGHAKCHFVGIDVFTGKKLEDIVPSSHNCDVPHVDRTEYQLIDITEDGFVSLLTDSGNTKDDLRLPTDEALEGQIKSGYDDGKDLLLTVMSSMGEEQICAVKEIGGKN

SEQ ID NO: 3587 - protein, 161 aa, Zea mays
MSDSEEHHFESKADAGASKTYPQQAGTIRKNGYIVIKNRPCKVVEVSTSKTGKHGHAKCHFVGIDIFTGKKLEDIVPSSHNCDVPHVNRVEYQLIDISEDGFVSLLTESGNTKDDTKLPSDEALQAQIKSGYDEGKDILLTVMSAMGEEQICAVKEIGGKN

SEQ ID NO: 3588 - protein, 160 aa, Zea mays
MSDSEEHHFESNADAGASKTYPQQAGTVRKNGFIVIKNRPCKVVEVSTSKTGKHGHAKCHFVAIDIFNGKKLEDIVPSSHNCDIPHVNRTEYQLIDISEDGFVSLLTSDGNTKDDLRLPTDETLVAQIKEGFESGKDLVVTVQSAMGEEQICALKDVGPK

SEQ ID NO: 3589 - protein, 187 aa, Zea mays
  unsure (1)..(187): unsure at all Xaa locations
SPSLAVADPSCKSPLILLHRIPVRFPEMSDEEHQFESKADAGASKTYPQQAGTIRKNGYIVIKGRPCKVVEVSTSKTGKHGHAKCHFVGIDVFTGKKLXHIVPSSHNCDVPHVDRTEYQLIDITEDGFVSLLADSGNTKDDLRLPTDEALEGQIKSGYDDGKDLLLTVMSSMGEEQICAVKEIGGKN

SEQ ID NO: 3590 - protein, 160 aa, Zea mays; identical to SEQ ID NO: 400

SEQ ID NO: 3591 - protein, 160 aa, Zea mays; identical to SEQ ID NO: 400

SEQ ID NO: 3592 - protein, 160 aa, Zea mays; identical to SEQ ID NO: 400

SEQ ID NO: 3593 - protein, 160 aa, Zea mays; identical to SEQ ID NO: 400

SEQ ID NO: 3594 - protein, 160 aa, Zea mays; identical to SEQ ID NO: 400

SEQ ID NO: 3595 - protein, 160 aa, Zea mays; identical to SEQ ID NO: 400

SEQ ID NO: 3596 - protein, 160 aa, Zea mays; identical to SEQ ID NO: 400

SEQ ID NO: 3597 - protein, 160 aa, Zea mays; identical to SEQ ID NO: 400

SEQ ID NO: 3598 - protein, 160 aa, Zea mays; identical to SEQ ID NO: 400

SEQ ID NO: 3599 - protein, 160 aa, Zea mays; identical to SEQ ID NO: 400

SEQ ID NO: 3600 - protein, 160 aa, Zea mays; identical to SEQ ID NO: 400

SEQ ID NO: 3601 - protein, 160 aa, Zea mays; identical to SEQ ID NO: 400

SEQ ID NO: 3602 - protein, 160 aa, Zea mays; identical to SEQ ID NO: 400

SEQ ID NO: 3603 - protein, 160 aa, Zea mays; identical to SEQ ID NO: 400

SEQ ID NO: 3604 - protein, 177 aa, Zea mays
MSDWEEHHFESKADAGASKTYPQQAGTVRKNGFIVIKNRPCKVVEVSTSKTGKHGHAKCHFVAIDIFNGKKLEDIVPSSHNCDIPHVNRTEYQLIDISEDGFVSLLTSDGNTKDDLRLPTDETLGAQIKEGFESGKDLVGTVQSAMGEEHICALKAGGPKQLPLASRRTPTLSPLKS

SEQ ID NO: 3605 - protein, 160 aa, Zea mays
MADSEEHHFESKADAGASKTYPQQAGTVRKNGFIVIKNRPCKVVEVSTSKTGKHGHAKCHFVAIDIFNGKKLEDIVPSSHNCDIPHVNRTEYQLIDISEDGFVSLLTSDGNTKDDLRLPTDETLVAQIKEGFESGKDLVVTVQSAMGEEQICALKDVGPK

SEQ ID NO: 3606 - protein, 180 aa, Zea mays; identical to SEQ ID NO: 3562
  unsure (1)..(180): unsure at all Xaa locations

SEQ ID NO: 3607 - protein, 161 aa, Zea mays
  unsure (1)..(161): unsure at all Xaa locations
MSDSEEHHFESKADAGASKTYPQQAGTVXRKNGFIVIKNRPCKVVEVSTSKTGKHGHAKCHFVAIDIFNGKKLEDIVPSSHNCDIPHVNRTEYQLIDISEDGFVSLLTSDGNTKDDLRLPTDETLVAQIKEGFESGKDLVVTVQSAMGEEQICALKDVGPK

SEQ ID NO: 3608 - protein, 162 aa, Zea mays
  unsure (1)..(162): unsure at all Xaa locations
MSDSEEHHFESKADAGASKTYPQQAGTVRKNGFIVIKNRPCKVVEVSTSKTGKHGHAKCHFVAIDIFNGKKLEDIVPSSHNCDIPHVNRTEYQLIDISEDGFVSLLTSDGNTKDDLRLPTDETLVAQIKEGFESGKXDLVVTVQSAMGEEQICALXKDVGPK

SEQ ID NO: 3609 - protein, 161 aa, Zea mays; identical to SEQ ID NO: 3566

SEQ ID NO: 3610 - protein, 228 aa, Zea mays
CAGARWRPCGPSLIICASTFLLSVFLRLRRIHPRQESPCLDSEEHHFKSKGDAGASKTYPQQAGTVRKNGFIVIKNRPCKAVEVSTSKTGTHGHAKCHFVAIDIFNGKKLEDIVPSSHNCDIPHVNRTEYQLIDISEDGFASLLTSDGNAKDDLRLPTDETLAGQIKEGFESGKDLVVTVQSAMGDEQICALKDGAPNQLPCLWRQNPTGSQLKSDQKCITRGLYTET

SEQ ID NO: 3611 - protein, 182 aa, Zea mays
  unsure (1)..(182): unsure at all Xaa locations
PLSISLLLRLLLEPAKTEHRHVRSSEEHRFESKADAGASKTYPQQGGTGRKNGFIVIKNRPCKVVEVSTSKTGKHGHAKCHFVXAIDIFNGKRLEDIVPSSHNCDIPHANRTEYQLIDISEDGFVSLLTSHGDTRDDLTLPTDETLVDQIEEGFESGKDLAETVQSAMGEEHICALKDVGPQ

SEQ ID NO: 3612 - protein, 166 aa, Zea mays
  unsure (1)..(166): unsure at all Xaa locations
MSDEEHHFESKADAGASKTYPQQAGTIRKNGYIVINNRPCKVVEVSTSKTGKHGHAXECHFVGIDIFTGKKLEDIVPSSHNCDVPHVNRTDYQVIDISQDGFLSLLTDSGGTKDDLRLSTDENLLTQIKDGFAEGKDLAVSVMSAMGEXXICALKDIGXMXWSHVN

SEQ ID NO: 3613 - protein, 160 aa, Zea mays
MSDSEEHHFESKGDDGASKTYPKEAATVRKNGFIVIKNRPCKVVEVSTSKTGKHGHAKCHCAAIDIFNGEKLEDIAPSSHFCDIPHVNRTEYQLIDISEDGFVSLLTSDGNAKDDLRLPTDETLVVQIRQGFESAKDLVVTVQSAMGEEQICALKDVAPK

SEQ ID NO: 3614 - protein, 160 aa, Zea mays
  unsure (1)..(160): unsure at all Xaa locations
MSDSEEHHFESKADAGASKTYPQQAGTVRNNGFIGIKNRPCKVVEVSTSKTGKRGHAKCHFVAIDIFNGKKLEDIVPSSHNCDIPHVDRTEYQLIDISXDGFVSLLTSDGNTKDDLRLPTDETLVVQIEEGVESGKDLDVTVQTAMGEEHIWPLEDADPX

SEQ ID NO: 3615 - protein, 160 aa, Zea mays
  unsure (1)..(160): unsure at all Xaa locations
MSDSEEXHFESKADAGASKTYPQQAGTARKNGFIVIKNRPCKVEEVSTSKTGKHGHAKCHFVAIDIFNGKKVEDMVPSSHNCDIPHANRTEDQLIDISEDGFVSLLTSDGNTKDDLRLPTDETLVAQIKEGLESGKDLGVTVQTAMGEEQICALKDDGPK

SEQ ID NO: 3616 - protein, 161 aa, Zea mays
  unsure (1)..(161): unsure at all Xaa locations
MSDSEEHDFESKADAGASRTYPQQGATVRKNGFIVIKNRPCKDAEDSTSKTGKHGHPKCHFVTIDLCTGKKLEDIVPSSHNCDIPHVNRTEHQLIDISEDGFVSLLTSDGNTNDELKVPTDETLVAQIKEGFXSDXKDLVVTVQSAMGEDQICAMKDVDPK

SEQ ID NO: 3617 - protein, 164 aa, Zea mays
  unsure (1)..(164): unsure at all Xaa locations
MSDSEEHHFESKADAGASKTYPXQQAGTVXRKNGFIVIKNRPXARVVEVSTSKTGKHGHAKCHFVAIDIFNGKKLEDIVPSSHNCDIPHVNRTEYQLIDISEDGFVSLLTSDGNTKDDLRLPTDETLVAQIKEGFESGKXDLVVTVQSAMGEEQICALKDVGPK

SEQ ID NO: 3618 - protein, 190 aa, Zea mays
  unsure (1)..(190): unsure at all Xaa locations
AAFSSLSLRSTFLLSLFLRLRLIHPRQESPCLDSEEHHFESKADAGASNTYPQHAATGRKNGFIVIKNRPCKVVQVSTSKTGKHGHAKCHFVAINIFSVKKLGDIVPSSHNCDIPYVNRTEYQLIDISEDVFVSLLTSYGNTKDDLRLPTDDTLVVQINESFXSGKDLVVTVQSAMGXEQICALNDVAPK

SEQ ID NO: 3619 - protein, 160 aa, Zea mays
  unsure (1)..(160): unsure at all Xaa locations
MSDSEGHHFESRVDAGGSTTYPQQAGTARKNGFIDIKNRPCKVVEVSTSXTGKHGHAKCHFVAIHIFNGKKLEDIGPSSHNCDIPHVNRTEYQLIDISDDGFVSLLTSDANTKDDLTLATDETLVDHIKEGIESENDLVVTVQSAMFERQICTLKDADHK

SEQ ID NO: 3620 - protein, 252 aa, Zea mays
  unsure (1)..(252): unsure at all Xaa locations
MSDDEHHFESSDAGASKTYPQQAGNIRKGGHIXIKGRPCKVVEVSTSKTGKHGHAKCHFVAIDIFTSKKLEXIRPSSHNCDVPHVNRVDYQLIDISEDGFGSLLTDNGSXTKDDLXLPTDELLLTQLKNGFEXGKDXVVSVMLHGKEQMCALKEVGPSXNNXXPXSLXXXXCFSSLTEQIVIRXXVXPFFXAXXYXLNXMXSHARHSYXYYXXLPKKKKKKXXGGPVPIXXXXSQYQFXXXXXKXXEXXTLX

SEQ ID NO: 3621 - protein, 160 aa, Zea mays
  unsure (1)..(160): unsure at all Xaa locations
MWDSEEHHFESKADAGACKTYPQQAGTVRKNGGGGINNRPCEGVEVSTSKTGKHGHAKCHFVAIDIFNGKKLEDIVPSSHNCDIPHVNRTEYQLIDISEEGFASLLTSXGDTKEDLRLPTDETLVAHIKEGVXSGKDLVVTVXSAMGEEXICALKDVGPK

SEQ ID NO: 3622 - protein, 162 aa, Zea mays
  unsure (1)..(162): unsure at all Xaa locations
MWDSEEHHFESRADAGACKTYPQQAGTVRENGVIVIKNRPCGGGEVSTSKTGKHGHAKCHFVAIDIFNGXKKLEDIVPSSHNCDIPHVNRTEYQLIEISEEGFVSLLTSEGNTKEELRLPTDETLVGQIKEGXXESGKDLVVTVQSAMGEEXICALKDVGPK

SEQ ID NO: 3623 - protein, 186 aa, Zea mays
  unsure (1)..(186): unsure at all Xaa locations
SPSAPLSISLLLRLLLEPTKPGDRHVWTQEEHHFESKADAGASKTYPQQGGTGRKNGFIVIKNRPCKVVEVXSTSKTGKHGHDKCHFVAVDIFHGKWLEDIVPSSHDCDIPHVNRTEYQLIEISEDGFVSLLTSHGDTMDDLRLPTDETLVDQIEEGFESVKDLAVTVQSAMRQEHICALKDVVPK

SEQ ID NO: 3624 - protein, 173 aa, Zea mays
  unsure (1)..(173): unsure at all Xaa locations
MPDSEENHFESKDDAGASKTYPQQAGTVRKNGFIVINNRPCKDEEVSTSKTGKHGXHAKCHFVAIDIFNGKKIKDIVPSSHNCDIPHANRTENQLIDISKDGFVSLLTSDGNTKDDLRLPTDETLVAQIKEGFESGKDLDETVQSAMGEEQICALNDVGPKELPLLGILYLKT

SEQ ID NO: 3625 - protein, 192 aa, Zea mays
  unsure (1)..(192): unsure at all Xaa locations
MAESEEHHLESKAEAAAPKTYPQQADTVRKNGFIVINNRPCKDVEVSTSKTGKDGHAKCHFAIIDIFNGKKRADIVPSSHNCDIPHANRTDYQLIDISEDGFVSLLTSHGNTNDDLRLPTDETLGAQINEGIKSGKDLVVTVQSAMGEEHICALKDVGPKXLPWLWRRNPTLSQLTSEEKCITTGLLPRHSP

SEQ ID NO: 3626 - protein, 160 aa, Zea mays
  unsure (1)..(160): unsure at all Xaa locations
MSDSEENHFKSKADAGACKTYPEHDGTVRNNGFISIENRPCKDGEVSTXKTGKHGHAECHFVAIDILHGKKLEDIGPSAHNCDIPHVNRTEHQLIDISEDGFVSLLTSDGNTNDDLTLPTDETLVVQIKEGFESGKDLVVTVQSAMGEEHICALKDVGPK

SEQ ID NO: 3627 - protein, 194 aa, Zea mays
  unsure (1)..(194): unsure at all Xaa locations
RSGSWIITYHPHPHLSPSACSSASFLIRPSQGSPCPDSEEHHFESKGDAGASKTYPQXAGTVRKNGFIVIKNRPCKGEEASTSKTVKHVHAKCHFVVIDIFNGKKLEDIVPSSHNCDIPHVNRTDDQLIDILEDGCVSLLTSDGNTKDDLRLPTDETLVDQIKAGLESGQDLVATEQSAMREEQICALKDVXPK

SEQ ID NO: 3628 - protein, 141 aa, Zea mays
MSDSEEHHFESKADAGASKTYPQQAGTVRKNGFIVIKNRPCKVVEVSTSKTGKHGHAKCHFVAIDIFNGKKLEDIVPSSHNCDVSLLTSDGNTKDDLRLPTDETLVAQIKEGFESGKDLVVTVQSAMGEEQICALKDVGPK

SEQ ID NO: 3629 - protein, 197 aa, Zea mays
  unsure (1)..(197): unsure at all Xaa locations
PDKPGIAVSDSEEHHFKSKADAGSSKTYPQQDGTVRKNGFIDIKNRPCKVVEVSTSKTGNHGHAKCHFVDIDIFDGKKLQDIVPSSRDCDIPHENRTEYQLIDISXDGFESLLTSDGNTNDDLRLPTDETLEAQIKEGVESAKDLVVTVQSAIAEEHICALNDVAPKELPCLAILLSRNLYRIKKRIKDCYRDIHLA

SEQ ID NO: 3630 - protein, 193 aa, Zea mays
MAAGFPMAYHLRLYFLLSLLLRLRLIHPRQGSPCSDSEEHHFESKDDAEAPKTYPHKAATVRKNGFIVIKNRPCKDVEASTSKTGKHGHIKCHFGAIDIFNGKEIEDIVPSSHNCDIPHVNRTEYQLIDISEDGFASLLTSYGNTEDDLRLPTDETLVAQIKEGFESVKDLGETVQSAMGEEQICAMKDGGPK

SEQ ID NO: 3631 - protein, 191 aa, Zea mays
  unsure (1)..(191): unsure at all Xaa locations
MSDSEEDHFXSKADAGASKTYPQQAATDRKNGFIVIKNRXPARSVEASTSETGKHVHAKCHFVAINIFHGKKLEEIVPSSHNXCDIPDVKRTEYQLIEISEDGFESLLTSDGNTKDDLILPTDETLVAHIKEGFEGGKDLVETVQSAMGEEQICALKXVGPSTYLPWNTVSQNLNRKKKCIKDCYRDIHLA

SEQ ID NO: 3632 - protein, 193 aa, Zea mays
  unsure (1)..(193): unsure at all Xaa locations
MSDSEDHHFQSKDDAGASKTYPQQAGTVRKNGFIVIKNRPCXVVEGSTSKTDKHGHAKCHFVAIDIFNVKKLEHIVPSSHNCDIPHVNRTEHHVIDISEDGFVRLLTSDDNAKDDVKLPTDETLVDHIKEGFXSVKDLGVTVQSAMMKGDIWTWKGVVPTCFLDFGDRTLLYLNLYPRRRVSPKDCYRDIHLP

SEQ ID NO: 3633 - protein, 162 aa, Zea mays
  unsure (1)..(162): unsure at all Xaa locations
MTDGEEHHXWATNADAXGTSNTYHKKGATARRNGSIVMKNRTCKGAEASTXKTGKHGHAKCHFVVIDIFNGKKLEDIVPSSHNCDIPHVNRTEYQLIDILEDGFVSLLTSDGNTKDDLRLPTDETLAAQIKEGHESGKDLVATVQSAMEEEQICALKDVAPK

SEQ ID NO: 3634 - protein, 164 aa, Zea mays
  unsure (1)..(164): unsure at all Xaa locations
MSDSEEHHFKSNADAGXASKTYPQQAATGRKNGFIDIKNRPCKVVEVSTSNTGKHGHAKCHFAAIDVFNDKKLEDIVPSSHDCDIPDVNRTEHQVIDISDDGCVSLLTSHGNTTDDLILPTDETRVVQIKEWCESGKDLVVTVQPAMGEEPICAMNDVGPKKLP

SEQ ID NO: 3635 - protein, 161 aa, Zea mays
  unsure (1)..(161): unsure at all Xaa locations
MSDSEEHHFESKADAVASKTYPQQDGTARKNGFIGIRNRPCKGAEVSTSRSGKHGHAKCHFAAIYIFNGRKLEPXIVPSSHNXDIPHVNRTEHQMIDISXDGFVSLLTSDGNTKDDRTLPTDDTLVAQIKEGFDSGKDLVETVQSAMGEEQICALNDAAPK

SEQ ID NO: 3636 - protein, 180 aa, Zea mays
  unsure (1)..(180): unsure at all Xaa locations
FLLSLLLRLRLIHPRQGIASVATLEEDHFESKDDAGASKTYPQXAGTARKNGFIDIKNRPCKAVEVSTSNTGKHGHGICHFVAINIFNGKNLEDIVPSSHNCDIPHVNHTEYHLTDISEDGFVSPLTSDWHTKDDLTLPTDDTLVAQINEGFXSGKDLAATVPSAMGEEQICALKECGPK

SEQ ID NO: 3637 - protein, 173 aa, Zea mays
  unsure (1)..(173): unsure at all Xaa locations
MSDSKEHHFQSKVDAGASKIYPQQAGTVRKNGFIDIXNRPCEVAEVSTSKTGMYDHAKCHFVAIDIFNEKKLEDIVPSTXHNCDIPHVNRTEYHLIDISEDGFVSLLTSDGNTKDDLTLPNDDTREAQIKESFESDKDLAVTVQSAMSNEXICTLKDGVPKQLPCLGILHLTI

SEQ ID NO: 3638 - protein, 162 aa, Zea mays
  unsure (1)..(162): unsure at all Xaa locations
MSDSEEHHFESKADAGAPKTYPHKAGTVRKNGFIVIMNRPCHDVEASTSKTAKHGHAKCHFXVAIDIFNGNELEQIVPSSHNWDIPHVNRTEYQLIDISEDGFASLLTXXGSTKDDLRLPTDETLVAQIREGFQSVXKDLVETVQTAMGEEHICAMKDVGPK

SEQ ID NO: 3639 - protein, 178 aa, Zea mays
  unsure (1)..(178): unsure at all Xaa locations
MTDSXEHHFKSKADAGVSDTYPQQAATVRKNGFIAIKNRPCKGVQVSTSKTDKHGHAKCHFVSXLYIFNWKKLEDIVPSSHDCDIPHVNRTEYQLIDISEDGSLLSLLTSDGNTKDDLRLPTDETLVSQISEGIESVKDLAVTVQNXAMGEEHICAMKDVAPKNTSLALETEPYSIST

SEQ ID NO: 3640 - protein, 162 aa, Zea mays
  unsure (1)..(162): unsure at all Xaa locations
MSDSXDDHFXSKADVGSLKTYPYXVGTVRKNGFIIINNRPCEVVEVSTSKTGKHGHAKCHFVAIDIFNGKKLEDIVPSSHNCDIPHESRTDYHVIDISKDGLVILLTSHGNTKDDLRLPSDXDTLVVQIXEGFESGKDLDVTVXQFAMGEEQICALNDDAPK

SEQ ID NO: 3641 - protein, 108 aa, Zea mays
  unsure (1)..(108): unsure at all Xaa locations
MSDSEEHHFESKADAGASKTYPQQAGTVRKNGFIVIKNRPCKVVEVSTSKTGKHGHAKCHFVAIDIFNGKKLEDIVPSSHNCDIPHVNRTEYQLIDISEDGFVSLLTX

SEQ ID NO: 3642 - protein, 161 aa, Zea mays
  unsure (1)..(161): unsure at all Xaa locations
MSDSEEHHLESKADAGASKTYPQQAGTVRKNXGSIGIKNRPCKAAEGPTXKTGXHGHAKCHFAAIDISNGKKLEDIVPSRHNCDIPHENRTEYQVIDISEDGCVSLLTXDGNTKDDLRLPTEETLVAQIKEGIESGKDPVGTVQSAMGEEQICALKDDGPK

SEQ ID NO: 3643 - protein, 161 aa, Zea mays
  unsure (1)..(161): unsure at all Xaa locations
MSDSEEHHFQSKADAGAPKTYPQHAGTCXRKNGFVVIKNRPCKGVEVSTSKTDKHGHAKCHFVAIDIFNGKKLAYIVPASHHWDIPHVNRTEYHVIDISEDGFVSLLTSRWDTKDDLRLPSDETLAALIIVGIESVKDLVVTVQSAMEEEQICTLKDVGPK

SEQ ID NO: 3644 - protein, 103 aa, Zea mays
  unsure (1)..(103): unsure at all Xaa locations
MSDEEHHFESSDAGASKTYPQQAGNIRKGGHIVIKGRPCKVVEVSTSKTGKHGHAKCHFVAIDIFTAKKLEDIVPSSHNCDVPXVNRIDYXLIDISEDGFVSL

SEQ ID NO: 3645 - protein, 161 aa, Zea mays
  unsure (1)..(161): unsure at all Xaa locations
MSDSEEHHFKSKADAGASKTYPQHDGTGRTNGFIVIKNRPCKGVEVSTSKTAKHAHAECHFVAIQIFNVKKLEYIVPSSHNCDIPHVNRTDYQLIDISEDGFESLLTSDGNTKDDRRLPTDETLVDQIKEGVESGXKDLAVTAQSAMSQEHICALTDVGPK

SEQ ID NO: 3646 - protein, 160 aa, Zea mays
  unsure (1)..(160): unsure at all Xaa locations
MSDSDVLHFESKADAGASKTYPQHAGTVRKNGFIVIKNRPCKVVEVSTSNTGKHVHGICHFVVIDIFNGKMLEDIVPSSHNCDIPHVNRTEYQLIDVPADGFASLLSSNGNTKVDLRLPIDETLVVQIKERIESVKDLVATVPSAMRHXRICTLKDVCTQ

SEQ ID NO: 3647 - protein, 188 aa, Zea mays
  unsure (1)..(188): unsure at all Xaa locations
MAKSEEHHFISKADAGATKTYPXEAGTARNNGFLVIKNRPCKVVEASTSKTGNHDHAXKCHFVAINIFHGKKLEDIVPASXHQCDIPYVNRTDYHLTDIAEDGYRTLLTSHGNTSDDLILPADETLEDHIKERVKSVKDLVVTVQTAMDEEHICSLKDVTPRNFLGFADGTLLYLYLNRNTSVSPKDC

SEQ ID NO: 3648 - protein, 160 aa, Zea mays
  unsure (1)..(160): unsure at all Xaa locations
MSDSYEHHFXSKGNAGSCKSYPQQAGTVRKNSVIAINNRPCKGVEASTSQTGKHGHANMRTVAASLFNTTRLEDLLPSSHNCDIPHANRTENQLIDISKDGFVSLLTSDGNTKDDLRLPTDETLVAQIKEGFESGKDLVVTVQSAMGEEQICALKDVGPK

SEQ ID NO: 3649 - protein, 190 aa, Zea mays
  unsure (1)..(190): unsure at all Xaa locations
MAAVFPDSTLSSLSAPPPASDTSKRGIYHARTTXEHHFESKADAGACKTYPQQAGTVRNNGFIDIKNRPCKAVEVSTSNTDTNGHIKCHFVAIHIFNVKKLEDIVPSSHNCDIPHVNRTEYQLIDISEDAFASLLTSNGNTRDDLRLPTDETLVDHIKEGFESGKDLVXATVQTAMSDEXICALDDDGPK

SEQ ID NO: 3650 - protein, 192 aa, Zea mays
  unsure (1)..(192): unsure at all Xaa locations
MPAVSPHYLCALLSSLSAPPAPPDPSWTGIAMSDSEEHDFXSYADAGASDXTYPQHAVTVRKNAFIVIKNRPXXVAEASTSKTGKHGHAKCHFIAIDIVHGKKLEDMVPSSHNCDIPHGNRTDYQLMDISEDGSVRLLTSDGDTTDGLILPADETLVVQIKEGFXSAKDLVVTDHSAMGDEHICAMKDDDPK

SEQ ID NO: 3651 - protein, 161 aa, Zea mays
  unsure (1)..(161): unsure at all Xaa locations
MPHSDEHHFXESEADTGASETYPQDGVTVRKNGFVDMKNRPCKVGEDSTCETGKHGHSKCHFVDIHLFHGKRLEYIVTSSRKCDIPYVNRTEYHVIDISEDGFVNLLTSDGDTKDDLRLPTDETLVAHIREGFESGKDLVVTVQTAMTQEHICAMKDVGPK

SEQ ID NO: 3652 - protein, 145 aa, Zea mays
  unsure (1)..(145): unsure at all Xaa locations
MSDSEEHHFESKAXDAGASKTYPQQAGTERKNGFIDIKNRGGKGKNVFTSKTGKHGHAKCHFVAIDIFNGKKLKDIGTXSHNXDIPHENRTEXQLIDITEEGLESLLTSDGNTKDDLRLVAQIKEXFESGKDLGVTVQSAMGEEX

SEQ ID NO: 3653 - protein, 169 aa, Zea mays
  unsure (1)..(169): unsure at all Xaa locations
CIQDRNRHDRTTEEHHFESKVEAVLLKTYPHQVVTARKNGFVVIKNRPCKAVEVATTKTXGKHDLSKCHFVAIDIFNGKKLEYIVPSSHNCDIPHENRTEYQLIDISEDGFVSLLTSYVNTNDDLRLPADETLVAHIKEGFESGKDLVVTVQSAMGEEQICAVKDVDPK

SEQ ID NO: 3654 - protein, 162 aa, Zea mays
  unsure (1)..(162): unsure at all Xaa locations
MADSEEXHFQSKCXDALAPITYPQQAAIVRKNAFVFINNRPCQVAEGSTSKTGKHGHAKXHFVAIDIFNDKKLEDXXPSPHNCDIPHVNRTEYQLIDISKDGFVSLLXTSYGNTKDDLTVPTEETLVAQIKEGFESCKDLVVTVQSAMWDDHICALKDVGPK

SEQ ID NO: 3655 - protein, 216 aa, Zea mays
  unsure (1)..(216): unsure at all Xaa locations
CAGARWRPYLPSLIICASTFLLSLLLRLRRIHPRQESPCLDSEEHHFKSNDDAAAAETYPQQAGPARKNGFIAIENRPCKAVEVSTSQTGTHGHAKCHFVAIDIFNGKKLEDIVPSSLNCDIPHANRTEYHLIDISEDAFASLLTSDGNANGDLRLPTDETLAGQIKEGFESCXKDLVATVQSALMDEQICALXDVVPNQLPWLWRQNPTGSQLKS

SEQ ID NO: 3656 - protein, 194 aa, Zea mays
  unsure (1)..(194): unsure at all Xaa locations
MSDSEEHDFKSKDDAATSKTYPQQADTARKNGFIVIXNRPCKVEEVSTSKTGKYGHALCHFAAIHIFNARQLEDIGPSSHNCXDIPYANRTEYQLIDISEDGSVSLLTSDGSTKDDLRLPTDETLAAHIREGIXSVKDHVETVQTAMWEEQICAMKDVGPQELPWIWILNPTVSQLKSEKNVYTKGLLPRHSLA

SEQ ID NO: 3657 - protein, 157 aa, Zea mays
  unsure (1)..(157): unsure at all Xaa locations
XEEXHNETKADDGAAKTNPKEAGTERKNGIIVIKNRPCKGVEGTTSKTGKNGHAKGHWAAIDIVKGKKLEEIAPSSHNGDIPHVNRTEYQLRDISEDGFESRLTSEGNTKDERRLPTEETLEAQIKEGIERGKDLDVTDQSAMGEEQICALKDGGPX

SEQ ID NO: 3658 - protein, 162 aa, Zea mays
  unsure (1)..(162): unsure at all Xaa locations
MSDSEEHHFXSKADSAGCNTYPHDAGTVRKNGFISIKKRPCKDVEVSTSQTGKHDHARCHFGAVDIFNGKXKLEDIVPSSHKCVIPHVKRTEHLLIDISXEDGFVSLLTSHGNTKDDLRLPTDETLVAQINERFESGKDLGVTGQSAKGXEHICAVKDAGPK

SEQ ID NO: 3659 - protein, 168 aa, Zea mays
  unsure (1)..(168): unsure at all Xaa locations
MTGIAMSESEEHHFXSNVDAXGASNTYPQQDGTVRKNGFIDIKNRPCKVVXDTTSXTGTHXGHAASHFADIDIFKGKKVEDIVPSSHNCDIPHGKRSEYHLIDICEXDGFVSLLTSYGNTKDDLTLPTDETLVGQIKEGCESGKDLVVTDHAETGDDQICAVDDDGPA

SEQ ID NO: 3660 - protein, 160 aa, Zea mays
  unsure (1)..(160): unsure at all Xaa locations
MSDSEEHHFQSKGDAGGCKTYPQQGGTVRENGVIVIKNRACEGGGGSTSKTGEHGHAKCHFVAIDIFNGKKLEDIVPLSHNCDIPHVNRTEDQLSEISEEGGVRLLTSYGDTKEELILPTEETLVGQIKEGVESGKDLVVTVHSAMGEEEICAXKDVGPK

SEQ ID NO: 3661 - protein, 191 aa, Zea mays
  unsure (1)..(191): unsure at all Xaa locations
MSDSEEHDFESKDDAGPTNTYPQQVGTARKNGFIVIKNRPCKAAEGSTSNTVNHGHAKCHFVAVHIFNAKKLEDIGPSSHNCDIPHANRTEYQLIDISEDGFAILLTSHADSKEDLRLPTDETLVAQIMXGGQAVKDLDVTVQTAPYEEQICALKDVGPKPLPCLWTLYPTVSSTCIGKEVHLLKDWYRYI

SEQ ID NO: 3662 - protein, 127 aa, Zea mays
MSDSEEHHFESKDDAGAPMTYPQQAGNVRKNGFIVIKNRPCKDVEVSTSKTGQHGHAKCQFVAIDIFNGQKLEDIVPSSHDCDIPHVNRTDYQVIAIREDGFVSLLTSDGKTTADLTPANDETLGAQ

SEQ ID NO: 3663 - protein, 195 aa, Zea mays
  unsure (1)..(195): unsure at all Xaa locations
MSCSEEHLFQLNADARXAYETYPXQGGADGKNGFVSIRNRPCKVEEVSTSKTGDDGHGKCHFVDRDIFDGXKLEYIVPSSHNCVFLYANRTEYQLIDISEEGFVSLLTSHGNSKDDLILPTDETLVAQIKERFDSDKDLDVTVQSAMGEDHSCAVKDVHPHQLPWLCGRNPTVSQLRSENKRITTCIATETFTLT

SEQ ID NO: 3664 - protein, 162 aa, Zea mays
  unsure (1)..(162): unsure at all Xaa locations
MSDSEEHHFESKADAGASDTYPQHAATGRNNGFIFFKNRPCKGVQVSTSNXTGKHGXHAKCHFGAINIFSVKKLGDIAPSSHYCDIPYVNRTEYQLIDISEDVSASLLTSYGKTNDDLRLPTDDTLEVQINEWFXSAKDLVVTVPSAMGEEHICALNDVAPX

SEQ ID NO: 3665 - protein, 162 aa, Zea mays
  unsure (1)..(162): unsure at all Xaa locations
MSCSEEDDFQCEADAGAMNTYPEEDGTARNNGFLAIQNRPCKAVEGATSKTAKCGRATCRFADLDIFDGKKLEDIVPSSHNCDIPHVNRTEYQLIDIXEDGFVSLLTSHGNTKDDLRLPTDETLVCQIKEGIESGXDLAVTVHPAMAXEQIXLLKDGELLVT

SEQ ID NO: 3666 - protein, 164 aa, Zea mays
  unsure (1)..(164): unsure at all Xaa locations
MFYSEEHHSRSKADAGAPRTHPQQAGTVRNNGYIASKNRPCKVGEDSTTKTGKQGHAKRHVAAIDIFNGKKLEDIVPPAHNRDIFYATPPEHQVNDISEDGAVSQRTTXGNTKEDLRHPTEETLVTQIKEGFESGKELVETVQAAMGEEQNGAREDDGPKKLTC

SEQ ID NO: 3667 - protein, 186 aa, Zea mays
  unsure (1)..(186): unsure at all Xaa locations
MPDSHEHHFQSNADAVAINTYPHHAGTGRKNDFIFIENRPCKVVEVSTSNTVKHGHAKCHFDVIHIFNAKKLEHIVPSSHNCDIPHANRTEHQLIDITEDGFVSLLTSDGKTNDDLILPTDETLVAHIKEGVESGXKDLVETVHSAMAEDQICXAMNDAGPKQLPWLWRRNSTVSQLKSEKKCITI

SEQ ID NO: 3668 - protein, 175 aa, Zea mays
  unsure (1)..(175): unsure at all Xaa locations
MSDSEEHHFKSRPFLGXSKTYRRGGWTGPKNGVIFIKNRPCKGGGVSTSKTGKHGHPKCHFVAIDIFNGKRVEDIVPSSHNCDIPHVNRTEDQLIDISEEGFVSLLTSHGNTKEELRLPTDETLVAHIKEGFXSGKDLVVTVHSPMGGEQICPLKDVGPKKLPWFWGRNPTLSHL

SEQ ID NO: 3669 - protein, 121 aa, Zea mays
  unsure (1)..(121): unsure at all Xaa locations
MSDSEEHYFESKTDAGEFKTYPXQADTVRKNDFIVIKTRPCKAVQVSTSKTGKHGHDKCHFVAIYIFDGKKLEDSVPSSHNXEVPHANRTEHTVIDISEDGLLSLLTSDVHTKDDLTLASD

SEQ ID NO: 3670 - protein, 221 aa, Zea mays
  unsure (1)..(221): unsure at all Xaa locations
MPAVSTSLSLRSTFLLSLLLLLRLIHPRQESPCLDSEEHHFKSKADAGASNTYPQHAGTVRKNGFIDINNRPCKVXVEVXSTSNTGKHDHAKCHFVAIHIFDGKKLEDIDPSSHXDCDIPHVNRTEYQLIDISEDGFERLLTSDDSTKDDLILPTDETLVVHIKDTCSIADKDLVCTXVHSAMGEEHICTLNDVGPNELPWLYRLNPTVSQLISEHNCITE

SEQ ID NO: 3671 - protein, 146 aa, Zea mays
  unsure (1)..(146): unsure at all Xaa locations
GCPSTYPXHAGTVRKNGFIVVKNRPCKGVEVSTSKTGKDGRAQCHFVAIDIFYDXKKLEDSVPSSHNCGIPHGYRTEYQLIDISEDGFVMLLTSYGDTKDDRRLPSDDTLAAQMKEGFESAKDLVVTDQSAMIEEQICALRDVXPX

SEQ ID NO: 3672 - protein, 161 aa, Zea mays
  unsure (1)..(161): unsure at all Xaa locations
MSDSEEHDFESKADAGASKSYPQHDDTGRNNGFIVINNRPCKGVEVSTSXTAKHAHAECHFVPIQIFNVKKLEYIVPSSHHCDIPHVNRTDYQLIDISEDGFESLLTSDGNTNDDRRLPTDETLVDQIKEGVKSGQGXLAETAQSAMSQEHICALKDVGPK

SEQ ID NO: 3673 - protein, 163 aa, Zea mays
  unsure (1)..(163): unsure at all Xaa locations
MSDSEEHHLQIXKADTGAIKTYPQXGGTVRKNGFIGIKNRPCKXTAEVFTSKTGKDGHAKCHFDDIDIFNGKKLEDIVTSSHNCDISDENRTEYQLIDIXSEDGFESLITSNGNTKDDLRLPTDETPVAQIKEGLESGKDLVETAQTEMGKEHNCSKKDVMPK

SEQ ID NO: 3674 - protein, 166 aa, Zea mays
  unsure (1)..(166): unsure at all Xaa locations
MTQSKEKHCQLKADAGSXSKTYPHEASPVRKNGFIVITNRPXQVVQVPTSETGKHEHVKCHFVAIQIFLGNKLQHIAPSSHNXGIPHVKRNDYHLIDISXDAFVSLLTSDSNSNDDLILPTDETLAGQIQEGFXESDKDLAVTVSXSAMGEEHICALNDGAPKKLR

SEQ ID NO: 3675 - protein, 107 aa, Zea mays
  unsure (1)..(107): unsure at all Xaa locations
MWDSEEHHFESKADAATCKTYPQQAGTVRKNGFIVIKNRPCKVVEVSTSKTGKHGHAKCHFVAIDIFNGKKLEDIGPSXHNCDIPHVNRTECHLIDLSKDGLESLLT

SEQ ID NO: 3676 - protein, 160 aa, Zea mays
  unsure (1)..(160): unsure at all Xaa locations
MSDSEXYHFQSNDDDGAPNTYPYHVGTARKNVFIVIKNRPXNVVEVSTSKTGNIGHAXCHFVHIHIFNGKKLEYIDPSSHNXDIPHGNRTEYRLIDMSDDGFVILLTSDGNSKDDLRLPTDDTLACHINEGFESWNDLVVTAQSAMRDEDICAMNDDGPE

SEQ ID NO: 3677 - protein, 125 aa, Zea mays
  unsure (1)..(125): unsure at all Xaa locations
IAVSDXXEHHFXSKADSGASKTYPHQAGTVRNNCFIVIKNRPCKVVEVSTSNTVNHGHAKCHFVAIDIFNCKKLXDIVPSSHNCDIPHLNRTEYHLIDISXDGFVSLLTSDGNTNDHLILPTDEX

SEQ ID NO: 3678 - protein, 175 aa, Zea mays
  unsure (1)..(175): unsure at all Xaa locations
MPPKQPYLCRTQEDHNFKSLDCGVASQTYTIQCVTVLKNXLIRFKNRPCKVEEVSTSQTGNHEHALWHFVDIYIFHVKKIGHIAPSSNYCDIPHANRIEHQVIDISEDGFVSLLTSDGNTRDDLRLPTDETLVAHIKEGFESGKDLVVTVQSAMGDEQICPLKDGAPSHLPAVEY

SEQ ID NO: 3679 - protein, 185 aa, Zea mays
  unsure (1)..(185): unsure at all Xaa locations
ASPSAPLSISLXLRLLLDPAKPGIXRXDSEEHHFESKADAGXSKTXPQQAGTXRXNGFIVIKNRPPXXVEXSTSKTXKHGHAKXHCVXIXIFNGKKXEEIVPSSHNXXXPHXNRTEYQXSXKXXDGFXSLLTSEGNTKDDLRLXTXETLVAHIKEGFXSCKDXVVTFQSXIGEEQNXXPKDVGPX

SEQ ID NO: 3680 - protein, 162 aa, Zea mays
  unsure (1)..(162): unsure at all Xaa locations
MSDSEEHHFESKAEAAASITYPQNAGTVRNNDFIYIYNRPCKGVQVSTSPTGKHDXHAKYLFVAIHIFDGKKLEDIVPSSLNCDIPYVNRTDYQLIDISEDAFVSLLTSDDSTKDDLILPTDETLVVHIKDRFLXSDKDLAVTVLSAMKNEQICALKDVHPE

SEQ ID NO: 3681 - protein, 192 aa, Zea mays
  unsure (1)..(192): unsure at all Xaa locations
MADSEEHHFQSKADAEKYRTYPHEGGTDRNNGFIVIQNRPCKAVEASTSKTDKHAHAKCHFVAVYIFHGKKLENIVASSHHCXDIPHENRNDHHVIDISEDGFVSLLSSYGNTKDDLKLPTDETLAAHINEGFESAKDLVVTVQTAMREEQMCALNDAGPQXLPWLCTRNPTLSQLISEKNRITKGLLPRHS

SEQ ID NO: 3682 - protein, 225 aa, Zea mays
  unsure (1)..(225): unsure at all Xaa locations
MPVDQPALSLCLYFLLSLSPPAPPDPSYTGIVMSGSEEHHFKSKADAAASINYPQHAGTVRNNGFIDINNRXPCKVVPGSLLSNTGKHDHAKCHFVAIHIFDGKKLEDISLPSSHYCDIPYRERTDYQLVDISEDVFESLLTSDDSTKDDLILPTDETLVFHITERFYSRKDLVVTVXSAMGNEPICALKDVAPKKLPCLWRPNPTASQLKSANIWITKPLLPTH

SEQ ID NO: 3683 - protein, 115 aa, Zea mays
  unsure (1)..(115): unsure at all Xaa locations
MLDWGEHHFESNADAVAFKTYPQQAGTVRTNRFILIKNRPCKAEQVSTSQTGKHGHAXCHFVSIYIFNGKKLQDIVPSTQKCDIPDVNYTEYQLIDISQDGFVSLFTLDGNTKDD

SEQ ID NO: 3684 - protein, 162 aa, Zea mays
  unsure (1)..(162): unsure at all Xaa locations
MSDSEEHDFESYADAGASDTYPQHAVTVRKNAFIVIKNRPXXVAEASTSKTGNHVHLKCHLCXAIHIVHGKKIEDMVPSSHNCDIPHVXNRTDYQLIDISEEGFVRLLTSDGNTTDGLILPADETLVVQIKEGFXSSKDLVVTDHSAMKDDYICALXDDVPK

SEQ ID NO: 3685 - protein, 121 aa, Zea mays
  unsure (1)..(121): unsure at all Xaa locations
MGDXEEHHFESXAHPRASKTYPQQAGTGRKNGFIXIKNRPRRXXXVSTSKTGXHGHAKCHFGAIDIFNGKKLEDIGPSAHNCDIPDVNRTEYQVXGISXDGFGSLLTSNGNTKEDLKLPTX

SEQ ID NO: 3686 - protein, 103 aa, Zea mays
  unsure (1)..(103): unsure at all Xaa locations
MSGSGEHHFESKADTRAYKTYPQQAGTVRKNSFIVIKNRPCKVVXVSTSKTGKHGHAKCHFVTIYIFNGKKLEDIAPSSHNCYIPNVNRTEYQLIDISXDXFX

SEQ ID NO: 3687 - protein, 128 aa, Zea mays
  unsure (1)..(128): unsure at all Xaa locations
XSSMAQEKAHVPTQCSALRKGGFVMLKEHPCKIVDMSTSKTGKHGGAKVHLVGVDIFTEKKVEDICVSTHNMDVPVVERKDYQLIDIDGDDVTYLDETGSSFTNLKMPSLCESDLTLATDLREKFXEL

SEQ ID NO: 3688 - protein, 124 aa, Zea mays
  unsure (1)..(124): unsure at all Xaa locations
MSDSEEEHFESKADAGACKTYPEHADTVRKNGFIVIKNLPCKDVEVSTSKTGKHGLATCYFGAIYILNGKKLEDIESSSHNXDIPHVNRTEYXLIDISXDGFVSLLTAHGNTKXDDLRLLTDXX

SEQ ID NO: 3689 - protein, 161 aa, Zea mays
  unsure (1)..(161): unsure at all Xaa locations
MTDSGDDHFESKADAVASKTYPKXGGTGRKNGFFVINNRPCKVVEVXSTSKTANNEHDXCHFVAIDIFNGKWLEHIVPSSHNCDIPHANRTEYHMIDISDDGSVRLLTSHGDTXDDLRLPTDETLVAHIREGIXSVKDLVETVQTAMWEEQICAMKDGGPQ

SEQ ID NO: 3690 - protein, 193 aa, Zea mays
  unsure (1)..(193): unsure at all Xaa locations
MSDSDEXHHFQSNADAASSKTYPQNGGSVRKNXGFIVIKKRPCNVVXVSTSKTGKNVHSKWHFVVIHIFNVNXFGDIAPSSHXNCDIPHVNRTEDQLIDISEDGYDDLLXTSDXGITNDDLKLPTDETLVVHIKEDFXSGKDLVVTVHSAMLHAYICALNDVGPKQLSWIWRRNPTLSQLTSDKKCITRGLLP

SEQ ID NO: 3691 - protein, 190 aa, Zea mays
  unsure (1)..(190): unsure at all Xaa locations
LCTSTLLLSLILRLRLIHPRQGSTCSDSQEHHFESKADAAACKTYPQQAGTXIRKNGFIAIENRPXXKVDASDSXTSKTDRHDHAICHFVAIHIFHAKKLEDIVPXSSHNWDLPHVNRTEYQLIDISEDGFASHLTSDDNTKDDLRLPSDGDLLTCPKEGFESEKDLVVTVQSRDDXEEHICAWNDDGPQ

SEQ ID NO: 3692 - protein, 200 aa, Zea mays
  unsure (1)..(200): unsure at all Xaa locations
FILKFPPPSLISLLLRLLLSPVKTGICHVRTLEEHHLRTPSDAGASNIYPRQGGPVRKNGFIVFKNRPCQVVWVSTSETDEHGHAKCHFVAIDIFKGEKLEYTAASSHNCDIAHVNRTEDHLIDISHDGSVSLLXTSDVLTNDDLILPADDTLVGQIWEXGTRTVKDLVVTVQSVYAEECICALIDAGPKLLTCLEILYL

SEQ ID NO: 3693 - protein, 131 aa, Zea mays
  unsure (1)..(131): unsure at all Xaa locations
MPHLDDHQLESKVDTQASKTYSQNAGSARMNSLIVIKNRPCKVEEVSTSITGNHGHAKCHFAVIHIFNAKKIEYIVPSSHNXDITHVKRTQYRLIDISEDGFASLLTSDGNTKDDLRLPTDETLVAQIKEX

SEQ ID NO: 3694 - protein, 164 aa, Zea mays
  unsure (1)..(164): unsure at all Xaa locations
SIQERDRHVRTRQEHHFRSIADAGACKTYPXQGGTVRKNGSIVIKNRACEVTEGCTCKTGKHGXHAKXCQFVDIDIFDGKKLENIVPXSHTWDIPHVNRTEFKLIEISEDGYVSLLTSDGNTKDDLRLTTDETVVAQIKEGLKSGNDIDETVQPRTVEEQICTX

SEQ ID NO: 3695 - protein, 132 aa, Zea mays
  unsure (1)..(132): unsure at all Xaa locations
GRVGKHVDRNKKEHHYXEKKADTGANKTYQEXHAGTXVRKNGFIXVIKNRSCKGGEVFTYKTGKHGHAKCHFVAIDIFNGKXLEDIETXSHNCDIPHVNRTEYELIDIYEDGIVSLLTSDGNTKDDLRLPTD

SEQ ID NO: 3696 - protein, 128 aa, Zea mays
  unsure (1)..(128): unsure at all Xaa locations
MSDSDEHHFELDGRAGSSKTYPAHAGTVRMNCFIVIKNRPCTAVEVSTLKTDKHGHAKCYFVAIDISNGKKFEYIGPSXHILHITAVNRTEYHMIDISDYGLASFLTSDGNTNDDLKLPTDYTLVAQI

SEQ ID NO: 3697 - protein, 166 aa, Zea mays
  unsure (1)..(166): unsure at all Xaa locations
MADSEEHHFXSKADVGEYKIYPHEGGPDRKNGFLGIKNRPCKAVEASTSKTDKHAHAKCHFVVIYIYTGKKLENIVASSHNCXDIPHVNRTXDHQLXSDISEDGFVSLLTSDGNSMDDLTPPTDDTLVAHIIDTCERAKDLLVTVQSAMXHGHICALKDVRPXKLP

SEQ ID NO: 3698 - protein, 122 aa, Zea mays
  unsure (1)..(122): unsure at all Xaa locations
LPCKDAEDYTXLTVKHGHAKCHFAAIDIFNGKKLXQIVPSSHNCDIPHVNRTEYQLIDISEDGFASLLTSDGNTKDDLRLPTDETLVAQIKEGSESGKDLAVTAQSAMGEEQICALEDDGPK

SEQ ID NO: 3699 - protein, 102 aa, Zea mays
  unsure (1)..(102): unsure at all Xaa locations
XGLSVATSKTGEHGHAKCQGVAIDIYNGKKLEDIGPSSHNWDIPHVNRTEYQLIDISEDGFASLLTSDGNTKDDLRLPTDETLGAQIKGGYESGKDLCVTVQ

SEQ ID NO: 3700 - protein, 183 aa, Zea mays
  unsure (1)..(183): unsure at all Xaa locations
SSRTSDHHVRSRAEYHXFKSKGDAAACMRXPQNAGTARNNGFIVIKNRPXKGVEVSTSAXTGKNGHAKCHFVGIDIFNGQELEDIDPSSHNXDIPHAHRTEYQLXIDISHDGLDILLTSNGNTKEDLRLPTDDTLGCQIDERFASVHDPGENVQTAMEEEHICALNDEVPDQLPCLGILYLLT

SEQ ID NO: 3701 - protein, 166 aa, Zea mays
  unsure (1)..(166): unsure at all Xaa locations
MWDSEEHQFESKDDGAEGKTYSKNTGTARMNEFIIIINRTCKVEEGSTSKTGTNVHAXLCHFVCIDIYNGKNVEDMVPSSYNCEIPNANRTDDQMIDISEDVFVSLLTSDGKTNDDRKLPNDDTLVAQIMEGLESVXKDLGVTVQTAMXDEQICXAHKDDGPNKLP

SEQ ID NO: 3702 - protein, 164 aa, Zea mays
  unsure (1)..(164): unsure at all Xaa locations
MAMQDSEEHHFKSKAAAGYSKTYPKXRLAPDRKNGFIDYKNRPCTVGEVLTXKTANNAHAKCHFVAIDIFNGXKKLEDMXRLGNKXDIPYGNRTENQVIVIXEDGFVTLFTXDGDTKDDLRLPTDETLVAQIKEGSETRKDLAGTDQHAMGEEQIXALKDVDPQ

SEQ ID NO: 3703 - protein, 154 aa, Zea mays
  unsure (1)..(154): unsure at all Xaa locations
ESPXSDSEEHHFXSEXADAGASXTYPQQDETAHKNGFFIIKNRPCMDEXDTTSITAKHVHGQCHFXAFIHIFNGKKLEHSAPSSHNWDVPHVNRXTEYHLIDISDDASVSLLXTSNANTIDDLKLPTDETLEAHIKEGFXSRNDLDVTVHTAMX

SEQ ID NO: 3704 - protein, 191 aa, Zea mays
  unsure (1)..(191): unsure at all Xaa locations
SRILHVRLIHHLQGSPCSDSEEHRFXSKADSGTTETYPLQDVTVRIIDFVDLKNRPCTXVEVXTSKTGKDDRAKCHFVAIDIFHGKQLEDIVPSLHLCDIAHVNRTDYQMIHISEDAFGMLLASYGNTNDDLILPTDETLEVHIIERFESAKDLVIXTVQTDMDKDQSCSMKDVEPNILHCVFRRNPTVSR

SEQ ID NO: 3705 - protein, 115 aa, Zea mays
  unsure (1)..(115): unsure at all Xaa locations
MSXGDEHHFXSKADSGASKTYPHHAATARKNGFIAINNRPCMVVKVSTSKTANHAHTKCHFVAIYISIGNNLEDNDSLSHICDIPHVNLSAYHLIDISXDXFMSLLTSNGNTNDD

SEQ ID NO: 3706 - protein, 178 aa, Zea mays
  unsure (1)..(178): unsure at all Xaa locations
KDSIGPPVANARSRPPVACQAYYPLQAVTARKNGFIGIKNRPCKVVEGATXERTGHHGHAKCHFAAIDSXFNGXKSSTDIGPWXHNCNILHGNRTEYXSLNDISEDGLASLLTSDGNTNDDLTLPTDETVAAQIKEGVESGKDLVVTVQTAMAEEQIXALKDVGPKQLACLEILYLRN

SEQ ID NO: 3707 - protein, 167 aa, Zea mays
  unsure (1)..(167): unsure at all Xaa locations
SLLDRDRHVWTRLEHHFKSKADTGASDIYPQHAATGRNNGFIFFINRPCKGVPVSTSPTGKHGHATCPVRPLNIFSVKKLGDIAPSSPCCDFPYVHLTEYQMIAISEDVSASLLTSCGMTIDDLRLPTDDTLEFRIIESFYXSQKDLXVVTVPSALGEXAICALNDX

SEQ ID NO: 3708 - protein, 98 aa, Zea mays
  unsure (1)..(98): unsure at all Xaa locations
MLDLXEHDLESKADAGASKTYAHHAGTVRKNGFIGIKNRPXKVVVVPTSETVHHGHAKCHFAAIDIFNGKKLEDIAHXSHNCDITYVNRTEYQLIDLX

SEQ ID NO: 3709 - protein, 154 aa, Zea mays
  unsure (1)..(154): unsure at all Xaa locations
MADEEFEYQENTEGGLXXTPSTAGDIKKNQFMLIKGAPCKVMDKSTSKTGKHGHAKCNIVGICQLTGKKYQDVLPAHAAVMVPKITRTEYQLLDLTKSDDGGGFCSLLDEKNNTIELPLEGEEAEKLIADYDPNNTDEDILVAVLAVAGXDWVS

SEQ ID NO: 3710 - protein, 169 aa, Zea mays
  unsure (1)..(169): unsure at all Xaa locations
MTREEHHCLNQMPTPPPSKTYPHDAASARNNGFFGIKNRPCKAAKAPTSNSAXHGHAKCXALLSIDIFHVKKLEHIVPSSLNCDIPPENRTEHQLIDISXDGVVSLLTSDDNTKDDLMTPPCNTLVTLIXEGVESGQDLAATVQPAMTDQQICALKDVFPSNFPALEYC

SEQ ID NO: 3711 - protein, 163 aa, Zea mays
  unsure (1)..(163): unsure at all Xaa locations
ILPRDSQEHHTTHKADPRTRKTYPETTTTRRQNGLMVINNRTYTTVEGGTCTTAHHRHPKRHLHALDIFNEKKLEDTDHSTHITDTPYVNPTEYQTTEIADDGTVSHYTXDGNTNHDLRLPTDETFVAQIKEGLQSNKDLVVTVQYGMGXSEQISTLNDAAPX

SEQ ID NO: 3712 - protein, 130 aa, Zea mays
  unsure (1)..(130): unsure at all Xaa locations
MDPVKPGIDHDDSDEHRFESKAYARAVKSYPXQGCHTXQKNSCIVIKNRPCKGVQVYTXNTGXHGHAKCHFDXIDMFNRKKLADIGTWSHNCDISHVNRTEFQLIDISQDGFGRRFYSNGNTNDDLRLPT

SEQ ID NO: 3713 - protein, 190 aa, Zea mays
  unsure (1)..(190): unsure at all Xaa locations
MAGSEEHELESEGDAGGANSDPQEGGTVRKNGFIGXIDNRPCKGGEVSTSETGSGGHGRCHFVGIDIFKRRKLGHIVPSAHNWDIPHGDRTGDQVSGRSGDGFVERLTSDGNTKDELALPSERRLGGHIEEGVERGKDRAVSGEAXVWGEEQICALKDVGAQVTSLPWNSVSAKRWVRKKKGIKDCYGDV

SEQ ID NO: 3714 - protein, 95 aa, Zea mays
  unsure (1)..(95): unsure at all Xaa locations
TKTRNAXXDXHEHHXEXKADXGAXKTNPQQXGTXRKNGFIVXKTRPSKVVEVSKNKTGKHGHAKXHFVAIDIFNGKKLEDIVPSSHXCXXPHVXX

SEQ ID NO: 3715 - protein, 143 aa, Zea mays
  unsure (1)..(143): unsure at all Xaa locations
MSYSXDHHFXSKGDVGANNTYPKHDGTVRKKGFFAIRKRPCTAAEASSAXTAKYGHAXWHFVVVDVFNGKKLENIVASTHNCDVSLLTSDGNSKDDLRLPTDETLVRQIKEGVESGKGXLVVTVQSAMXXEEQICALKDDDLK

SEQ ID NO: 3716 - protein, 183 aa, Zea mays
  unsure (1)..(183): unsure at all Xaa locations
RTLEEHHFRIXKADAARGTTYPQNDGTARNNGFLDINNRPCQAVEGSTSPTATHGXHAKCHFALIDIFHGKERENIVPSSHXNCDXVPHANSVTEYQMIDIXSDDGFATLLTSNVNAKGDLKLPTDETLAGQINERSDQXVYDLVATAQTALIDEQIXPIXDGVPNQLPWICRHYPTGSPLTS

SEQ ID NO: 3717 - protein, 196 aa, Zea mays
  unsure (1)..(196): unsure at all Xaa locations
MILTSTIWRLPAPPPVFGERRKPATSMTYXDEDHFESTADLQETSTQRQRAGTASKNGFICVNNRHVQVTRVSTSKTGTNAKGTCHFDAIDVFTGRQIVDIATSPCNCAMPHVNRTEXPLIDISEDGFVRLLTSQGNTKDAVRLPTDETLVCQNDGGAESGKDLAVTDQPAMGDXQICAVNDGGPKELPWLGIMDL

SEQ ID NO: 3718 - protein, 162 aa, Zea mays
  unsure (1)..(162): unsure at all Xaa locations
MGMGDSEEHHLESEGRRSGANMNYLKKAGTGRMNGWIGIKNQSLADVEETTXRLRSXGHDKAVSRILHIERKKHEHIGPVRHICDIAHVNRTEHHLIDIXDDGFVSLVTXDGNTKEDLKLPTGETLVAQIKEGFESGKDLVVTVQSAMGEEQICALKDVGPK

SEQ ID NO: 3719 - protein, 184 aa, Zea mays
  unsure (1)..(184): unsure at all Xaa locations
PCEDSEDDHXXESKAXDSAWCKTYPWHCGTGRRNAFIVIKNRTXQGVKCSTSKSGXHGHRXMHTLAAXDIFNDKKVATIFAPSSHECYIPHGQRTDDHVIEISDDGFESLLTSQGNTKDDLRLPTDDDXLWTHITVRGSNSRXKDLVATVQXAAMWDEQICAIDDAGHQITSLYWKTEPYCIST

SEQ ID NO: 3720 - protein, 134 aa, Zea mays
  unsure (1)..(134): unsure at all Xaa locations
MSDSEEHHFESKADAGASKTYPQQAGTVRKNGFIVIKNRPCKVVEXXXXXXXXXXXXKWHFVXIXIFNGKKIEDIVPSSQKWDXFFLPPPPHQLIDTPDDVSVPLPNHNVSSNFHPRPPSSPPPPLPALPPPPX

SEQ ID NO: 3721 - protein, 103 aa, Zea mays
  unsure (1)..(103): unsure at all Xaa locations
TVVEANTSYTGNHFHAKCHFGAVDIFNRKKLXYIVPSSHNCDIPHVNRTDYQLIDISPNGFASLLTXDGTTKDDLTLPTDETFVAHIKEGFESGNDLLVTVHP

SEQ ID NO: 3722 - protein, 136 aa, Zea mays
  unsure (1)..(136): unsure at all Xaa locations
SILYRYRHVRTRVEHHFXRSRADGVPPLTYPQKAGTGRNNGFICLENRPXRDVQVSTSHTGEHGHAQMXQFVVIHXIFDWKKLEDIVCTSHYCKIPYVNCTEYQVIDISEDVSDDLLTSDGCTKDDLRLPSDESLX

SEQ ID NO: 3723 - protein, 160 aa, Zea mays
  unsure (1)..(160): unsure at all Xaa locations
MSDWEEHLVXAEADVGGPNTXPQRVGPARLNGFSVLQNRPCHDEDDATSETEKDGRDTCPLIXVDIFNGXKLEDIARSSCNXGVPHXNQSCYKLTAISEYGFVKLLTSDGHSKEDLRLPCSKRTLATLCGGFRSXKDVDQTVQSAKRQQPICSLNDVDPR

SEQ ID NO: 3724 - protein, 184 aa, Zea mays
  unsure (1)..(184): unsure at all Xaa locations
MSMLFRVLLDPNEKKICTSKSKDHLFESIADPRTLETYPEKAATARKNAFIIITNPPCQAAAAPTSKTAXHDXHAKCHFAGIPXSFHAIKLEDIVPSTHNCNIAHGDLTEYHLIDISEAGDETLLTVHDNTKDDLKLPADNTLGVQIKGGIEIEMNLVATAQTVMAQDLTSSMNHDGPTQLRCL

SEQ ID NO: 3725 - protein, 123 aa, Zea mays
  unsure (1)..(123): unsure at all Xaa locations
MSSLSVRAPPTDPSKTGIAMLYSQEHHLESKALAEASNTYPQLAGTIRYNGFIVIDSHPCSVAEASTSMTGTHGHSRCRISSIYILQWKXLDYIRPSSHNCYIPNVNWTEYQLIDISEDGLVS

SEQ ID NO: 3726 - protein, 146 aa, Zea mays
  unsure (1)..(146): unsure at all Xaa locations
MVDSEEHQFQSKEGPARPNSYPKKAGPGRKNRFIIINNRPCTVMLISTXKTAKYDHXARCHFEAIDIINGKEIEHIVPSXNNCDVILLTSDVNSTDDLRLPADDTLGAHIKEGFESSKDLVVTVQTAMGXEQICALHDRAPQKLPD

SEQ ID NO: 3727 - protein, 167 aa, Zea mays
  unsure (1)..(167): unsure at all Xaa locations
MADWEEHHLKLKATAGVVKTYPQEVGAARKNGNMGIKNGPCLGAEESTXEGGEHGHALCHVXGXIDMFSAKELEDIETYHHNCDMPDGIRPDILMDDRCQDVXMRPVTLNGNALDDATLPTDDILDDNIKEWKDSEADLVETAQDGIGEDTICALQEGGPTDVTSLA

SEQ ID NO: 3728 - protein, 116 aa, Zea mays
  unsure (1)..(116): unsure at all Xaa locations
SLSLIIRASTFLLSLLLRLRLRLIHPRQGSPCXDSEEXHFESKGDXXGASQNYPXXVAPVRKTGFIVIKNRPCXVEEVFTSKTGKYGAAKCHFAPIDIFHGKKLEDIVPSSDNCXH

SEQ ID NO: 3729 - protein, 102 aa, Zea mays
  unsure (1)..(102): unsure at all Xaa locations
SKTGIVLLDSAELHXWNSKADPXGSKTYPHQAGTGRKNGFLVINSRTCRXVRGPTSKTXKHGHAKCHFVSIYIXNGKKLEXIAASSHSCDIPHVXNRTCLVX

SEQ ID NO: 3730 - protein, 163 aa, Zea mays
  unsure (1)..(163): unsure at all Xaa locations
MADSEEHQFLWKGDVEKYRIYPHEGVTDRNNGFLVIQKRACKRXVAGLLPYKNGKRGLAKCQFVAVCIFPGKKLVNIVASSHHCDISHENRNDHHLIAISEDGILNRLSSYGNTKDGLKLPTDDTLCGPXFLNRFARSKDILVNVQNAMGEGXIWLLNGAGPH

SEQ ID NO: 3731 - protein, 88 aa, Zea mays
  unsure (1)..(88): unsure at all Xaa locations
XDLEPAGXNCDIPHVNRTEYQLIDISEDGFVSLLTSDGNTKDDLRLPTDETLVAQIKEGFESGKDLVVTVQSAMGEEQICALKDVGPK

SEQ ID NO: 3732 - protein, 188 aa, Zea mays
  unsure (1)..(188): unsure at all Xaa locations
IPYHHAPLRLLVCTAAPCPPVTSEIGSLLCYLVDPHFTANXDAEVHCTYAQPARTGRKXAFPAIKMLLLLDGEGTMSRWRRXAXQIGIGAPEIYNEDDLDNVAPSSHNCDVXPHENRTEDQVIDISEDGFVSLLTSDGNTNDDPRLPTDETLVAQIKEGFESAKDLVVTVQSAMGEEQICALKDACPX

SEQ ID NO: 3733 - protein, 96 aa, Zea mays
  unsure (1)..(96): unsure at all Xaa locations
MIFNVSRYXGTHMAMHNCDIPHVNRTEYQLIDISEDGFVSLLTSDGNTKDDLRLPTDETLVAQIKEGFESGKDLVVTVQSAMGEEHICALKDVGPK

SEQ ID NO: 3734 - protein, 193 aa, Zea mays
  unsure (1)..(193): unsure at all Xaa locations
DCLSSPIAYHLSVLPCFLRAPLLIHPNHFLALADYKEHHFQSKAHDPPYKTYPHXPGIQQKNCFICMKNPPCWVVPCPTSWTGKHGHGRRHFHLLYIFKGSRLDYIEPSSHCCHIPHGHRTELHLIDISEHECWILLTSDGCAKDDRRLPTXDQTLVRRISDCPFRGKDLEXATVQTALANENICALNDVGPK

SEQ ID NO: 3735 - protein, 182 aa, Zea mays
  unsure (1)..(182): unsure at all Xaa locations
LLLRLPLGTSNPWICLSDSLELHXLDWDADCGAGKTYPXNGGTAPENALLTLKNRPCDVGAVSSSXTAEHAHARRHFADIHIFMGMQLADIVPXTHSWDITHEIRTVHHTTDISHVGSVLLLLDSGXHKEDLRPPTLETVAVQMMVGSERVKDFGATXQYAMXEEQIXXAVEVGPRAELTWI

SEQ ID NO: 3736 - protein, 194 aa, Zea mays
  unsure (1)..(194): unsure at all Xaa locations
SGRPGWDFLSTATLHFFSLCSSVSICCSQTGIALTKSKDDIFXSYAYLAPIIIYQKLVATARKNGFIVLTEXRPCKDVXVSTSNMTKXVHCXXHFVAIHMFCVMKIGYIVPSSHNXDITILYRTDNLLIDITDDVCVSLLTSDEITIDDLRLPTDVTLAAQIYVGVKRVKDRVVTVSAXDGDDQICAWKDAGPW

SEQ ID NO: 3737 - protein, 104 aa, Zea mays
  unsure (1)..(104): unsure at all Xaa locations
SQARRAEEDXXAEYRADPDASNTYPHRAGXTIRNNGHVLTKERPCNVAQESTARTGKQAHAWRHACGRDGITGKKLQDSVPSSHRRDVPHGAHSDYQLRDTTDX

SEQ ID NO: 3738 - protein, 73 aa, Zea mays
VVEVSTSKTGKHGHAKCHFVGIDVFTGKKLEDIVPSSHNCDIKSGYDDGKDLLLTVMSSMGEVCAVKEIGGKN

SEQ ID NO: 3739 - protein, 187 aa, Zea mays
  unsure (1)..(187): unsure at all Xaa locations
MSDSEDHQYESIVHSAIPKTYPQEAGLDRNNRFLHIINLPCKVVQVPTXSNTGKYGHTTCNFGRIYIFNVKYLQDIDPSSPHCDLPYXCNRTDNHLCDIIDNAFVHLLTSDVHTTDDLKLPTDKTLCGPYQGMQSKPENIDETVHYAMGYDYILALNDVVPFNFLGFGDLILLYLNLHRATTDLPYR

SEQ ID NO: 3740 - protein, 145 aa, Zea mays
  unsure (1)..(145): unsure at all Xaa locations
MNNWVWHLFRSIADCAGLLTHPRQDDPGRDIGSIVMYKRHCXLGLVSTSXTLNYRHTKCHFVAVEVFNSSKLDGIVPASHSCDFPDECRTVYFLSDISEDGYXVSRPTPDGNAKDDPTLPTDYTLEDQIMESSXSGKDLATTAQX

SEQ ID NO: 3741 - protein, 88 aa, Zea mays
  unsure (1)..(88): unsure at all Xaa locations
MSDGEEHHFESKADAGASKTYPQQAGTXRKNGFIXIKNXXCKVGGGGTXKTGXYGHAKCRWGGVDVWGGKRLGGVGGGWHRGGVGDGG

SEQ ID NO: 3742 - protein, 171 aa, Zea mays
  unsure (1)..(171): unsure at all Xaa locations
DLYHLSSASAPLFVSLLPRLLLDADKPGIYLPDSFENHCQSYVETXVSQTYPQQSGPVRRNEFVVINIPPCTAVPLPTFETGQTVHDKLXHFGAVNIFTLEELERXVVPSSQDCDIPCVTRXEHQLIDFSEDSXFVSVLTFNAYTDDVLILPTDDPLVDAIDSTPEDVDDX

SEQ ID NO: 3743 - protein, 135 aa, Zea mays
  unsure (1)..(135): unsure at all Xaa locations
XEEHHXXEXKADXGAXKTXPQQXGTXXKNGXXXXKNXPXKGXEGGGGKXXKXGHAKGHXXAXDTXKGKKXEXXXXATHNXDXPQANXXEHQXXXXXEXGPASPXXXDGXXKDDXRPPTEEXPXAQTKEGGESGKX

SEQ ID NO: 3744 - protein, 128 aa, Zea mays
  unsure (1)..(128): unsure at all Xaa locations
MYLHMDRSIKDLCGNVRSDIIQQKGCSDRGLIYNEHDEPVHRNLFIMNMYQPCDVVDEYNLNNGEHGHADWHFEAVDVGDGKNLYDLVPXGHNCYIPHVSRTDYLVLGISNDGYGIVITLHGYSDGDL

SEQ ID NO: 3745 - protein, 116 aa, Zea mays
  unsure (1)..(116): unsure at all Xaa locations
IAYHPRLYISSLSAPAAPPPPDPSXTGIALSDSXEHHFESKARAGASKTYPQQAGAVRXNGFIVLKNRGGAVVAVSPSPTGPHGPALCPFAALDLFPGPKLVDSVASSPPXCAPPX

SEQ ID NO: 3746 - protein, 73 aa, Zea mays
  unsure (1)..(73): unsure at all Xaa locations
MSDSQEHHFYLKADTTLDNTYPHETGTVHKNDFIPIKNRPFKVVEFPTXSKTGKQCHAKCHFVDIDICNGKKL

SEQ ID NO: 3747 - protein, 75 aa, Zea mays
  unsure (1)..(75): unsure at all Xaa locations
MSDSEEHHFESKADAGASKTYPQQAGTVRKNGFIVIKNRPCKVYNNSSSDLTFWRPEKIHLRPVXFKKKKKKGPX

SEQ ID NO: 3748 - protein, 115 aa, Zea mays
  unsure (1)..(115): unsure at all Xaa locations
XKKPEDIVPLSHNCDIPHVNRTEYQPIDISEDGXASPLTSDGNTXDDLRLPTEXTFVAQNNECVGSGNDLDVTVQAWMGEEQICALKDIGPKKLLGFGDGPLLYLNLNRTRSVSP

SEQ ID NO: 3749 - protein, 104 aa, Zea mays
  unsure (1)..(104): unsure at all Xaa locations
MKDSKESHLLSNDDFVAALTXPYDAGTVLNNCFIIIKNLPCQAEEVSTSPXTAKDGHAECHFVDIDIFDANKLQDIVASPHXDCDIXPHAVTVESTLPDLANTX

SEQ ID NO: 3750 - protein, 67 aa, Zea mays
  unsure (1)..(67): unsure at all Xaa locations
MSDSEEHHFESKGDAGASKTYPQQAGTVRKNGFIVIXNCPCKAVQVSTSKTVHPRHSLCPYRCSSHX

SEQ ID NO: 3751 - protein, 59 aa, Zea mays
  unsure (1)..(59): unsure at all Xaa locations
MSDSAEHHXGSMVSAGAAKTYPQXAGTCRKNRFIVMKNRPXQVAEVSNSKTGKHGHAKX

SEQ ID NO: 3752 - protein, 121 aa, Zea mays
  unsure (1)..(121): unsure at all Xaa locations
FLFLLSLLLRLRTYPSKTKLPIPYSQNHHFESNTNASTFKTYPQHTSTIPNNPFIYIKNHSSIVLNNFTLNTFNHYHPIFHFFFIYIFNGKKLEDXSPSLHKFYIPHFNPTQYYPXLIFFX

SEQ ID NO: 3753 - protein, 157 aa, Schizosaccharomyces pombe
MAEEEHVDFEGGEAGASLTFPMQCSALRKNGHVVIKGRPCKIVDMSTSKTGKHGHAKVHIVALDIFNGRKYEDMSPSTHNMDVPVVKRDEYQLVNIDDGYLNLMTTDGTTKDDVRLPEGELGNEIEEGFDEGRDLIITVVSAMGEETALACRDAPSS

SEQ ID NO: 3754 - protein, 157 aa, Schizosaccharomyces pombe
MAEEEHVDFEGGEAGASLTFPMQCSALRKNGHVVIKGRPCKIVDMSTSKTGKHGHAKVHIVALDIFNGRKYEDMSPSTHNMDVPVVKRDEYQLVNIDDGYLNLMTTDGTTKDDVRLPEGELGNEIEEGFEEGKDLIITVVSAMGEEIALACRDAPSA

SEQ ID NO: 3755 - protein, 129 aa, Thermoplasma volcanium
MSWQEAEVRELKVGRYILIDDVPCKIVEITMSKPGKHGEAKGRIVAIGVFDNQKRSVVYPVKHKVKIPIIEKKNAQVLSVMNNEAQLMDSETFETFVLPLDPEIADKVKPGMEVPYWEAMGVRKIMLQN

SEQ ID NO: 3756 - protein, 163 aa, Neurospora crassa
MSAAHDDAQHEHTFDSVDAGRSATYPMQCSALRKGGHVVIKNRPCKIVDMSTSKTGKHGHAKVHLVAIDIFTGKKLEDLCPSTHNMDVPNVKRTDYQFSYIDEDFLVLIDSNGEEKRELKMPEGELAKRIEKLEEEGKDFFVGVQTAMGEEAAIDVKEASNKD

SEQ ID NO: 3757 - protein, 60 aa, Neurospora crassa
MQCSALRKGGHVVIKNRPCKIVDMSTSKTGKHGHAKVHLRTDYQFVRTIWTPPEIAGSGA

SEQ ID NO: 3758 - protein, 176 aa, Neurospora crassa
MGYYDDDAHGHVEADAAPRATTGTGTGSASQTVTIPCHHIRLGDILILQGRPCQVIRISTSAATGQHRYLGVDLFTKQLHEESSFVSNPAPSVVVQTMLGPVFKQYRVLDMQDGSIVAMTETGDVKQNLPVIDQSSLWNRLQKAFESGRGSVRVLVVSDHGREMAVDMKVVHGSRL

SEQ ID NO: 3759 - protein, 138 aa, Pyrococcus horikoshii
MGDKTKVQVSKLKPGRYIIIDDEPCRIVNITVSSPGKHGSAKARIEAVGIFDGKVRSIVKPTSAEVDVPIIDKKTAQVIAITPDTVQIMDMETYETFEVPIDTGVADEIRDQLKEGINVEYWETLGRIKIMRIKGEGE

SEQ ID NO: 3760 - protein, 157 aa, Candida albicans
MAEEDTFETADAGAALTFPMQCSALRKNGHVVIKNRPCKIVDMSTSKTGKHGHAKVHLVAIDIFTGKKLEDLSPSTHNMEVPNVSRQEFQLLDIDDGYLSLMTADGDTKDDVKVPEGELGDKLQSEFDEGKDLIVTIISAMGEEAAISYKEAPKGSA

SEQ ID NO: 3761 - protein, 158 aa, Guillardia theta
MDQEQYNIINDNGASETTPIKAGNCKKGGLLVIKGNPCKIIDISTSKTGKHGHAKAIITAVDIFTGKKYQESAPTSHNLDQPNLTKTEYQLIHIEEDGFVSLMDEDGNIREDLSLDLKNDEIHVKIKNEFDQSKEIVVTVMKCLQKEKIISFKENNKI

SEQ ID NO: 3762 - protein, 139 aa, Aeropyrum pernix
MSVNYATLGDLKKGSYIVIDGEPCRIVEMSRAKTGKHGSAKAHVVAICVFSGQKKSLVAPVDTRVQIPVIEKRLGQVLADMGDMVQIMDLETYDTFEVEKPGGNEEEEQLAAKLQPGVTVEYWLIMGKPKIIRIRSSSS

SEQ ID NO: 3763 - protein, 148 aa, Aeropyrum pernix
MPSSFGCSRMSVNYATLGDLKKGSYIVIDGEPCRIVEMSRAKTGKHGSAKAHVVAICVFSGQKKSLVAPVDTRVQIPVIEKRLGQVLADMGDMVQIMDLETYDTFEVEKPGGNEEEEQLAAKLQPGVTVEYWLIMGKPKIIRIRSSSS

SEQ ID NO: 3764 - protein, 166 aa, Leishmania infantum
MSDEDHDFSHQGGGDNASKTYPLPAGALKKGGYVCINGRPCKVIDLSVSKTGKHGHAKVSIVATDIFTGNRLEDQAPSTHNVEVPFVKTFTYSVLDIQPNEDPSLPSHLSLMDDEGESREDLDMPPDVALATQIKEQFDSGKEVLVVVVSAMGTEQVLQTKNAAEK

SEQ ID NO: 3765 - protein, 161 aa, Toxoplasma gondii
MSDAEDVTFETADAGASHTYPMQAGAIKKNGFVMLKGNPCKVVDYSTSKTGKHGHAKAHIVGLDIFTGKKYEDVCPTSHNMEVPNVKRSEFQLIDLSDDGFCTLLLENGETKDDLMLPKDSEGNLDEVATQVKNLFTDGKSVLVTVLQACGKEKIIASKEL

SEQ ID NO: 3766 - protein, 160 aa, Schistosoma japonicum
MSTFEDEEFATGESGASKTEPKQCSLLRKGGYVLMKERPCKIMEMSTSKTGKHGSAKVHLVGIDIFTGKKYEEICPSSQTMYVPIIARKEYQLIDVKDGFLSLMSDDFCVLENIPVPDNDVGKEIQEKWNSKGDMDNVIVTIVTTMDEQQAHAVRTSSDK

SEQ ID NO: 3767 - protein, 52 aa, Schistosoma mansoni
MGDFGASKTLPKQCSALRKGGHVVMKDRPCKIVEMSTSKTGKHGSAKVHLVG

SEQ ID NO: 3768 - protein, 161 aa, Caenorhabditis elegans
MSDDHHDDEHFHTGDSGAAATFPKQCSALRKNEHVMIKGRPCKIVEMSTSKTGKHGHAKVHMVAIDIFTSKKLEDICPSTHNMDVPVVKRREYLLMAIDDGYCSLMDPESCEQKDDLKLPDTELGQQIRDAYEKDEGSVLVQVVSAIGEEAILGWKVSTKE

SEQ ID NO: 3769 - protein, 161 aa, Caenorhabditis elegans
MSEDHHDEEQFDSAESGAAATFPKQCSALRKNEHVMIRGRPCKIVEMSTSKTGKHGHAKVHMVAIDIFTTKKLEDICPSTHNMDVPVVKRREYILMSIEDGFCSLMDPESCELKDDLKMPEGDLGNTIREALEKDEGSVLVQVVAACGEEAILGYKISTKE

SEQ ID NO: 3770 - protein, 160 aa, Spodoptera frugiperda
MADIEDTHFETGDSGASATFPMQCSALRKNGFVMLKGRPCKIVEMSTSKTGKHGHAKVHLVGIDIFNGKKYEDICPSTHNMDVPHVKREDYQLTDISDDGYLTLMADNGDLREDLKIPDGDLGTQLRSDFDSGKELLCTVLKSCGEECVIAVKANTALDK

SEQ ID NO: 3771 - protein, 159 aa, Drosophila melanogaster
MAELDDQFETTDSGASTTYPMQCSALRKNGFVMLKSRPCKIVEMSTSKTGKHGHAKVHMVGIDIFSNKKYEDICPSTHNMDVPNVKREDLQLIAISDDSFLTLMTESGDLREDLKVPEGELGEQLRLDFDSGKDLLCTVLKACGEECVIAIKTNTALDK

SEQ ID NO: 3772 - protein, 159 aa, Drosophila melanogaster
MAELDDHFETTDSGASTTYPMQCSALRKNGFVMLKSRPCKIVEMSTSKTGKHGHAKVHMVGIDIFSNKKYEDICPSTHNMDVPNVKREDLQLIAISDDSFLTLMTESGDLREDLKVPEGELGEQLRLDFDSGKDLLCTVLKACGEECVIAIKTNTALDK

SEQ ID NO: 3773 - protein, 159 aa, Drosophila melanogaster
MAELDDHFETTDSGASTTYPMQCSALRKNGFVMLKSRPCKIVEMSTSKTGKHGHAKVHMVGIDIFSNKKYEDICPSTHNMDVPNVKREDLQLIAISDDSFLTLMTDSGDLREDLKVPEGELGEQLRLDFDSGKDLLCTVLKACGEECVIAIKTNTALDK

SEQ ID NO: 3774 - protein, 161 aa, Plasmodium yoelii yoelii
MSDHETYDNIDAGASQTYPVQAGAIKKNGHVMLKEHPCKVVDYSTSKTGKHGHAKAHIVGIDIFTGKKYEDICPTSHNMDVPVVKRTELQLIDITEDGFVSLLFDNGDTKDDLSLPKDSEGNFDDVAKQIRNLFDSGKSVLVSVLSACGQEKIIAAKEMSS

SEQ ID NO: 3775 - protein, 155 aa, Danio rerio
MADLDTDFTSGDAGASLTFPMQCSALRKNGFVVLKGRPCKIVEMSTSKTGKHGHAKVHMVGIDIFTGKKNEDICPSTHNMDVPNIKRQDYQLVGIIDGYLSLMKDNGDLRDDLKLPEGDLGKEIESKFESGDEFLVSVLAAMGEECPIAIKPMSS

SEQ ID NO: 3776 - protein, 154 aa, Xenopus laevis
MADDIDFTSGDAGASSTFPMQCSALRKNGFVVLKGRPCKIVEMSTSKTGKHGHAKVHMVGIDIFSGKKYEDICPSTHNMDVPNIKRCDYQLIGIIDNYLSLLSDSGDVREDLKIPDGDLGKEILAKHEAGEEILVTVLNAMSEECAVALKAMTK

SEQ ID NO: 3777 - protein, 153 aa, Gallus gallus
MADELDFTTGDAGASSTYPMQCSALRKNGFVVLKGRPCKIVEMSTSKTGKHGHAKVHLVGIDIFNGKKYEDICPSTHNMDVPNIKRNDYQLIGIQDGYLSLLTESGEVREDLKLPEGDLGKEIEGKFNANEDVQISVISAMNEECAVAIKPCK

SEQ ID NO: 3778 - protein, 101 aa, Gallus gallus
  unsure (1)..(101): unsure at all Xaa locations
QCSALRKNGFVVLKGRPCKXXXXSTSKTGKHGHAKVHLVGIDIFTGKKYEDICPSTHNMDVPNIKRNDFQLIGIQDGFLSLLQDSGEVREDLRLPEGELGR

SEQ ID NO: 3779 - protein, 97 aa, Gallus gallus
  unsure (1)..(97): unsure at all Xaa locations
QXSALRKNGFVVLKGRPXKSTSKTGKHGHAKVHLVGIDIFTGKKYEDIXPSTHNMDVPNIKRNDFQLIGIQDGFLSLLQDSGEVREDLRLPEGELGR

SEQ ID NO: 3780 - protein, 79 aa, Gallus gallus
  unsure (1)..(79): unsure at all Xaa locations
FTTGDAGASSTYPMQXSALRKNGFVVLKGRPXKIVEMSTSKTGXHGHAKVHLVGIDIFNGKKYEDIXPSTHNMDVPNIK

SEQ ID NO: 3781 - protein, 78 aa, Gallus gallus
  unsure (1)..(78): unsure at all Xaa locations
STSKTGXHGHAKVHLVGIDIFTGKKYEDIXPSTHNMDVPNIKRNDFQLIGIQDGFLSLLQDSGEVREDLRLPEGELGR

SEQ ID NO: 3782 - protein, 159 aa, Senecio vernalis
MSDEEHQFESKADAGASKTYPQQAGTIRKGGHIVIKNRACKVVEVSTSKTGKHGHAKCHFVAIDIFNGKKLEDIVPSSHNCDVPHVNRTDYQLIDISEDGFVSLLTENGNTKDDLKLPTDDALLTQIKDGFGEGKDLVVSVMSAMGEEQICALKDIGPK

SEQ ID NO: 3783 - protein, 154 aa, Homo sapiens
MADDLDFETGDAGASATFPMQCSALRKNGFVVLKGRPCKIVEMSTSKTGKHGHAKVHLVGIDIFTGKKYEDICPSTHNMDVPNIKRNDFQLIGIQDGYLSLLQDSGEVREDLRLPEGDLGKEIEQKYDCGEEILITVLSAMTEEAAVAIKAMAK

SEQ ID NO: 3784 - protein, 153 aa, Homo sapiens
MADEIDFTTGDAGASSTYPMQCSALRKNGFVVLKGRPCKIVEMSTSKTGKHGHAKVHLVGIDIFTGKKYEDICPSTHNMDVPNIKRNDYQLICIQDGYLSLLTETGEVREDLKLPEGELGKEIEGKYNAGEDVQVSVMCAMSEEYAVAIKPCK

SEQ ID NO: 3785 - protein, 154 aa, Homo sapiens
MADDLDFETGDAGASATFPMQCSALRKNGFVVLKGWPCKIVEMSASKTGKHGHAKVHLVGIDIFTGKKYEDICPSTHNMDVPNIKRNDFQLIGIQDGYLSLLQDSGEVPEDLRLPEGDLGKEIEQKYDCGEEILITVLSAMTEEAAVAIKAMAK

SEQ ID NO: 3786 - protein, 154 aa, Homo sapiens [sequence omitted]

SEQ ID NO: 3787 - protein, 154 aa, Homo sapiens [sequence omitted]

SEQ ID NO: 3788 - protein, 154 aa, Homo sapiens [sequence omitted]

SEQ ID NO: 3789 - protein, 129 aa, Ferroplasma acidarmanus
MSWTEAEVRELKVGRYMLIDDSPCKIVDITMSKPGKHGEAKGRIVAIGVFDGQKHSVVYPVKHKIKVPIIVKKNAQILSIANNEAQMMDSESFETFILPIEPEDQDKLKPGMEVPYWEAMGKRKIMLQN

SEQ ID NO: 3790 - protein, 154 aa, Oryctolagus cuniculus
MADDLDFETGDAGASATFPMQCSALRKNGFVVLKGRPCKIVEMSTSKTGKHGHAKVHLVGIDIFTGKKYEDICPSTHNMDVPNIKRNDFQLIGIQDGYLSLLQDSGEVREDLRLPEGDLGKEIEQKYDSGEEILITVLSAMTEEAAVAIKAMAK

SEQ ID NO: 3791 - protein, 186 aa, Mus musculus
MPILDQMVLEQNTEGVKWTPSKMISRLGKEINNPDSVYYWAHKNHIPVLSPALTDGSLGDMIFFHSYKNPGLVLDIVEDLRLINTQAIFAKRSGMIILGGGVVKHHIANANLMRNGADYAVYINTAQEFDGSDSGARPDEAVSWGKIRMDAQPVKVYADASLVFPLLVAETFAQKADAFRAEKNED

SEQ ID NO: 3792 - protein, 246 aa, Rattus norvegicus
MVDVLVTTAGGVEEDLIKCLAPTYLGEFSLRGKELRENGINRIGNLLVPNDNYCKFEDWLMPILDQMVQEQNTEGVKWTPSKMISRLGKEINNPESVYYWAHKNHIPVLSPALTDGSLGDMIFFHSYKNPGLVLDIVEDLRLINMQAIFAKRTGMIILGGGVVKHHIANANLMRNGADYAVYINTAQEFDGSDSGARPDEAVSWGKIRMDAQPVKVYADASLVFPLLVAETFAQKADAFRAEKNED

SEQ ID NO: 3793 - protein, 128 aa, Rattus norvegicus
MEGTPSGAAPSSALAAVLKHSSALPPESAQVQGYDFNRGVDYHALLEAYGTTGFQATNFGRAVQQVNAMIEKKLEPLAVDEDHHEDLTQSRRPLTGCTIFLGYTSNLISSGIRETIRYLVQHNMVGPR

SEQ ID NO: 3794 - protein, 311 aa, Sulfolobus tokodaii
MKREELLVEEIKDLTLEELKGYADFYKILDKVYGFTAESVVRGVKILKDMIKEADLRFLSFTANLVSTGLRGLFADLIKQGYFNVIITTGGTIDHDIARSFGGKYYKGLFEYDDSMLRELEIHRLGNILVPMESYGKVIEDVVRKYMNEIVSIKKEWPVYELLWEFGKRISDENSILKAAYEKKVPIIVPGIIDGSFGTNLFIYSQFTQLKLNLFEDMKLIKDLIFSCKKSGALIIGGGISKHHTIWWNQFKDGLDYAIYITTAQEYDGSLSGAKPREAISWNKIKPTSENVVIYGDATIILPILSASLLG

SEQ ID NO: 3795 - protein, 292 aa, Pyrobaculum aerophilum str. IM2
MREIIELYRKVGGFQALHVAEAYDVLKEAVEAADVRFLSFTGNLVATGLREFIADAIRRRLFNVVVTTAGALDHDIAKSMGAVYAPGSFDLDDVDLAAKGYHRLGNVVIKKEEYGPLVEKFILAHCEKLWGKTLATYELAYLLGAELPEDSILGAAARAGAKVFVPGIVDGAVGTALMTCNDLARTKRGGSRAFIDVLKDEEELREIVHNSKKLAALIVGGGISKHHVIWWAQFKGGLDYVVYISTAVEYDGSLSGARPREAISWGKVKPSAKSVFIFADATLVLPVLLKAL

SEQ ID NO: 3796 - protein, 366 aa, Anopheles gambiae str. PEST
MDQSKEPTVAKEAVLQESSKLPENTPQIRGYDWNEGYSYEKLFSSYAHSGFQATNLGKAIEEVNKMIAARRVPLAEDKLDQYEEDEFIKRKNSCTIFLGYTSNMVSAGVRETIRFLVQHRMVDCIVTTAGGVEEDLIKCLAPTYLGSFELAGRELRERGINRIGNLLVPNENYCKFENWVIPILDEMLAEQKSNGTLWTPSKVIARLGEKINDETSIYYWAAKHRIPVFSPALTDGSLGDMMYFHSFRNPGLVVDIVSDLRRLNTMAVKAVQSGIIIVGGGVIKHHICNANLMRNGADFSVFVNTASEYDGSDSGARPDEAVSWGKIKKDATPVKVYAEASLVFPILVGETFVKDHYLENKTNAST

SEQ ID NO: 3797 - protein, 389 aa, Giardia lamblia ATCC 50803
MDGIQHASDNVIRASDASCIEEKLEIHGLDLNKPENQSLDAILSNYARIGFSSTGFSKLCTEVNRMYSWRLSDDPYDPNRSYPECPIARSKIRCKVFLGYTSNLVSSGLREYIRFLVQHSLVDVIVTSAGGVEEDIIKCLAPTYLGDWKTDGAMLRKNSINRIGNLLVPNDNYCLFEDWIIPIFDECVEQQRKGYHWTPSRLIWKLGKRINDERSIAYWAYRNKIPIFCPAITDGSLGDMLFFHSYKNPGLIIDVVGDIRAMNMQAINSPKNGCIILGSGTIKHHILNANLFAGDGADFAVYINTAQEYDGSDAGATCDEAVSWGKISPTARPVKLCADATLVFPLLLHETILKKYKEDPEYWDSKKGGDPHECYWTQMENEVRESKRS

SEQ ID NO: 3798 - protein, 329 aa, Pyrococcus furiosus DSM 3638
MLKKSEEIEGTKVEGPWLDDTKSLEEVVSLYTQIGFQATHLGKAIEIWRKIEEKREKGEEIRVFLGYTSNIVSSGLREIIAWLVKHRKVDVIVTTAGGVEEDFIKALKPFILGDWIVNDAELRKKGINRIGNIFVPNDRYIEFEKYMIPFFERILEIEREKGRPLTASEFIYELGRFMDEKLGKEKEKSIIYWAYRNEIPIFCPAITDGSIGDMLYFFKEERRDRELIIDIANDIVKLNNLAVTAKETASIILGGSLPKHAIINANLFRGGSDYAIYITTAVPWDGSLSGAPPSEGVSWGKIRAKADYVEIWADATLVFPILVWMVMKR

SEQ ID NO: 3799 - protein, 307 aa, Methanothermobacter thermautotrophicus str. Delta H
MLILNVNHMNITQGMGVAELIEEMGRSGVLGAGRVHRATKLLRGMIDDLEMAIFMSVAGPLVPGGMRRIIRDLIDDGTISALITSGANLTHDLLEAFGGAHYRDYGFDDEKLHQEGIGRIGDVYTRSEDFEVFESENQEIFSSIFSAKPHISIQELIHEIGGHLDDDMSIIRTAHLRGVPIYAPGLIDSMLGLQLWMYTQDNRICLDAVKDMHSLSDLVFSHERIGAIILGGGLPKHYTLASTLLRGGVDAAVQITMDRSETGSLSGAPLEEAKSWAKAQAGSNLVTVVGDATALFPVILAGALSEL

SEQ ID NO: 3800 - protein, 317 aa, Methanosarcina acetivorans C2A
MDFEASARDLTTPVKGAKIVPNMSVDELVREYAGCAFGAGRLAEAVDIYYEMLASEKTTKFFGLAGAMTPAGMRGIIADLIRDGHIDVLVTTGANMVHDTVEALGLHHYKGSDCANDIQLRHECIDRIYDVYLPDQHFTDLEEFLQSVYAGLPQEKLSIRQVLTEIGKNLDDDSSILKTAAEMGVPVYCPALQDSVIGLQAWLYKEGNLLHVDAFADMHEFMEICYEAESAGAMLLGGGVPKNYILQSMLVTPKSFDYAIQLTMDRPETGGLSGATLDEAQSWGKVGEDAKSVTVYADATITLPLIVSAVRTRLSKR

SEQ ID NO: 3801 - protein, 345 aa, Methanosarcina acetivorans C2A
MHHNVFTNNPTVPIDVKNRSVSELMDGMLKTGFQGRKLAESVQAWNNMLKEKNTTVFMGLSGAMVPAGMRRIISHMIRERMIDCLVSTGANLFHDCHEALGRKHYVGSHLANDEKLFEQGVDRIYDIFAVEEEFRTADNLIADFAQEIGEITCSSREFMYLLGKELGRRGAAEDSIVVSAYRHNVPIFVPALSDSSIGIGLTIARRRGLKLEIDQIKDVDEITQIVEKSERTGVVYVGGGVPKNFIQQTEVIASILGMDIGGHDYAIQYTSDSPHWGGLSGCTFDEAVSWGKIAPQAKKVQVFVDATIALPIVAHALHEKTHDLKRIAPVFFWDGPEGLAIDYKE

SEQ ID NO: 3802 - protein, 297 aa, Methanopyrus kandleri AV19
MKRETFRYRGDMDLDGFLREMERVGALGAGRLGRAARILEKMWSSDDVTVLLTVAGPAVAGGLGELFERLIREGLVDAVITSGANVVHDALDALGGIHVCLGERNVDGYGRVHDTHIPTEAFEKFEHFMREVLSDLSGRVSCRELLWEMGKRLESGFLRAAADEGVPIYSPGILDSMVGLHVWIHSQDHDFHLDLVDDMHHLADLVFEAEELGAIILGGSVPKHFAMGAAMLRGGLDYAVQITMDRPETGSLSGAPLEEGKSWEKVREDAEVATIVGDYLIIFPLLASGVMQRLGIV

SEQ ID NO: 3803 - protein, 367 aa, Caulobacter crescentus CB15
MKSLFQRRASKVRETEAMNAPVPNNQKAELLQKVVEHVDITSYDARPIIDSMRKMSFSSRDTARAADIFNMALADKGCSTWLILAGSTSAGGCMHVYRDMVKNGMIDAVVATGASIVDMDFFEALGFKHYQAAGPVDDNVLRDNYIDRIYDTYIDEEELQACDHTILEICNKLEPRGYSSREFIWEMGKWLAEGNAKKEGSLIQTAYEEGVPIFCPAFVDSSAGFGLVKHQKEKIAEKKPYLMIDAVADFRELTDVKIAAGTTGLFMVGGGVPKNFAQDTVVCAEILGVEADMHKYAIQITVADVRDGACSSSTLKEAASWGKVSTTYEQMVFAEATTVVPLIASDAYWRKAWEGREKPRWNKLFGK

SEQ ID NO: 3804 - protein, 317 aa, Methanosarcina mazei Goe1
MDFGASAKNLSTPVKGAKIVPNMTVDELVKEYAGCAFGAGRLAEAVDIYYEMLASGKTTKFFGLAGAMTPAGMRNIIADLIRDGYIDVLVTTGANMVHDTVEALGLHHYKGSDCANDIQLRHECIDRIYDVYLPDQHFTDLEEFLQGVYSGLPQENLSIRQVLTEIGKNLDDDSSILKTAAEMGVPVYCPALQDSVIGLQAWLYKEGNPLHVDAFADMHEFMDICYGAESAGTMLLGGGVPKNYILQSMLVTPRSFDYAIQLTMDRPETGGLSGATLDEAQSWGKVGEDAKSVTVYADSTITLPLIVSAVRTRLSKR

SEQ ID NO: 3805 - protein, 349 aa, Methanosarcina mazei Goe1
MENGMHHNVFTNTPTIPIDVKDRSVSELMDGMLRTGFQGRKLAESVQAWSNMLKEKDTTVLMGLSGAMVPAGMRRVISYLIRERMIDCLVSTGANLFHDSHEALGRKHYVGSHLANDEKLFEHGVDRIYDVFAVEEEFRNADNLIADFAEEIGEISCSSREFMYLLGKELVRRGAAEDSIVVSAYRHNVPIFVPALSDSSIGIGLTIARRRGLKLEIDQIKDVDEITQIVEKSGHTGVVYVGGGVPKNFIQQTEVIASILGMDVPGHEYAIQYTSDSPHWGGLSGCTFDEAVSWGKVAAQAKKVQVFVDATIALPIVAHALHEKTRGVKRTAPVFSWDGPEGLEIAYNE

SEQ ID NO: 3806 - protein, 350 aa, Chlorobium tepidum TLS
MEERSMQKAGFLKEPIKHIGITKHNVVPMVEEMADMAFQARNLARAAFIVDLMQKDKECAVILTLAGSLISAGLKQVIIDMLEHNMVDVIVSTGANIVDQDFFEALGFKHWKGSQFVDDSELRELAIDRIYDTYIDEDELRVCDDTIAIIANSMQPGAYSSREFIVEMGKYIEEKGLDKNSIVYKAYEKGVPIFCPAFSDCSAGFGLVHHQWHNPDQHVSIDSVKDFRELTKIKIENDKTGIFMIGGGVPKNFTQDIVVAAEVLGYENVSMHTYAVQITVADERDGALSGSTLKEASSWGKVDTVYEQMVFAEATVAMPLIAGYAYHKRNWEGRPARNFNAMLDAKPVNA

SEQ ID NO: 3807 - protein, 330 aa, Methanocaldococcus jannaschii
MLKESEDIEGIAIEGPWLEDDISLEEIIKKYYLKIGFQASHIGKAIKIWKHIEEKRKKGDEITVFFGYTSNIVSSGLREIIAYLVKHKKIDIIVTTAGGVEEDFIKCLKPFILGDWEVDGKMLREKGINRIGNIFVPNDRYIAFEEYMMEFFEEILNLQRETGKIITASEFCYKLGEFMDKKLKSKEKEKSILYWAYKNNIPIFCPAITDGSIGDMLYFFKKYNKDEELKIDVANDIVKLNDIAINSKETACIVLGGSLPKHSIINANLFREGTDYAIYVTTALPWDGSLSGAPPEEGVSWGKIGAKADYVEIWGDATIIFPLLVYCVMK

SEQ ID NO: 3808 - protein, 370 aa, Methanocaldococcus jannaschii
MRDIKDNPIRRGIAEQSEAMHPGYTNRAKPYGCKRDPKDIVLKESEDIEGIAIEGPWLEDDISLEEIIKKYYLKIGFQASHIGKAIKIWKHIEEKRKKGDEITVFFGYTSNIVSSGLREIIAYLVKHKKIDIIVTTAGGVEEDFIKCLKPFILGDWEVDGKMLREKGINRIGNIFVPNDRYIAFEEYMMEFFEEILNLQRETGKIITASEFCYKLGEFMDKKLKSKEKEKSILYWAYKNNIPIFCPAITDGSIGDMLYFFKKYNKDEELKIDVANDIVKLNDIAINSKETACIVLGGSLPKHSIINANLFREGTDYAIYVTTALPWDGSLSGAPPEEGVSWGKIGAKADYVEIWGDATIIFPLLVYCVMK

SEQ ID NO: 3809 - protein, 317 aa, Methanosarcina barkeri
MDCNTPNKKLSTPIKAAKINPNMSVDDLVREYRGCAFGAGRLAEAVEIYYEMLASKKTTKFFGLAGAMTPAGMRNVVADLIRDGYIDVLVTTGANMVHDTVEALGLHHYKGTDCTNDIQLRNECIDRIYDVYLPDQHFANLEEFLQGVYAGLPQEKLSIRQVLTEIGKNLDDDSSILKTAAEMGVPVYCPALQDSVIGLQAWLYKEGNPLHVDAFADMHEFIEICYAAESAGALLIGGGVPKNYILQSMLVTPKSFDYAIQLTMDHPETGGLSGATLDEAQSWGKVGENAKAVTVYADATITLPLMVAAVRTRLSKK

SEQ ID NO: 3810 - protein, 345 aa, Methanosarcina barkeri
MHLNVLTDNPTVPIDVKDRSISELMEGMLKTGFQGRKLAESVQAWHNMLKEKNVTVLMGLSGAMVPAGMRRVISYMIRERMIDCLVSTGANLFHDSHEALGKKHYVGSHLVDDEDLFEHGVDRIYDVFAVEEEFRTADNLIADFAEKIGEISCSSREFMYLLGKELERRGAAEDSIVVSAYRHNIPIFVPALSDSSIGIGLTIARRRGLKLDIDQIKDVDEVTQIVEKSGKTGVVYIGGGVPKNFIQQTEVIASILGIQTGGHDYAIQYTTDAPHWGGLSGCTFDEAVSWGKIAAQAKKVQVFVDATIALPIVAHALHEKCRELKRNAPIFNWEGPEGLDIDYRE

SEQ ID NO: 3811 - protein, 345 aa, Methanosarcina mazei
MHHNVFTNTPTIPIDVKDRSVSELMDGMLRTGFQGRKLAESVQAWSNMLKEKDTTVLMGLSGAMVPAGMRRVISYLIRERMIDCLVSTGANLFHDSHEALGRKHYVGSHLANDEKLFEHGVDRIYDVFAVEEEFRNADNLIADFAEEIGEISCSSREFMYLLGKELVRRGAAEDSIVVSAYRHNVPIFVPALSDSSIGIGLTIARRRGLKLEIDQIKDVDEITQIVEKSGHTGVVYVGGGVPKNFIQQTEVIASILGMDVPGHEYAIQYTSDSPHWGGLSGCTFDEAVSWGKVAAQAKKVQVFVDATIALPIVAHALHEKTRGVKRTAPVFSWDGPEGLEIAYNE

SEQ ID NO: 3812 - protein, 317 aa, Methanosarcina thermophila
MDFEASAKILTTPVKGAKIVSNMTVDELVREYAGCAFGAGRLAKAVDIYYEMLASEKTTKFFGLAGAMTPAGMRNIIADLIRDGYIDVLVTTGANMVHDTVEALGLHHYKGSDCTNDIQLRHECIDRIYDVYLPDQHFTDLEEFLQGVYAGLPQEKLSIRQVLTEIGKNLDDDSSILKTAAEMGVPVYCPALQDSVIGLQAWLYKEGNPLHVDAFADMHEFMEICFETESAGAMLLGGGVPKNYILQSMLVTPRSFDYAIQLTMDHPETGGLSGATLDEAQSWGKVGENAKSVTVYADSTITLPLIVSAVRTRLSKR

SEQ ID NO: 3813 - protein, 295 aa, Methanosarcina thermophila
MTVDELVREYAGCAFGAGRLAKAVDIYYEMLASEKTTKFFGLAGAMTPAGMRNIIADLIRDGYIDVLVTTGANMVHDTVEALGLHHYKGSDCTNDIQLRHECIDRIYDVYLPDQHFTDLEEFLQGVYAGLPQEKLSIRQVLTEIGKNLDDDSSILKTAAEMGVPVYCPALQDSVIGLQAWLYKEGNPLHVDAFADMHEFMEICFETESAGAMLLGGGVPKNYILQSMLVTPRSFDYAIQLTMDHPETGGLSGATLDEAQSWGKVGENAKSVTVYADSTITLPLIVSAVRTRLSKR

SEQ ID NO: 3814 - protein, 301 aa, Archaeoglobus fulgidus DSM 4304
MRVTSPEIQRGIKVSELLDMFGSTAFNARRLGEAAKICEEMVKSDSFVFLTLAGAMIPAGMRKIVAGMMQNGFISSLVTTGANIVHEIVESLGIGHEIGSCYVDDTALAEESINRIYDVFVGQEAFERVEEFLSGIIEGLDGIYTTYEFLWEVGKRIPDERSFLRIAAEREIPVFCPTLHDSIAGLHMTIYRKNLQIDFFRDVSRIIDFCFQKRKMGVIVVGGGVPKNFTLQAMLLAEGFDYAVQITTDSPQWGGLSGATLEEAKSWCKLKPDAKAVTVYCDATIALPMLYAYLLDRCGES

SEQ ID NO: 3815 - protein, 298 aa, Archaeoglobus fulgidus DSM 4304
MARTGFQGRKLGEAFEIWTEMLREENITILMGLSGAMVPAGMRKIIAWLIRNRYIDVLVSTGANLFHDIHEAMGFRHFMGSEHVNDCKLFEEGIDRIHDVFAYEKEFNVIDYTLAEIISEMSGVMSSREFLEEIAGRLNVKDRNSIVIAAYESKVPIFSPAIADSSIGIAAALAKREVVIDTIRDVEELTEIVVNSEKTGVIYVGGGVPKNFIQQTEVVARLKGYDVRGHEYAIQITTDVPQFGGLSGCTFEEGVSWGKISGKAKKVQVNCDATIALPVLAHGLIGIRRQKYPIFNGL

SEQ ID NO: 3816 - protein, 336 aa, Pyrococcus furiosus
MPKPKEYVLKKSEEIEGTKVEGPWLDDTKSLEEVVSLYTQIGFQATHLGKAIEIWRKIEEKREKGEEIRVFLGYTSNIVSSGLREIIAWLVKHRKVDVIVTTAGGVEEDFIKALKPFILGDWIVNDAELRKKGINRIGNIFVPNDRYIEFEKYMIPFFERILEIEREKGRPLTASEFIYELGRFMDEKLGKEKEKSIIYWAYRNEIPIFCPAITDGSIGDMLYFFKEERRDRELIIDIANDIVKLNNLAVTAKETASIILGGSLPKHAIINANLFRGGSDYAIYITTAVPWDGSLSGAPPSEGVSWGKIRAKADYVEIWADATLVFPILVWMVMKR

SEQ ID NO: 3817 - protein, 352 aa, Coxiella burnetii RSA 493
MKNKNLSMPSLKEKLLQETVEHIDITRFDARPIIDAMDHMSFTSRDLARATQIFNRMLQDEQCSIILSLAGSTSAGGCMKLYADLVKYNMVDAIVATGASIVDMDFFEALGFRHYQGSPAVEDRQLRDLYIDRIYDTYIDEEDLQRCDHTIYEIANSLEPRPYSSREFIHHMGAYLAQGKAKKEESLVQLAYEHDVPIFCPAFTDSSAGFGLVLHQVKNPDRHLTIDSIRDFRELTDIKIKAGTTGLLMIGGGVPKNFVQDTVVCAEVIGKTVDMHKYAIQITVADVRDGACSSSTLKEACSWGKVDTAYEQMVYAEATSGLPLLASDAYHRGYWKDRSPRQYANLFKSESK

SEQ ID NO: 3818 - protein, 312 aa, Sulfolobus solfataricus
MINREDLLKNPVEDITLSDLKKYNDIVSVFDKIYGFSSEGIVNGSKILKEMIKNADLRFLSFTANLVSTGLRGLFADLIKKGYFNIVVTTGGTIDHDLARSFGGVYYKGSFDIDDTMLKDLEIHRLGNVLVPFESYGKVIEDVVRKFLPEITKDRKEISAYELLWEFGKRITDSNSILRAAYDKNVPIIVPGILDGSFGTNLFIQSQFLNFRINLFEDMRLIKDLIFSSKKSGALIIGGGISKHHTIWWNQFKDGLNYAIYITTAQEYDGSLSGAKPREAISWNKIRPDAKHVTIYGDATIIVPILAASLLS

SEQ ID NO: 3819 - protein, 333 aa, Thermoplasma acidophilum
MRSMGSRCEGECRKLKSAKQYTGMDRKELLSRPVRDLSITADTRLGDLMDQFSSIGGFTAAKIHEAYEIIKDMFSEDNTTFLSFPADIISTGLRGLINEVVKRKLVDVIITTSGTLDHDIARTYRNYYCGSFSYSDIELRDLGINRLGNVLVPDESYGEIIEEKVMESLEKLYAKKKEWATVDLIHEVGLDINSESSIIYNAAKNNIPVFVPGITDGSFGSQLWSFYEQHHDFKINLLEDEHRLSDIIFDAKKTGAIMIGGGISKHHTIWWNQFRDGLDYAVYVTTAQEYDGSLSGAKLEEAISWKKVRPDARYVNVYGDATVIMPVLLAPFL

SEQ ID NO: 3820 - protein, 310 aa, Thermoplasma acidophilum
MDRKELLSRPVRDLSITADTRLGDLMDQFSSIGGFTAAKIHEAYEIIKDMFSEDNTTFLSFPADIISTGLRGLINEVVKRKLVDVIITTSGTLDHDIARTYRNYYCGSFSYSDIELRDLGINRLGNVLVPDESYGEIIEEKVMESLEKLYAKKKEWATVDLIHEVGLDINSESSIIYNAAKNNIPVFVPGITDGSFGSQLWSFYEQHHDFKINLLEDEHRLSDIIFDAKKTGAIMIGGGISKHHTIWWNQFRDGLDYAVYVTTAQEYDGSLSGAKLEEAISWKKVRPDARYVNVYGDATVIMPVLLAPFL

SEQ ID NO: 3821 - protein, 335 aa, Pyrococcus abyssi
MKAKDIVLKKSEEIEGLAIEGPWLDEVESLEGVISYYEKIGFQATHLGKAVKIWRKVEEKRKGGEEVRVFLGYTSNIVSSGLREIIAWLVKERKVDVIVTTAGGIEEDFIKTLKPFILGDWEVNDAELREKGINRIGNIFVPNDRYIEFEKYMVPFFERILDIERKLKRPLTASEFIYEMGRYMDEVLGKEKEKSIIYWAYKRDVPIFCPAITDGSIGDMLYFFKEERHDSKLVIDIANDIVKLNNLAITAKETASIILGGSLPKHAIINANLFRGGTDYAIYISTAVPWDGSLSGAPPSEGVSWGKIKAKADYVEIWADATLVFPILVWMVMKA

SEQ ID NO: 3822 - protein, 373 aa, Dianthus caryophyllus
MEDANHDSVASAHSAAFKKSENLEGKSVKIEGYDFNQGVNYSKLLQSFASNGFQASNLGDAIEVVNHMLDWSLADEAPVDDCSEEERDPKFRESVKCKVFLGFTSNLISSGVRDTIRYLVQHHMVDVIVTTTGGIEEDLIKGRSIKCLAPTFKGDFALPGAQLRSKGLNRIGNLLVPNDNYCKFEDWIIPILDKMLEEQISEKILWTPSKLIGRLGREINDESSYLYWAFKNNIPVFCPGLTDGSLGDMLYFHSFRNPGLIVDVVQDIRAVNGEAVHAAPRKTGMIILGGGLPKHHICNANMMRNGADYAVFINTAEEFDGSDSGARPDEAISWGKISGSAKTVKVHCDATIAFPLLVAETFAAKREKERKSC

SEQ ID NO: 3823 - protein, 496 aa, Plasmodium falciparum 3D7
MVDHVSFKEVNKIRSDDECDADSHNEGDNIEDAKASVFVKSSLIPEKTDVVKGLNFDKEVDLHEFINNYKYMGFQATNLGISIDEINKMIYYKYKDENIKSEPNNENNLNCNNVSEDLNKDQENHLYHYEKKKKSCIIWLSFTSNMISSGLREIFVYLAKNKFIDVVVTTAGGIEEDIIKCFSNTYIGDFNLNGKKLRKKGWNRIGNLIVPNDNYCKFEDWLQPILNKMLHEQNEKNEQMFLKKLEKRKKKYNNNKNKNDNNNDNDNVWGNEKNDQNQNQYNQGQESFKKDSNIYTNDVSNKKNHINNYINNYDSDSDDQCDMYYLSPSEFINTLGKEINDESSLIYWCYKNDIPIFCPGLTDGSLGDNLFFHNYGKKIKNNLILDIVKDIKKINSLAMNCEKSGIIILGGGLPKHHVCNANLMRNGADFAVYVNTASEYDGSDSGANTTEALSWGKIKYGQTNNHVKVFGDATILFPLMVLNSFYLYDQKRKKDM

SEQ ID NO: 3824 - protein, 368 aa, Arabidopsis thaliana
MEDDRVFSSVHSTVFKESESLEGKCDKIEGYDFNQGVDYPKLMRSMLTTGFQASNLGEAIDVVNQMLDWRLADETTVAEDCSEEEKNPSFRESVKCKIFLGFTSNLVSSGVRDTIRYLVQHHMVDVIVTTTGGVEEDLIKCLAPTFKGDFSLPGAYLRSKGLNRIGNLLVPNDNYCKFEDWIIPIFDEMLKEQKEENVLWTPSKLLARLGKEINNESSYLYWAYKMNIPVFCPGLTDGSLGDMLYFHSFRTSGLIIDVVQDIRAMNGEAVHANPKKTGMIILGGGLPKHHICNANMMRNGADYAVFINTGQEFDGSDSGARPDEAVSWGKIRGSAKTVKVYCDATIAFPLLVAETFATKRDQTCESKT

SEQ ID NO: 3825 - protein, 368 aa, Arabidopsis thaliana
MEDDRVFSSVHSTVFKESESLEGKCDKIQGYDFNQGVDYPKLMRSMLTTGFQASNLGEAIDVVNQMLDWRLADETTVAEDCSEEEKNPSFRESVKCKIFLGFTSNLVSSGVRDTIRYLVQHHMVDVIVTTTGGVEEDLIKCLAPTFKGDFSLPGAYLRSKGLNRIGNLLVPNDNYCKFEDWIIPIFDEMLKEQKEENVLWTPSKLLARLGKEINNESSYLYWAYKMNIPVFCPGLTDGSLGDMLYFHSFRTSGLIIDVVQDIRAMNGEAVHANPKKTGMIILGGGLPKHHICNANMMRNGADYAVFINPGQEFDGSDSGARPDEAVSWGKIRGSAKTVKVYCDATIAFPLLVAETFATKRDQTCESKT

SEQ ID NO: 3826 - protein, 246 aa, Arabidopsis thaliana
MVDVIVTTTGGVEEDLIKCLAPTFKGDFSLPGAYLRSKGLNRIGNLLVPNDNYCKFEDWIIPIFDEMLKEQKEENVLWTPSKLLARLGKEINNESSYLYWAYKMNIPVFCPGLTDGSLGDMLYFHSFRTSGLIIDVVQDIRAMNGEAVHANPKKTGMIILGGGLPKHHICNANMMRNGADYAVFINTGQEFDGSDSGARPDEAVSWGKIRGSAKTVKVYCDATIAFPLLVAETFATKRDQTCESKT

SEQ ID NO: 3827 - protein, 387 aa, Glycine max
  unsure (1)..(387): unsure at all Xaa locations
MGEAKGKEEEVLAPVHSTVFKESESLDGKCVKIEGYDFNRGVNYPLLLSSMVTTGFQASNLGDAIQVVNQMLDWRLVDEXXVAEDCSDQERDLEYRKSVTCKVFLGFTSNLISSGVRDTVRFLLQHRMVDVVVTTTGGIEEDLIKCLAPTYKGDFSLPGAYLRSKGLNRIGNLLVPNDNYCKFEDWIIPIFDQMLGEQNNENVLWTPSKLIARLGKEIKNESSYLYWAYKNNIPVFCPGLTDGSLGDMLYFHSFRNPGLIVDIVQDIRAMNGEAVHASPRKTGMIILGGGLPKHHICNANMMRNGADYAVFINTAQEYDGSDSGARPDEAVSWGKIRDSAQTVKVHCDATIAFPLLVAETFAXKSETSPLMKVKDEFTLKFILIVCV

SEQ ID NO: 3828 - protein, 381 aa, Lycopersicon esculentum
MGEALKYSIMDSVRSVVFKESENLEGSCTKIEGYDFNKGVNYAELIKSMVSTGFQASNLGDAIAIVNQMLDWRLSHELPTEDCSEEERDVAYRESVTCKIFLGFTSNLVSSGVRDTVRYLVQHRMVDVVVTTAGGIEEDLIKCLAPTYKGDFSLPGASLRSKGLNRIGNLLVPNDNYCKFENWIIPVFDQMYEEQINEKVLWTPSKVIARLGKEINDETSYLYWAYKNRIPVFCPGLTDGSLGDMLYFHSFKKGDPDNPDLNPGLVIDIVGDIRAMNGEAVHAGLRKTGMIILGGGLPKHHVCNANMMRNGADFAVFINTAQEFDGSDSGARPDEAVSWGKIRGGAKTVKVHCDATIAFPILVAETFAAKSKEFSQIRCQV

SEQ ID NO: 3829 - protein, 379 aa, Nicotiana tabacum
MGEALNVMESVRSIVFKESENLEGSATKIEGYDFNKGVNYAELFKSMASTGFQAANLGDAIQIVNQMLDWRLSHEQPMEDCSEEERDVAYRESVTCKIFLGFTSNLVSSGVRDTIRYLVQHRMVDVVVTTAGGIEEDLIKCLAPTYKGDFSLPGAVLRSKGLNRIGNLLVPNDNYCKFENWIIPIFDQMYEEQIKEKVLWTPSKVIARLAKEINDETSYLYWAYKNRIPVFCPGLTDGSLGDMLYFHSFKKGDPDNPDLNPGLIIDIVGDIRAMNSEAVHAGSRKTGMIILGGGLPKHHVCNANMMRNGADFAVYINTAQEFDGSDSGARPDEAVSWGKIRGGAKTVKVHCDATIAFPILVAETFAAKRKELSHIRCQV

SEQ ID NO: 3830 - protein, 375 aa, Oryza sativa
  unsure (1)..(375): unsure at all Xaa locations
XGGVRDMDALEGVRSIVLKPSESLDEGRFTRIAGADFNDAGLGLPGLLASLATTGFQASNLGDAVDVVNQMLDWRLSHEKPREDCDEAELDPTYRESVKCKIFLGFTSNLVSSGIRDVVRFLVQHHMVDVIVTTAGGIEEDLIKCLAPTYRGEFSLPGTLLRSKGLNRIGNLLVPNDNYCKFENWIMPLFDQMLQEQSTEVLVWTPSKVIACLGKEINDESSYLYWAYKNNIPVYCPALTDGSLGDMLFCHAVRNPGLIIDIVADIRLMNGEAIHATPRKTGIIVLGGGLPKHHICNANMFRNGADYAVYINTAQEFDGSDSGAQPDEAVSWGKIKGSAKPVKVHCDATIAFPLIVAATFARKFQVRNKRTEFLG

SEQ ID NO: 3831 - protein, 384 aa, Oryza sativa
  unsure (1)..(384): unsure at all Xaa locations
MAWEGGSGGSGGGGARDMDALQGVRSIVLKPSESLDEGRFTRIAGADFNDAGLGLSGMLASLATTGFQASNLGDAVDVVNQMLEWRLSHEKPREDCDEPELDPTYRESVKCKIFLGFTSNLVSSGIRDVVRFLVQHHMVDVIVTTAGGIEEDLIKCLAPTYRGDFSLPGTLLRSKGLNRIGNLLVPNDNYCKFENWIMPIFXYQMLQEQSREQNVWTPSKVIGRLGKEINDESSYLYWAYKNNIPVYCPALTDGSLGDMLFCHAVRNPGLIIDIVQDIRLMNGEAIHATPRKTGIIVLGGGLPKHHICNANMFRNGADFAVYINTAQEFDGSDSGAQPDEAVSWGKIKGSAKPVKVHCDATIAFPLLVAATFARKLHERNKPTX

SEQ ID NO: 3832 - protein, 183 aa, Oryza sativa
  unsure (1)..(183): unsure at all Xaa locations
XTRASTENVWTPSKVIARLGKEIGDESSYLYWAYKNNIPVYCPALTDGSLGDMLFCHAVRNPGLIIDIVQDIRLMNGEAIHATPRKTGIIVLGGGLPKHHICNANMFRNGADYAVYINTAQEFDGSDSGAQPDEAVSWGKIKGSAKPVKVHCDATIAFPLIVAATFARKFQVRNKRTEFLGLS

SEQ ID NO: 3833 - protein, 202 aa, Oryza sativa
  unsure (1)..(202): unsure at all Xaa locations
XMRTPTMNFCSFTXXVPLFSNYQLSDTSFLNVWTPSKVIACLGKEINDESSYLYWAYKNNIPVYCPALTDGSLGDMLFCHAVRNPGLIIDIVQDIRLMNGEAIHATPRKTGIIVLGGGLPKHHICNANMFRNGADYAVYINTAQEFDGSDSGAQPDEAVSWGKIKGSAKPVKVYFCTLSNFHMIIXLIFDVRLASXKCLLLN

SEQ ID NO: 3834 - protein, 111 aa, Oryza sativa
  unsure (1)..(111): unsure at all Xaa locations
XATLPTTFVLSLLFMKYXXQFYLPAECLDTIEDIRLMNGEAIHATPRKTGIIVLGGGLPKHHICNANMFRNGADYAVYINTAQEFDGSDSGAQPDEAVSWGKIKGSAKPVK

SEQ ID NO: 3835 - protein, 107 aa, Oryza sativa
  unsure (1)..(107): unsure at all Xaa locations
XFLVSDLEVIQMKLDWRLSHEKPREDCDEAELDPTYRESVKCKIFLGFTSNLVSSGIRDVVRFLVQHHMVDVIVTTAAGIEKDLIKCLAPTYRGVFSLPGTLLRSKX

SEQ ID NO: 3836 - protein, 222 aa, Triticum aestivum
  unsure (1)..(222): unsure at all Xaa locations
MAGEGGSGGERGKDPLEGVRAIVLKPSESLDESRFTKIAGADFNDAGLGLDGLLGSLASTGFQASNLGDAIDVVNQMLDWRLSHEKPXXEDCDEAELDPKYRESVKCKIFLGFTSNLVSSGIRDVIRFLAQHHMVDVIVTTAGGIEEDLIKCLAPTYRGEFSLPGALLRSKGLNRIGNLLVPNDXYCKFENWIMPLFDQMLQEQSAENVWTPSKVIARLGKX

SEQ ID NO: 3837 - protein, 180 aa, Triticum aestivum
  unsure (1)..(180): unsure at all Xaa locations
MGSNGGADGAGFNTDALEGVRAILLKPSESLDESXXRIAGPDFNDAGLGLAGMLGSLASTGFQASHLGDAIDVVNQMLDWRLSHEKPSEDCDGAELEPKYRESVKCKIFLGFTSNLVSSGIRDVIRFLVQHHMVDVIVTSAGGIEEDLIKCLGPTYRGDFSLPGALLRSKGLNRIGNLLX

SEQ ID NO: 3838 - protein, 153 aa, Triticum aestivum
  unsure (1)..(153): unsure at all Xaa locations
LFCHAVRNPGLIIDIVQDIRLINGEAIHASPRKTGAIILGGGLPKHHICNANMFRNGADYAVYINTAQEFDGSDSGAQPDEAVSWGKIKGSXAKPVKVHCDATIALPLLVAATFARRSHGANSTNXISGCELRASNLFFIDLQSFDWALWRIT

SEQ ID NO: 3839 - protein, 383 aa, Zea mays
MGAELGEAGVPARDMVDALEGVRSILLKPSERLDDKRFTRIAGADFDDAGLGLAGLLGSLASTGFQASNLGDAIDVVNQMLDWRLSHEKPSDDCAEAELDPAYRESVKCKIFLGFTSNLVSSGVREIIRFLVQHRMVDVIVTTAGGIEEDLIKCLAPTYRGDFTLPGALLRSRGLNRIGNLLVPNDNYCKFEHWIMPILDKMLLEQSTQNVWTPSKVIARLGKEINDESSYLYWAYKNNIPVFCPALTDGSIGDMLFCHSVHSPGLVVDIVQDVRLMNAETIHASPRKTGIILLGGGLPKHHICNANMLRDGADYAVYVNTAQEFDGSDSGARPDEAVSWGKIKSSARTVKVHCDATIAFPLLVAATFARKVHGTNNKLNRRQ

SEQ ID NO: 3840 - protein, 385 aa, Zea mays
MAAGAGGGELEALEGVRSIVLKPSESLDESRFTRIAGADFNEAIGLQGLLASLASTGFQASNLGDAIDVVNQMLDWRLSHEKPSEDCDEAELDPKYRASVKCKIFLGFTSNLVSSGIRDIIRFLAQHHMVDVIVTSAGGIEEDLIKCLAPTYRGDFSLPGALLRSKGLNRIGNLLVPNDNYCKFENWIMPLFDQMLQEQSTENVWTPSKVIARLGKEINDESSYLYWAYKNNIPVYCPALTDGSLGDMLFCHAVRNPGLIIDIVQDIRLMNGEAIHATPRKTGIIVLGGGLPKHHICNANMFRNGADYAVYINTAQEFDGSDSGAHPDEAVSWGKIKGSAKPVKVHCDASIAFPLLVAATFARKVQLQMNRLNGIRWSEWATEFC

SEQ ID NO: 3841 - protein, 385 aa, Zea mays
MAAGAGGGELEALEGVRSIVLKPSESLDESRFTRIAGADFNEAVGLEGLLASLASTGFQASNLGDAIDVVNQMLDWRLSHEKPSEDCDEAELDPKYRASVKCKIFLGFTSNLVSSGIRDIIRFLAQHHMVDVIVTSAGGIEEDLIKCLAPTYRGDFSLPGALLRSKGLNRIGNLLVPNDNYCKFENWIMPLFDQMLQEQSTENVWTPSKVIARLGKEINDESSYLYWAYKNNIPVYCPALTDGSLGDMLFCHAVRNPGLIIDIVQDIRLMNGEAIHATPRKTGIIVLGGGLPKHHICNANMFRNGADYAVYINTAQEFDGSDSGAHPDEAVSWGKIKGSAKPVKVHCDASIAFPLLVAATFARKVQLQMNRLNGIQWSEWATEFC

SEQ ID NO: 3842 - protein, 406 aa, Zea mays
MVQIRKVSRLRRFGLLLQTREMAAGAGGGELEALEGVRSIVLKPSESLDESRFTRIAGADFNEAVGLEGLLASLASTGFQASNLGDAIDVVNQMLDWRLSHEKPSEDCDEAELDPKYRASVKCKIFLGFTSNLVSSGIRDIIRFLAQHHMVDVIVTSAGGIEEDLIKCLAPTYRGDFSLPGALLRSKGLNRIGNLLVPNDNYCKFENWIMPLFDQMLQEQSTENVWTPSKVIARLGKEINDESSYLYWAYKNNIPVYCPALTDGSLGDMLFCHAVRNPGLIIDIVQDIRLMNGEAIHATPRKTGIIVLGGGLPKHHICNANMFRNGADYAVYINTAQEFDGSDSGAHPDEAVSWGKIKGSAKPVKVHCDASIAFPLLVAATFARKVQLQMNRLNGIRWSEWATEFC

SEQ ID NO: 3843 - protein, 202 aa, Zea mays
  unsure (1)..(202): unsure at all Xaa locations
MPPPPPRRFRPRAHPRDAHSAMASTSSAPAGATDAVLKPSEPAPEGVQQVQGIDFNQHAARPITVDELVSGYATMGFQATSVGAAVRIINDMRAWRDPETGDRTTIFLGYTSNLISSGLRETLRYLVQHKHVSAIVTTAGGVEEDFIKCLAPTYLGSFSTPGAGLRKKGMNRIGNLVVPNXNYCAFEEWVVPILEKQLQEQX

SEQ ID NO: 3844 - protein, 376 aa, Musa acuminata
MEGGAAGGQRDRETLDAVRSVVFKPSVSLEEKRFPRVQGYDFNRGCDLIGLLDSISSTGFQASNLGDAIDVINQMIDWRLSHDAPTEDCSEEERNLAYRQSVTCKIFLGFTSNLVSSGIREIIRFLVQHRMVEVLVTTAGGIEEDLIKCLAPTYKGDFSLPGSYLRSKGLNRIGNLLVPNDNYCKFEDWIMPILDQMLLEQTTENVVWTPSKVIARLGKEINDESSYLYWAYKNNVSVYCPALTDGSLGDMLYCHSVRNPGLLIDIVQDIRAMNGEAVHVGLRKTGVIILGGGLPKHHICNANMFRNGADYAVYVNTAQEFDGSDSGAEPDEAISWGKIKGSAKTIKVHCDATIAFPLLVAATFARKFQERNNKLA

SEQ ID NO: 3845 - protein, 350 aa, Schizosaccharomyces pombe
MDESLAKDAVFVASSKPSDLTTEVVGPDFNKYDERKKAGGPGITVEELVESYGKIGFQATNLHDAVTIINEMRNWRDPNPPEEKSDRATIFLGYTSNLISSGVREVLRYLVQHKCVDVIVTTAGGVEEDIIKCLGPTYVGDFHLDGKNLRAKGLNRIGNLIVPNDNYCRFEEWIFPILNKMVEEQETLGTHWTPSSFIRRLGKEINDESSVLYWAYKNNIPIYSPALTDGSIGDMLYFHTYKATPRPLVLDIVADIRNMNTHAVRANKSGIIILGGGVVKHHICNANLMRNGAEWSVYINSANEFDGSDAGARPDEAVSWGKIRGDAKKVKVYGEVSLLFPLIVAATFAK

SEQ ID NO: 3846 - protein, 356 aa, Schizosaccharomyces pombe
MDESLAKDAVFVASSKPSDLTTEVVGPDFNKYDERKKAGGPGITVEELVESYGKIGFQATNLHDAVTIINEMRNWRDPNPPEEKSDRATIFLGYTSNLISSGVREVLRYLVQHKCVDVIVTTAGGVEEDIIKCLGPTYVGDFHLDGKNLRAKGLNRIGNLIVPNDNYCRFEEWIFPILNKMVEEQETLGTHWTPSSFIRRLGKEINDESSVLYWAYKNNIPIYSPALTDGSIGDMLYFHTYKATPRPLVLDIVADIRNMNTHAVRANKSGIIILGGGVVKHHICNANLMRNGAEWSVYINSANEFDGSDAGARPDEAVSWGKIRGDAKKVKVCDAILVYGEVSLLFPLIVAATFAK

SEQ ID NO: 3847 - protein, 310 aa, Thermoplasma volcanium
MDRKELLSKPVQDLRIDGNTTLSNLMAQFSNIGGFTAAKLYEAHSIISDMFLEDNTTFLSFPADIISTGLRGLINDVVKRKLVDVIITTSGTLDHDIARTFGKYYCGSFNYSDVELREININRLGNVLVPDESYGELIEEKVMEQLEKLYSIKKEWATVDLIKEIGLSINNESSILYNAAKNDIPIFVPGITDGSFGSQLWSFYEQHHDFKINLLEDEHRLSDIIFDAKKTGAIMVGGGISKHHTIWWNQFRDGLDYAVYITTAQEYDGSLSGAKLEEAISWKKVRPNARFVNIYGDATVIMPILMAPFL

SEQ ID NO: 3848 - protein, 353 aa, Neurospora crassa
MADNQIPSSVADAVLVKSIEMPEGSQKVEELDFNKFKGRPITVDDLLQGMKHMGFQASSMCEAVRIINEMRAYRDPTTSEKTTIFLGYTSNLISSGLRGTLRYLVQHKHVSAIVTTAGGIEEDFIKCLGDTYMSSFSAVGADLRSKGLNRIGNLVVPNSNYCAFEDWVVPILDKMLEEQEASRGTENEINWTPSKVIHRLGKEINDERSVYYWAWKNDIPVFCPALTDGSLGDMLYFHTFKASPKQLRIDIVEDIRKINTIAVRAKRAGMIILGGGIVKHHIANACLMRNGAESAVYINTAQEFDGSDAGARPDEAVSWGKIKVGADAVKVYMEATAAFPFIVANTFAKEDGL

SEQ ID NO: 3849 - protein, 353 aa, Neurospora crassa
MADNQIPSSVADAVLVKSIEMPEGSQKVEELDFNKFKGRPITVDDLLQGMKHMGFQASSMCEAVRIINEMRAYRDPTTSEKTTIFLGYTSNLISSGLRGTLRYLVQHKHVSAIVTTAGGIEEDFIKCLGDTYMSSFSAVGADLRSKGLNRIGNLVVPNSNYCAFEDWVVPILDKMLEEQEASRGTENEINWTPSKVIHRLGKEINDERSVYYWAWKNDIPVFCPALTDGSLGDMLYFHTFKASPEQLRIDIVEDIRKINTIAVRAKRAGMIILGGGIVKHHIANACLMRNGAESAVYINTAQEFDGSDAGSRPDEAVSWGKIKVGADAVKVYMEATAAFPFIVANTFAKEDGL

SEQ ID NO: 3850 - protein, 342 aa, Pyrococcus horikoshii
MKAKDIVLKKSEKIEGVEVKGPWLDDAQSLEEVVSYYYRIGFQATHLGRAIEIWRKVEEKRERGEEIRVFLGYTSNIISSGLREIIAWLVKEKKVDVIVTTAGGVEEDFIKSLKPFILGDWEVDDAELRKKGVNRIGNIFVPNDRYIEFEKYMIPFFERVLKIEEKLSRPLTASEFIYEMGRYMDEKLGKEKEKSVIYWAYKNNIPIFCPAITDGSIGDMLYFFKEERRDSRLIIDIANDIVKLNNLAITAKETASIILGGSLPKHAIINANLFRGGTDYAIYISTAVPWDGSLSGAPPREGVSWGKIKAKADYVEVWGDATLIFPILVWMVMKARGQGYAQ

SEQ ID NO: 3851 - protein, 292 aa, Aeropyrum pernix
MECYRDIHGFMAGHLAEAVEVLREGLEASSVRVLTFTGNLVATGLRGVLAQLIDGGLFNVVFTTAGALDHDIARFMGGKYLKGRFEADDTELHRRGVHRLGNVFIPVESYGPLVERFVRTLAEQAAGVRGEWGVYELLRLAGSLMEGDRDSILAAAARRGVDVFVPGWPDGAFGTSLFMERQRGTSITVDYFRDMARLADIFFPQEGEAAALIVGGGISKHHAIWWSQFRGGLDYAVYVTTAVEYDGSLSGAHPREAVSWGKIKESSRRVVVYGDATITLPVIAYCLLHGCG

SEQ ID NO: 3852 - protein, 342 aa, Trypanosoma brucei
MSGVPFPSRVIGDLDYSNLLNIGQEEAIRCVLNAYPNIGLEATNLGRARRIVQRALNDNGMDGNKVMLAYTSNLISSGLRDTFACLARENRIGAVVTTAGGVEEDVIKCLGDTLVGDFALNDHALRNNGLNRVGNLLVPNDNYRNFEDFFVPLLRRLHEQQRDSRWTTKTTPSQIIAEIGAALESVRPNDCGSSLIYWCYRNDIPVFSPAFTDGSMGDMIYFYNYSRKGLVVDPVPDVRRLRQLGCKSTNVGRITCIVLGAGLPKHHLLRNVQADAVVYVTTGSDADGCESSCNVMADRANGLLSPNCDVVRVHGDATIISPLLLLRSSDGKEKVGVREDGN

SEQ ID NO: 3853 - protein, 496 aa, Plasmodium falciparum
MVDHVSFIEVNKIRSDDECDADSHNEGDNIEDAKASVFVKSSLIPEKTDVVKGLNFDKEVDLHEFINNYKYMGFQATNLGISIDEINKMIYYKYKDENIKSEPNNENNLNCNNVSEDLNKDQENHLYHYEKKKKSCIIWLSFTSNMISSGLREIFVYLAKNKFIDVVVTTAGGIEEDIIKCFSNTYIGDFNLNGKKLRKKGWNRIGNLIVPNDNYCKFEDWLQPILNKMLHEQNEKNEQMFLKKLEKRKKKYNNNKNKNDNNNDNDNVWGNEKNDQNENQYNQGQESFKKDSNIYTNDVSNKKNHINNYINNYDSDSDDQCDMYYLSPSEFINTLGKEINDESSLIYWCYKNDIPIFCPGLTDGSLGDNLFLHNYGKKIKNNLILDIVKDIKKINSLAMNCEKSGIIILGGGLPKHHVCNANLMRNGADFAVYVNTASEYDGSDSGANTTEALSWGKIKYGQTNNHVKVFGDATILFPLMVLNSFYLYDQKRKKDM

SEQ ID NO: 3854 - protein, 362 aa, Encephalitozoon cuniculi
MARAGQISVTQEAWVCTGDGKKSFPQLPMDRPQNVKDLARKVKDNLSFSREVRGMDFEKEWDFMAIMRSFETMGFQGSNLYRAVEEIERMKNSKIFFGCTSNIISSGLRDVIATLVKRRHVHVLVITGGGIEEDIIKAFKPTFCADFRLDGAELRDNGLNRIGNLVIPSENYEHLESWLNNIVNDITEGYTAERPRILTPSSFIRILGERIDDESSILYWAAKNDIPVYSPAVVDGSLGDILSFHPRRKMLKLDIVEDVYRINCETIFCGETAAIILGCGVVKHHILNANLFKNGLEHCVLINNAQEFDGSDAGASLDEAVSWGKVKPGTRGVKVFGDATILFPLLVGATFMRKDKDVPKGE

SEQ ID NO: 3855 - protein, 221 aa, Taenia solium
MSNAEASKEADKALPVDIARSLPPGFGDAVLRPSQALPEGVSVEVRGYDFNKGVDYEALLASYASTGFQATHFARAVDVLNSVIERRSVIPSDEDEKSKEVLESLGLGIARRSGCTVFLAYTSNMISAGVREVIRFLVQHNLVDVLVTSAGGVEEDFVKCMANFYVGDFSRWTGAELRKLGINRTGNLLVPNNNYVILEEWLNPIFDRMLEEQNTNNVNWT

SEQ ID NO: 3856 - protein, 371 aa, Caenorhabditis elegans
MSTNEAAASQEDIALAQGAVLVKSCQVPDGSIPIRGFDFSTASGPDFSLSAILSSYMSTGFQATHLAQAIQQVNQMLSLRDTPLTCDDDEKLFPYPEGRQKRSCTIFLGYTSNLVTSGLREVLRYCVQRNLVDCIVTSAGGIEEDLIKCLKPSYLGTFTMDGAKLRSNGMNRAGNVLIPNDNYCAFEDWLMPILDECLVEQEEKHLNWTPSKLIQRLGERIGDESSILYWAAKHRIPVFCPALTDGSLGDMLYFHSVKSSPGLRVDIVEDVRHINTIAVKSFKTGSIILGGGVVKHHINNANLMRNGADHTVYINTGQEFDGSDSGAQPDEAVSWGKVKPSAGAVKVHAEATLVFPLLVAETFAKHEGHKD

SEQ ID NO: 3857 - protein, 330 aa, Halobacterium sp. NRC-1
MTGDDADETHENVVPGSDEDLDTPDVRGYDFSGEFDFFELLDSYATTGFQASHLADAVDITREMREDDATIYLTLTSNIVSSGLREVVAHLVRENYVDVIITTSGSLTEDIIKTAKPFKMGEWDVDEAALREEGINRLGNIFVPSDRYVWLEEYLYDFFEEFFADQKVRTPTAFARELGATLDDEDSILKNAADNDIPVFCPALTDAEIGNFLYYYRQGYDSEVGIEILDDYDALIEEGLLADTTGLICVGAGVPKHHAIMTNLFRGGADYAVYISTGMEGDGSLSGAPPEEAVSWGKIKDEDAEPNYALIEAEATLVFPLLVAGAFENP

SEQ ID NO: 3858 - protein, 411 aa, Drosophila melanogaster
MSTEPSVAKDAVLKRSEALAENTPQVSGYDFNEGLDYSKLFESYVNTGFQATNLGLAIREINRMLDCRDQPLEADQIDSHETDDFIRRRSKCTVFLGYTSNLVSSGLRETIRFLAEHRMIDCIVTTAGGVEEDFIKCLAPTFMGSFELSGRDLRERGINRIGNLLVPNDNYCKFEDWVMPLLDEMLEEQKSQGTIWSPSKIIHRLGERIGDPSSIYYWAAKNQIPVFCPALTDGSLGDMMYFHSFRQPGLVVDILSDLRRLNTMAVKAVNSGMIIVGGGVIKHHICNANLMRNGADYSVFINTASEFDGSDSGARPDEAISWGKIRKDATPVKVYAEASLVFPLIVGETFAKRHHCAGKELPRETNQVCKLSGQEAIKRRRSCWLQVINTTGNSSNSIALRHLQWAMHIPP

SEQ ID NO: 3859 - protein, 428 aa, Plasmodium yoelii yoelii
MDGVFKEVNKIKNESETEDNDDNNGGINDAKSSVFVKSTKIPEKTDVVKGINFEKKVNLHEFINQYKYMGFQATNLGIGIDEINKMIHYKFFDNKEDIKNDSITYDNKKKCMIWLSFTSNMISSGLREIFVYLAKNNYIDVVVTTAGGIEEDLIKCFSKTYLGDFNLNGSKLRKKGWNRIGNLIVPNDNYCMFEDWVQPLLDKILREQNEKNEELFLRKLEKRKKKMEMEKESQGLNKSNQQYLSFDEEEDDMFYLSPSELINRLGKEINDETSLLYWCYKNNIPVFCPGLTDGSLGDNLFFHNYGKKMKNNLILDIVKDIKKINSLALKCHKSGIIVLGGGLPKHHVCNANLMRNGADFAVYVNTANEYDGSDSGANTTEALSWGKLKSGNNISHVKVFGDATILFPLMVLNSFYLHNHGEKEKKSD

SEQ ID NO: 3860 - protein, 370 aa, Senecio vulgaris
MAESNKEAIDSARSNVFKESESLEGTCAKIGGYDFNNGIDHSKLLKSMVSTGFQASNLGDAMIITNQMLEWRLSHDEVPENCSEEEKKNRESVKCKIFLGFTSNLISSGVRETICYLTQHRMVDVLVTTTGGIEEDFIKCLASTYKGKFSLPGADLRSKGLNRIGNLIVPNDNYIKFEDWIIPIFDQMLIEQKTQNVLWTPSRMIARLGKEINNETSYLYWAYKNNIPVFCPSITDGSIGDMLYFHSVSNPGPGLVVDIVQDVIAMDNEAVHASPQKTGIIILGGGLPKHHICNANMMRNGADFAVFINTAQEYDGSDSGARPDEAVSWGKISSTGKAVKVHCDATIAFPLLVAETFAVKKEKASKVNGF

SEQ ID NO: 3861 - protein, 384 aa, Senecio vulgaris
MHNNSSNSRELIKKWPRSNKEAIDSARSNVFKESESLEGTCAKIGGYDFNNGIDHSKLLKSMVSTGFQASNLGDAMIITNQMLDWRLSHDEVPENCSEEERKNRESVKCKIFLGFTSNLISSGVRETICYLTQHRMVDVLVTTTGGIEEDFIKCLASTYKGEFSLPGADLRSKGLNRIGNLIVPNDNYIKFEDWIIPIFDQMLIEQKTQNVLWTPSKMIARLGKEINNETSYLYWAYKNNIPVFCPSITDGSVGDMLYFHSVSNPGAGLVVDIVQDVIAMDNEAVHASPQKTGIIILGGGLPKHHICNANMMRNGADFAVFINTAQEYDGSDSGARPDEAVSWGKISSTGKAVEVHCDATIAFPLLVAETFAVKKEKASKVNGF

SEQ ID NO: 3862 - protein, 361 aa, Danio rerio
MAGQAPPVARAAVLKESTPLPDDLPQIRGYDFNQGLNHRALLQSFITTGFQASSFGLAVQEINKMIEKRLEPVQEECEDSDSRQSALGCTIFLGYTSNLISSGVRESIRYLTQHKMVDVIVTTAGGIEEDLIKCLAPTFLGEFSLKGKELRQQGINRIGNLLVPNENYCKFADWLMPILDQMVLEQKTEGTHWTPSKMIHRLGKEINNPDSVYYWAYKNDIPVFSPALTDGSLGDMIYFHSYKNPGLVLDIVEDIRRLNSKAVFAKSTGMIILGGGLVKHHIANANLMRNGADFAAFVNTGQEFDGSDSGARPDEAISWGKIRMDASPVKVYADASLVFPLLVAETFAHNASRLIQEKKSD

SEQ ID NO: 3863 - protein, 371 aa, Senecio vernalis
MEESMKQASVMENLRSVVFKESESLEGTCAKIRGYDFNNGIDYSQILKSMVSTGFQASNLGDAIETVNQMLDWRLSHEQVTEDCSQEEKNPTYRESIKCKIFLGFTSNLISSGVRDIIRYLVQHHMVDVIVTTTGGIEEDLIKCLADTFKGEFSLPGAELRSKGLNRIGNLLVPNDNYCKFEDWIIPIFDQMLEEQKAKNVLWTPSKLIMRLGKEINNESSYLYWAYKNDIPVFCPGLTDGSLGDMLYFHTFRNPGLIVDVVQDIRAINSEAVHANPRKTGMIILGGGLPKHHICNANMMRNGADYAVFINTAQEFDGSDSGARPDEAVSWGKIRGSAKSVKVHCDATIAFPLLVAETFAAKREQSAEPSS

SEQ ID NO: 3864 - protein, 370 aa, Senecio vernalis
MAESNKEAIDSARSNVFKESESLEGTCAKIGGYDFNNGIDHSKLLKSMVSTGFQASNLGDAMIITNQMLDWRLSHDEVPENCSEEEKKNRESVKCKIFLGFTSNLISSGVRETICYLTQHRMVDVLVTTTGGIEEDFIKCLASTYKGKFSLPGADLRSKGLNRIGNLIVPNDNYIKFEDWIIPIFDQMLIEQKTQNVLWTPSRMIARLGKEINNETSYLYWAYKNNIPVFCPSITDGSIGDMLYFHSVSNPGPGLVVDIVQDVIAMDNEAVHASPQKTGIIILGGGLPKHHICNANMMRNGADFAVFINTAQEYDGSDSGARPDEAVSWGKISSTGKAVKVHCDATIAFPLLVAETFAVKKEKASKVNGF

SEQ ID NO: 3865 - protein, 369 aa, Homo sapiens
MEGSLEREAPAGALAAVLKHSSTLPPESTQVRGYDFNRGVNYRALLEAFGTTGFQATNFGRAVQQVNAMIEKKLEPLSQDEDQHADLTQSRRPLTSCTIFLGYTSNLISSGIRETIRYLVQHNMVDVLVTTAGGVEEDLIKCLAPTYLGEFSLRGKELRENGINRIGNLLVPNENYCKFEDWLMPILDQMVMEQNTEGVKWTPSKMIARLGKEINNPESVYYWAQKNHIPVFSPALTDGSLGDMIFFHSYKNPGLVLDIVEDLRLINTQAIFAKCTGMIILGGGVVKHHIANANLMRNGADYAVYINTAQEFDGSDSGARPDEAVSWGKIRVDAQPVKVYADASLVFPLLVAETFAQKMDAFMHEKNED

SEQ ID NO: 3866 - protein, 369 aa, Homo sapiens [sequence omitted]

SEQ ID NO: 3867 - protein, 344 aa, Homo sapiens
APAGALAAVLKHSSTLPPESTQVRGYDFNRGVNYRALLEAFGTTGFQATNFGRAVQQVNAMIEKKLEPLTSCTIFLGYTSNLISSGIRETIRYLVQHNMVDVLVTTAGGVEEDLIKCLAPTYLGEFSLRGKELRENGINRIGNLLVPNENYCKFEDWLMPILDQMVMEQNTEGVKWTPSKMIARLGKEINNPESVYYWAQKNHIPVFSPALTDGSLGDMIFFHSYKNPGLVLDIVEDLRLINTQAIFAKCTGMIILGGGVVKHHIANANLMRNGADYAVYINTAQEFDGSDSGARPDEAVSWGKIRVDAQPVKVYADASLVFPLLVAETFAQKMDAFMHEKNED

SEQ ID NO: 3868 - protein, 369 aa, Homo sapiens [sequence omitted]

SEQ ID NO: 3869 - protein, 322 aa, Homo sapiens
MEGSLEREAPAGALAAVLKHSSTLPPESTQVRGYDFNRGVNYRALLEAFGTTGFQATNFGRAVQQVNAMIEKKLEPLSQDEDQHADLTQSRRPLTSCTIFLGYTSNLISSGIRETIRYLVQHNMVDVLVTTAGGVEEDLIKCLAPTYLGEFSLRGKELRENGINRIGNLLVPNENYCKFEDWLMPILDQMVMEQNTEGVKWTPSKMIARLGKEINNPESVYYWAQKNHIPVFSPALTDGSLGDMIFFHSYKNPGLVLDIVEAQEFDGSDSGARPDEAVSWGKIRVDAQPVKVYADASLVFPLLVAETFAQKMDAFMHEKNED

SEQ ID NO: 3870 - protein, 321 aa, Homo sapiens [sequence omitted]

SEQ ID NO: 3871 - protein, 313 aa, Homo sapiens
MEGSLEREAPAGALAAVLKHSSTLPPESTQVRGYDFNRGVNYRALLEAFGTTGFQATNFGRAVQQVNAMIEKKLEPLSQDEDQHADLTQSRRPLTSCTIFLGYTSNLISSGIRETIRYLVQHNMVDVLVTTAGGVEEDLIKCLAPTYLGEFSLRGKELRENGINRIGNLLVPNENYCKFEDWLMPILDQMVMEQNTEGVKWTPSKMIARLGKEINNPESVYYWAQKNHIPVFSPALTDGSLGDMIFFHSYKNPGLVLDIVEGARPDEAVSWGKIRVDAQPVKVYADASLVFPLLVAETFAQKMDAFMHEKNED

SEQ ID NO: 3872 - protein, 312 aa, Ferroplasma acidarmanus
MEIKREDLLKNPVKDMKINKNTTLMQLMEMFGTSGGFTSKKIYEGYQILKEEFTSDETTFLSFPADIISTGTRGIINQLVKNKLVDVIITTNGTLDHDIARVYTDYYAGTFNFGDEKLKDMNINRLGNVFVPDESYGVIIEEKLMPMIEELYSKKKEWAPVDLIREVGLKLNNENSILYNAAKNGIPVFVPGITDGSFGSQLWSFYEMHHDFRINLLEDEHRLSDIVFDAKKTGALMIGGGISKHHTIWWNQFRDGLNEAVYITTAQEYDGSLSGAKLEEAITWKKVRKDAKFVNIYGDATAILPIMVAPFL

SEQ ID NO: 3873 - protein, 297 aa, Mus musculus
MGFVKVVKNKAYFKRYQVRFRRRREGKTDYYARKRLVIQDKNKYNTPKYRMIVRVTNRDIICQIAYARIEGDMIVCAAYAHELPKYGVKVGLTNYAAAYCTGLLLARRLLNRFGMDKIYEGQVEVNGGEYNVESIDGQPGAFTCYLDAGLARTTTGNKVFGALKGAVDGGLSIPHSTKRFPGYDSESKEFNAEVHRKHIMGQNVADYMRYLMEEDEDAYKKQFSQYIKNNVTPDMMEEMYKKAHAAIRENPVYEKKPKREVKKKRWNRPKMSLAQKKDRVAQKKASFLRAQERAAES

SEQ ID NO: 3874 - protein, 128 aa, Mus musculus
MVVRVTNRYIICQIAYARIEGDMIICAAYAHELPKYGLKVGLTNYAATYCTGLLLVPRLLNRFGMDKIYGGQVEVNGGEYNVESIDGQPGAFTCYLDAGLARTTTGNKVLGALKGTVDGDLSIPHSTK

SEQ ID NO: 3875 - protein, 143 aa, Mus musculus
MGFVKIVKNKAYFKRYFVRFRMRQEGKTYYYARKRLVILDKNKYNIPKYRMIIPVTNRDIICQIAYSGIEGEMIVCGASAYKLPNYGVKVGLTNYAAAYCTGLLLAHRLLNRFGTDKIYEGQVVVQEWHWFLLVIFLHLTLPI

SEQ ID NO: 3876 - protein, 137 aa, Mus musculus
MDIRTPFCANDLCLEENNILRSEEDMIVCSVYAHELPNYGVKVGLTNYAEAYCTGLLLVHRLLNRFGVDKIYEGQVEVTGEEYNVESTDGQPGAFTYYLNASLAQTTTGNKVFGTLKGAMDGGLSISHSTKRFPSYD

SEQ ID NO: 3877 - protein, 164 aa, Mus musculus
MGFMKVVKNKAYFKRYQVRFRRRQKLLNRFGTDKIYEGQVVVNGGEHNVESIDGQPGAFTCFLDAGLAQTTTGNKVFEALKGAMDGGLSVPHRTERFPSYDFESQEFNAEVHRKHIMGQNVAGNMCYLMEEDEDVYKKQFSQSIKNNVTPNMMEEMYKKAHTAI

SEQ ID NO: 3878 - protein, 144 aa, Mus musculus
MAYAHIEEDMIVCSVYAHELPNYGVKVGLTNYAEAYCTGLLLVHRLLNRFGVDKIYEGQVEVTGEEYNVESTDGQPGAFTYYLNASLAQTTTGNKVFGTLKGAMDGGLSISHKKDACKKQFSWYRENNVTPDMERIYKKAQATI

SEQ ID NO: 3879 - protein, 110 aa, Mus musculus
ALKGAVDGGLSIPHSTKRDYMRYLMEEDEDAYKKQFSQYIKNNVTPDMMEEMYKKAHAAIRENPVYEKKPKREVKKKRWNRPKMSLAQKKDRVAQKKASFLRAQERAAES

SEQ ID NO: 3880 - protein, 297 aa, Rattus norvegicus
MGFVKVVKNKAYFKRYQVRFRRRREGKTDYYARKRLVIQDKNKYNTPKYRMIVRVTNRDIICQIAYARIEGDMIVCAAYAHELPKYGVKVGLTNYAAAYCTGLLLARRLLNRFGMDKIYEGQVEVNGDEYNVESIDGQPGAFTCYLDAGLARTTTGNKVFGALKGAVDGGLSIPHSTKRFPGYDSESKEFNAEVHRKHIMGQNVADYMRYLMEEDEDAYKKQFSQYIKNNVTPDMMEEMYKKAHAAIRENPVYEKKPKREVKKKRWNRPKMSLAQKKDRVAQKKASFLRAQERAAES

SEQ ID NO: 3881 - protein, 296 aa, Rattus norvegicus
MGFVKVVKNKAYFKRYQVRFRRRREGKTDYYARKRLVIQDKNKYNTPKYRMIVRVTNRDIICQIAYARIEGDMIVCAAYAHELPKYGVKVGLTNYAAAYCTGLLLARRLLNRFGMDKIYEGQVEVNGDEYNVESIDGQPGAFTCYLDAGLARTTTGNKVFGALKGAVDGGLSIPHSTKRFPGYDSESKEFNAEVHRKHIMGQNVADYMRYLMEEDEDAYKKQFSQYIKNNVTPDMEEMYKKAHAAIRENPVYEKKPKREVKKKRWNRPKMSLAQKKDRVAQKKASFLRAQERAAES

SEQ ID NO: 3882 - protein, 208 aa, Rattus norvegicus
MGFVKVVKNKAYFKRYQVRFRRQREGKTDYHAQKRLVIQDKRHTHELPKHGVKVGLTNYASAYCTGLLLVRRLLNRFGMDRIYEDQVEVNGDEYNVESINSQPGAFTCYLDAGLARTTTGNKVFGTLKVAVDGGLSIPHSTKRFPGYDSKSKEFNAEVHLKHTMGQNVADYMSYLMEEDEDVYKKQFFQYIKNNITPDRMEEKAHAAI

SEQ ID NO: 3883 - protein, 128 aa, Rattus norvegicus
MGFVKVVKNKAYFKRYQVRFRRRQEGKSDYYARKRLVIQDKNKYNTPKYRMIVRVTNRDIICQIAYARIEGDMIVCAAYAHELPKYGAKVGLTNYAAAYCTGLLLARRLLNRFGMDKIYEGQVEVNGD

SEQ ID NO: 3884 - protein, 355 aa, Rattus norvegicus
MLGHHFESGDFHIQEGCYAMQVSGQAVHRIQKQGPEYTNHDGSEAGQRQIPGDSQQNTRKELTDNSILVILVIFRMQLVYTRSDRMQERRALRLVIGSGNVLVITRTSYRSSFSFALSVLLSCRRLRRQYVNIGRRAAGLKENMYTGHPFSASATKALLRSLYIPEAKAVEKQQGSSQPGGICPVQSSAVLMHESHSAAETLEDGRRNVPQPRSQRLARTTTGNKAFGALKGAVDGGLSIPHGTKRFPGYDSEGKEFSAEVHRKHIMGQNVADYMRYLMEEGKDVYKKQFSQNIKNVSPDLMEELYKKAHAALRENPGYEKKPKREVKKKRWNQERSGCSKEGSFLRAQEWAAES

SEQ ID NO: 3885 - protein, 174 aa, Rattus norvegicus
MGFMEFVKNKAYLKDNKAYANELPKHSAKVGLTNYSAAYCPGLLLACMFLNRFGMDKIYEGQVEVNRDKYNMESTEGRYGTFICYLDAGLAGTTTGNKVFRPLNEGMDGGLSIPFSSKQFPGYDSERKDFNAEKPKREVKKSWNHLKMSHAQKKDRASQKKAKFLRAQGWAAES

SEQ ID NO: 3886 - protein, 233 aa, Rattus norvegicus
MGFVKVVKNKAYFKRHQGRFGRLREGQTDYYVQKRLVRQDRNKYSTPEYRVIVCVANRRDDCVLYCQIVYAHIEICAAHAHELPKYGEKVVLTNYAAAYCTSGFSVGLAWTISMKAEWRRLEMNTMNVMESINCQPGVFTFMENVINQKHLNFFISSVETSDPTPEELISWDDRRQRLFAMFSRTRLNFGEHTSHHILYGQHIWNPFWYVNTCHSPGNRERTHDGEKLKNKKF

SEQ ID NO: 3887 - protein, 137 aa, Rattus norvegicus
MELVKVVKNKAYFKRYLEIYKAARGLLNRFGMDKIYEGKMEVNVDDNVESTDGQSGPFLCYLGAGLVRTTTGNKVFGVLKGAVDGGSSIPHSTKRFPGYDAKSKEFNAKVRQKQNMAQNVAAYVCYLMEEDEDAYKK

SEQ ID NO: 3888 - protein, 196 aa, Sulfolobus tokodaii
MAHGPNYRVKYRRRREGKTNYYKRYTYVINNTTRLVVRLTNKYIIAQIAKFNPKGDVIVVAAHSMELAKKFGWKGDLNNTPAAYLTGYLLGVRALKAGIKEAVADIGLFVPVKGSRIFTAIKGAIDAGLSIPVGDLGIKEDRIKGVHIASYAQKLEAENPELFKRLFSKYLERGLHPKDLPSHFEEILNKIKSGGA

SEQ ID NO: 3889 - protein, 207 aa, Branchiostoma belcheri tsingtaunese
MGFVKVVKNKAYFKRFQVKFRRRREGVTDYYARKRLVIQEKNKYNTPKYRLIVRFTNKDIICQVAYARIEGDVIVCAAYAHELPRYGIKVGLTNYAAAYCTGLLLARRILKKFSLDTIYEGCTEIDGDEYNVEEVDGQPRPFRCFLDVGLVRTSTGARVFGAMKELSTAVLTSRIARSASQDTMPSPRISTPRFTEATSSGSTWQST

SEQ ID NO: 3890 - protein, 205 aa, Pyrobaculum aerophilum str. IM2
MARSGRYKVPFRRRREGLTNYRKRRKLLLSKKPRLVVRKTNKHIIAQIVVAKPQGDVTIVGADTRILAKFGWRGDENNVAAAYLLGLVVGYKARARRVEEAILDIGLHRPAPGARVFAVLKGALDAGLKIPHGEEVLPDEDRIKGKHVAEYAEKLKEENPEAYKARFSRYLQRGLEPEKLPEHFEEVKKKIVEYYEKKLAKVAAQ

SEQ ID NO: 3891 - protein, 324 aa, Anopheles gambiae str. PEST
QGFVKVVKNKQYFKRYQVRFRRRREGKTDYYARKRLIFQDKNKYNTPKFRLIVRLSNRDITCQIAYARIEGDRIVCAAYSHELPRYGVKVGLTNYAAAYCTGLLVARRILQKLRLDTLYAGCTDVTGEEYLVEPVDEGPAAFRCYLDVGLARTTTGARVFGAMKGAVDGGLNIPHSVKRFPGYSAENKSFNAEMHRDHIFGLHVANYMRTLEEEDEEAFKRQFSKYISLGIKADDIENIYKNAHASIRKPPSRRNPRRRSPRSGGRWPSCRSPPARRRSRSTRPTSWPRSRPTSKPKRPRRRRPFFFSSWWCIILVLPCSSPVR

SEQ ID NO: 3892 - protein, 297 aa, Giardia lamblia ATCC 50803
MGWVKVQKTRSYFKRFQVQFRRRREGKTDYQARKALIIQDKNKYATPRYRFVVRRTNKDIICQVTAAELTKDRVVCAAYSHELPRYGIPVGLTNYAAAYATGLLCGRRLLEKLSVGIKENALAQLYPGLDKATGEEYHPDENENEEVHAFKAFLDIGLARASTGARVFAAMKGAVDAGLNIPHSMKRFPGYSKDGFDSSALRDRIMGKHVGDYMAELKAEDEETYRKRFSKYIAAKVEPLRLEAMYTKAHAAIRANPQAVKAKFEIKKPVRQARLTLKERKERIDAKKLEALKQLTK

SEQ ID NO: 3893 - protein, 203 aa, Pyrococcus furiosus DSM 3638
MAHGPRYRVPFRRRREGKTNYRKRLKLLKSGKPRLVVRKSLNHHIAQIIVYDPKGDRTLVSAHTRELIRDFGWKGHCGNTPSAYLLGLLIGYKAKQAGIEEAILDIGLHPPVRGSSVFAVLKGAVDAGLNVPHSPEIFPDEYRIRGEHIAEYAKMLKEQDEEKFRRQFGGYLVKGLDPEKLPEHFEEVKARIIEKFEGEGARE

SEQ ID NO: 3894 - protein, 192 aa, Methanothermobacter thermautotrophicus str. Delta H
MAHGPRYKLAFRRRREGKTDYRARYKMVETGKSRLVVRITTYHVIAQIINVGMNGDETLVSAHSKQLQKMGWLGGTSNTAAAYLTGYLCGKRALKEGIEEAVLDIGLRPAIRGSKVFAALKGAVDAGLNVPHGESVLPDESRIRGEHIMEYAESLDEEELRKRFSKYLERGLSPVDLPEHFDEIKKRIDEEV

SEQ ID NO: 3895 - protein, 174 aa, Methanosarcina acetivorans C2A
MATGPRYKVPFRRRREGRTNYHLRLKLLLSRQDRVVVRKSSRNVQIQLIAPTPDGDITYSSAVSNELAKYGYTGATGNTTAAYLTGLLFGLKSLQKGYEGGILDIGLQASSAGSRVYAALKGVVDSGFEIPCSPEVFPPDERIRGEHIAGYREESSDLPEQFEATKEKIFAEFS

SEQ ID NO: 3896 - protein, 202 aa, Methanopyrus kandleri AV19
MIALATGPRYRVPFRRRREGKTNYYKRRELIKADAPRLVARKTLNHNIAQIVDFAPHGDVTLASAHSIELRNKFGWKGHCGNTPAAYLTGYLCGLRALERGIERAVIDIGLHRPVRGSRVFAMLKGALDAGMDIPHGEEVLPPEDRIRGEHIANLARQIKEEDPEEYERRFSKYLERGLKPEELPEHFEEVKSKIEEEFGGA

SEQ ID NO: 3897 - protein, 189 aa, Methanosarcina mazei Goe1
MSPKNCYRNNLEELKMATGPRYKVPFRRRREGRTNYHLRLKLLLSGQDRVVVRKSARNVQIQLLAPTPEGDITYSSAVSSELAKYGYTGATGNTTAAYLTGLLFGLKSLQKGYEGGILDIGLQASSAGSRVYAALKGIVDSGFEIPCSSDVFPSDERIRGEHIAEYREESSDLPEQFEATKEKIFAEFS

SEQ ID NO: 3898 - protein, 195 aa, Methanococcus vannielii
MIMAQNAKHRVPFRRRREGKTDFRQRLGLLLSGKPRLVARKSLNNIIAQLMAYDEKGDIVLVSAHSRELVKMGYKGHCGNLPAAYLTGLLLGKKAVEEGLEEAILDKGLHRATKGAAIFAVLKGALDAGMDIPCGEEIIADEERLNGTHIKQYAELLKEDEEAYKKQFSKYLEKGLNPEDLPEHFEELKGKILNL

SEQ ID NO: 3899 - protein, 195 aa, Methanocaldococcus jannaschii
MATGPTYRVKFRRRREAKTDYRKRLKLLLSRKPRLVARRTLNHCIAQIVLYDEKGDKTVVSAHSRELIKLGYKGHTGNLPSAYLTGYLLGKKALAKGYTEAVLDIGLHRATKGNAIFAILKGALDAGMEIPHGEEILPSEERIRGEHIKAYAEMLKEQDEERYKKQFSKYLEKGLEPEKLPEHFEEIKAKIDSMF

SEQ ID NO: 3900 - protein, 174 aa, Methanosarcina barkeri
MATGPRYKVPFRRRREGRTNYHLRLKLLISKQDRVVVRKSARNVQIQLIAPTPEGDITYSSAVSSELAKYGYTGVTGNTTAAYLTGLLFGLKSLKKGYEGGILDIGLQASSAGSRVYAALKGIVDSGFEVPCSPEVFPSDERIRGEHIAEYREESSDLPEQFEATKEKIFAEFS

SEQ ID NO: 3901 - protein, 187 aa, Haloarcula marismortui
MATGPRYKVPMRRRREARTDYHQRLRLLKSGKPRLVARKSNKHVRAQLVTLGPNGDDTLASAHSSDLAEYGWEAPTGNMPSAYLTGLLAGLRAQEAGVEEAVLDIGLNSPTPGSKVFAIQEGAIDAGLDIPHNDDVLADWQRTRGAHIAEYDEQLEEPLYSGDFDAADLPEHFDELRETLLDGDIEL

SEQ ID NO: 3902 - protein, 186 aa, Haloarcula marismortui
ATGPRYKVPMRRRREARTDYHQRLRLLKSGKPRLVARKSNKHVRAQLVTLGPNGDDTLASAHSSDLAEYGWEAPTGNMPSAYLTGLLAGLRAQEAGVEEAVLDIGLNSPTPGSKVFAIQEGAIDAGLDIPHNDDVLADWQRTRGAHIAEYDEQLEEPLYSGDFDAADLPEHFDELRETLLDGDIEL

SEQ ID NO: 3903 - protein, 189 aa, Archaeoglobus fulgidus DSM 4304
MKLARGPRYKVPLRRRREGKTNYRKRLKLLLSRKPRLVVRITNRRVIAQIVEYAPEGDRVVVGVDSAMLREFGWKGDLNNTPAAYLTGILIAKKALQKGIGEAVLDIGLHTPTRGSRVFAVLRGAVEGGLEVPHSDEVLPDDSRIRGEHIAAYYEMNPERFGEYEKRGLKPSDLPAHVDEIKEKLMVIS

SEQ ID NO: 3904 - protein, 197 aa, Sulfolobus acidocaldarius
MTQGPNYRIKFRRRREGKTDYYTRYTYVINNAIRFVPRLTNKYVIVSVSKFDQKGDIMIAYAHSIELVKKYGWKGDTNNTPAAYLTGYLAGLRAVKSGVKAAVSDIGLFVPVKGGRIFAVIKGAIDAGLKVPVGDLGKLKDRVNGSHISAYAQKLKNENQELYNKLFSSYIQRGLDPVLLPQHFEEVLNKIKENGGK

SEQ ID NO: 3905 - protein, 199 aa, Sulfolobus solfataricus
MNKLANGPNYKVKPRRRREGKTNYYKRYVYVISKQTRFIVRITNKYVIVQIAKIDPKGDIMIASAHSAELAKKFGWKGDENNTPAAYLTGYLAGLRAIKRGVTECVADIGLHVPSKGNRVFYVIKGAIDAGLKIPIGDISIENDRIKGEHIAKYAEKLKSENSDLYSKLFSRYLQRGLNPENLPSHFEEILNKIKSSGG

SEQ ID NO: 3906 - protein, 160 aa, Thermoplasma acidophilum
MVFKRKEAGITDYSKRLKLLKSREKRFIVRITGKGVIAQVAEYSDIGDRILFTVTDKTLAKYGVDLRGNNIQVCYLVGYIAGIESEKNGVESAVLDTGRRKFRKGGRIAACLKGFTDAGIEVPHGEDVFPDKKRIDGKHLKSPVKISEIVKNFKKMEEKA

SEQ ID NO: 3907 - protein, 163 aa, Thermoplasma acidophilum
MISMVFKRKEAGITDYSKRLKLLKSREKRFIVRITGKGVIAQVAEYSDIGDRILFTVTDKTLAKYGVDLRGNNIQVCYLVGYIAGIESEKNGVESAVLDTGRRKFRKGGRIAACLKGFTDAGIEVPHGEDVFPDKKRIDGKHLKSPVKISEIVKNFKKMEEKA

SEQ ID NO: 3908 - protein, 203 aa, Pyrococcus abyssi
MAHGPRYRVPFRRRREGKTNYRKRLKLLKSGKPRLVVRKSLNHHIAQIIVYDPKGDRTLVSAHTRELIRDFGWKGHCGNTPSAYLLGLLIGYKAKKAGIEEAILDIGLHPPVRGSSVFAVLKGAVDAGLNVPHSPEIFPEDYRIRGEHIAEYARMLKEQDEEKFRRQFGGYLEKGLDPEKLPEHFDEVKARIIEKFESEGARE

SEQ ID NO: 3909 - protein, 271 aa, Dunaliella salina
MGYVKVVKTSPYFSRYQVKYRRRRQGKTDYRARLRLVRQDKNKYNTHKYRLVVRFSNKNVTCQIVYSTIQGDVVMAAAYSKELPNYGLKVGLTNYSAAYCVGLLVARRILTKLNLADTYKGQEEPDGEDYNVEPVEDGPKPFYCLLDTGLKRTSTGSKVFAAMKGALDGGLDIPHNEKRFVGYADKKLDTEVLQKYIYGGHVAEYQETMQEEEPEKYQAHFSSYVENEIEPDGIEDMYKEVHAKIRENPCPPKKERTKPADAKRWSPQAHL

SEQ ID NO: 3910 - protein, 269 aa, Argopecten irradians
MGFVKVVKNKAYFKRFQVKFRRRREGKTDFYARKRLVIQEKNKYNTPKYRLIVRFTNKDIICQIAYARIEGDHIICSAYAHELPRYGVKVGLTNYSAAYCTGLLLARRLLKQFKLDSVYAGQEEVDGDEYYVEDVDGEAGAFRCYLDAGLVRTSTGARVFGALKGAVDGGLDIPHSTKRFPGYDGESNEFNAEVHRNHIFGKHVAGYMAHLQEEDEEAYKRQFSRFIKNGLNSENLEEMYKKGHAAIRANPERATKTKKAPAGKVKRWN

SEQ ID NO: 3911 - protein, 294 aa, Plasmodium falciparum 3D7
MAYVKVVKNKAYFKRYQVKYRRRREGKTDYRARKALILQDKNKYNAQKLRFVVRKTNSQVICQIACAHIEGDKILAEAKSKELIRYGIPVGLKNYAAAYATGLLCARRFLKSLNLDTQFLGVEKVTGEIENNEDKEDEEGRKPIKAFLDVGITRTTTGNRVFAALKGACDGGLNIPHGNNRFPGSKNEFNPEQLRKNILGIHVAEYMKTLQEEDNDKYKTHFNDYLKNNIGADDIEQMYLNAHEKIRQNPEKESKDTKNVKKFVSKHEKPKKLNAKLRKKRVKEKLALYVEKLQ

SEQ ID NO: 3912 - protein, 301 aa, Arabidopsis thaliana
MVFVKSSKSNAYFKRYQVKFRRRRDGKTDYRARIRLINQDKNKYNTPKYRFVVRFTNKDIVAQIVSASIAGDIVKASAYAHELPQYGLTVGLTNYAAAYCTGLLLARRVLKMLEMDDEYEGNVEATGEDFSVEPTDSRRPFRALLDVGLIRTTTGNRVFGALKGALDGGLDIPHSDKRFAGFHKENKQLDAEIHRNYIYGGHVSNYMKLLGEDEPEKLQTHFSAYIKKGVEAESIEEMYKKVHAAIRAEPNHKKTEKSAPKEHKRYNLKKLTYEERKNKLIERVKALNGAGGDDDDEDDEE

SEQ ID NO: 3913 - protein, 301 aa, Arabidopsis thaliana [sequence omitted]

SEQ ID NO: 3914 - protein, 301 aa, Arabidopsis thaliana
  unsure (1)..(301): unsure at all Xaa locations
MVFVKSTKSNAYFKRYQVKFRRRRDGKTDYRARIRLINQDKNKYNTPKYRFVVRFTNKDIVAQIVSASIAGDIVKASAYAHELPQYGLTVGLTNYAAAYCTGLLLARRVLKMLEMDDEYEGNVEATGEDFSVEPTDSRRPFRALLDVGLIRTTTGNRVFGALKGALDGGLDIPHSDKRFAGFHKENKQLDAEIHRNYIYGGHVSNYMKLLGEDEPEKLQTHFSAYIKKGVEAESIEELYKKVHAAIRAXPNXRKTVKPAPKQHKRYNLKKLTYEERKNKLIERVKALNGAGGDDDDEDDEZ

SEQ ID NO: 3915 - protein, 88 aa, Arabidopsis thaliana
MKLLGEYEPEKLQTLFSAYIKKGVEAESIEEMYKKVHAAIRAEPNHKKTEKPATKEHKRYDLKKLTYEERKNKLIERVKALNGASGDW

SEQ ID NO: 3916 - protein, 307 aa, Glycine max
  unsure (1)..(307): unsure at all Xaa locations
MVYVKAQKSKAYFKRYQVKFKRRREGKTDYRARIRLINQDKNKYNTPKYRFVVHFSNKDIVAQIISASIAGDIVLAAAYAHELPRYGLEVGLTNYAAAYCTGLLLARRVLKTLDMDEEYEGNVEATGEDYSVEPAESRRPFRALLDVGLVRTTTGNRVFGALKGALDGGLDIPHSDKRFAGFDKEKKELDAEVHRKYVFGGHVAAYMKILAEDEPEKYQSHFSEYIKRGIEADGIEALYKKVHAAIRADPTLKKSDKQPPKEHKRYNMKKLTYEERKAKLVARVAAINSAADNDEDDEXKFIADAVS

SEQ ID NO: 3917 - protein, 327 aa, Glycine max
  unsure (1)..(327): unsure at all Xaa locations
PTRPPTRPRTRPVSGEEIQQQWCTSRLRNQKPTSRDIKSSSREEEREKPITVPGFXVDXSGQDKYNTPKYLVVRFSNKDIVAQIISASIAGDLVLATAYSHELPRYGLEVGLTNYAAAYCTGLLLARRVLKTLEMDEEYEGNVEATGEDYSVEPAESRRPFRALLDVGLVRTTTGNRVFGALKGALDGGLDIPHSDKRFAGFDKEKKELDAEVHRKYVFGGHVAAYMKILAEDEPEKYQSHFSEYIKRGIEADGIEALYKKVHAAIRADPTLRKSDKEPPKEHKRYNMKKLTYEERKAKLIARVAAINSAADSDEDDEXKFIADAVP

SEQ ID NO: 3918 - protein, 348 aa, Glycine max
  unsure (1)..(348): unsure at all Xaa locations
MVYVKGSEIKSLLSRDIKSSSREEEREKPITVPGFXVDXSGQDKYNTPKYLVVRFSNKDIVAQIISASIAGDLVLATAYSHELPRYGLEVGLTNYAAAYCTGLLLARRVLKTLEMDEEYEGNVEATGEDYSVEPAESRRPFRALLDVGLVRTTTGNRVFGALKGALDGGLDIPHSDKRFAGFDKEKKEXLDAEVHRKYVFGGHVAAYMKILAEDEPEKYQSHFSEYIKRGIEADGIEALYKKVHAAIRADPTLRKSDKQPPKEHKRYNMKKLTYEERKAKLVARVAAINSAADNDEDDEXKFIAGCCLIAAQVETMLFACTVYFLCPKFGYFLELRALFLVNFVLSLN

SEQ ID NO: 3919 - protein, 290 aa, Glycine max
  unsure (1)..(290): unsure at all Xaa locations
XFIILFMXXWYGIXMIKYAFPVSVNLDLFTXSNKDIVAQIISASIAGDIVLAAAYAHELPRYGLEVGLTNYAAAYCTGLLLARRVLKTLEMDEEYEGNVEATGEDYSVEPAESRRXPFRALLDVGLIRTTTGNXRVFGAXLKGALDGGLDIPHSDKRFAGFDKEKKELDAEVHRKYVFGGHVAAYMKILAEDEPEKYQSHFSEYIKRGIEADGIEALYKKVHAAIRADPTLKKSDKQLPKEHKRYNLKKLTYEERKAKLIARVASLNSAADNDEDDEXKFIEDSVSSLHN

SEQ ID NO: 3920 - protein, 183 aa, Glycine max
MGFIKIVKNKAYFKRYQVQFRRRRECKTDYYARKRLIIQDKNKYKTPKYRLVVRVTNRDIITQIVAADINHDVVLASAYAHELPRYGIKLGLTNYAAAYATGLLLARRVNDKFKLKYEGNTEVNGEDYNVEADEEGAKPFKALLDVGLARTTSGARVFGALKGATDGGLDVPHNDHRFPGSKR

SEQ ID NO: 3921 - protein, 178 aa, Glycine max
  unsure (1)..(178): unsure at all Xaa locations
MAFVKVYKTRAYFKRYQTRFRRRREGKTDYHARKALIIQDKNKYNTPKYRLVARVTCSRVIAQVIYATIQGDRIVAAADFRELKRYGLEAGLTNYAACYATGLLVARRLLNKTGLDKVYTGAKKTDGEDYDVVNDHKGTEKRPFKAVXDAGLIRTTTGNRVFGVLKGACDGGLNVPHS

SEQ ID NO: 3922 - protein, 133 aa, Glycine max
MVFVKPSKSNAYFKRYQVKFRRRRDGKTDYRARIRLINQDKNKYNTPKYRFVVRFTNKDIVAQIVSASIAGDIVKASAYAHELPQYGLTVGLTNYAAAYCTGLLLARRVLKMLEMDEEYEGNLEATGEDFSVE

SEQ ID NO: 3923 - protein, 161 aa, Glycine max
  unsure (1)..(161): unsure at all Xaa locations
IIPCPSARPPAPAAAAASFRRSSLPAGAMVYIKNQKTRAYSKRFQVKFKRRRQGKTDYRARLRLTNQDKNKYNTPKYRFVVRFTNKDVTAQIVYATIAGDIVMAAAYSHELPRYGLEVGLTNYAAAYCTGLLLARRVLKNRDLDEEYEGXVEATGEDFSVX

SEQ ID NO: 3924 - protein, 160 aa, Glycine max
  unsure (1)..(160): unsure at all Xaa locations
AVLNPPLSHFSTPLPPQEKPPPPPPQQQQASEMVFVKNQKTRAYSKRFQVKFKRRRQGKTDYRARLRLTNQDKNKYNTPKYRFVVRFTNKDVTAQIVYATIAGDIVMAAAYSHELPRYGLEVGLTNYAAAYCTGLLLARRVLKCRDLDQEYEGNDVEATX

SEQ ID NO: 3925 - protein, 193 aa, Glycine max
  unsure (1)..(193): unsure at all Xaa locations
XEGNVEATGEDYSVEPAESRRPFRALLDVGLIRTTTGNRVFGALKGALDGGLDIPHSDKRFAGFDKEKKELDAEVHRKYVFGGHVAAYMKILAEDEPEKYQSHFSEYIKRGIEADGIEALYKKVHAAIRADPSLKKSEKQPPKEHKRYNLKKLTYEERKAKLIARVAAINSAADNDEDDEXKFIADSMSSLHN

SEQ ID NO: 3926 - protein, 126 aa, Glycine max
  unsure (1)..(126): unsure at all Xaa locations
MPFVKVLKNKAYFKRYQVKYRRRREGKTDYRARKRLITQDKNKYNSPKYRLVVRITNTKVICQIAYAEIDGDKILAQATSAELPRYGLTVGLKNYAAAYATGLLVGRRVLQKLGLDEDYEXNTEVD

SEQ ID NO: 3927 - protein, 149 aa, Glycine max
  unsure (1)..(149): unsure at all Xaa locations
XVKTHKTKAYXKRYQVKVKRRREGKTDYRAKIRLLTXDKNRYNTPKYRSVGRFSDKDIAAHIITASIAGDIVPAAAXAHELPRYGLEVRLTNDAAAYCTGLLLARRVLTTLETDEDDEANVEATGEDYSEEPAESRTTFRAILDVGLIR

SEQ ID NO: 3928 - protein, 155 aa, Glycine max
  unsure (1)..(155): unsure at all Xaa locations
RVFGALKGALDGGLDIPHSDKRFAGFDKEKKELDAEVHRKYVFGGHVAAYMKILAEDEPEKYQSHFSEYIKRGIEADGIEALYKKVHAAIRADPTLKKSDKQLPKEHKRYNLKKLTYEERKAKLIARVASLNSAADNDEDDEXKFIEDSVSSLHN

SEQ ID NO: 3929 - protein, 125 aa, Glycine max
  unsure (1)..(125): unsure at all Xaa locations
XHASDQVKFKRRREGKTDYRARIRLINQDKNKYNTPKYRFVVRFSNKDIVAQIISASIAXLTNYAAAYCTGLLLARRVLKTLEMDEEYEGNVEATGEDYSVEPAESRRPFRALLDVGLVRTTTGX

SEQ ID NO: 3930 - protein, 142 aa, Glycine max
  unsure (1)..(142): unsure at all Xaa locations
TRFGALKGALDGGLDIPHNDKRFAGFDKEKKELDVEVHRKYVFGGHVAAYMKILAEDEPEKYQSHFSEYIKRGIEXGIEALYKKVHAAIRADPTLKKSDKQPPKEHKRYNLKKLTYEDRKAKFISRVAALNSSVADNDEDDK

SEQ ID NO: 3931 - protein, 117 aa, Glycine max
  unsure (1)..(117): unsure at all Xaa locations
MVYVKAQKSKAYFKRYQVKFKRRREGKTDYRARIRLINQDMNKYNTPKYRFVVRFSNTDIYAQIIFASIAGDLVFATAYSHVLPRYGFEVSXLQNFAIAXYCTCFPLARMCLKTLXX

SEQ ID NO: 3932 - protein, 89 aa, Glycine max
  unsure (1)..(89): unsure at all Xaa locations
MVYVKAQKSKACFKRYRVKFKRRRQGKTDYRARIRLINQDKNEYNTPKYRFVVRFSNKDVVAQMISASVAGDIVLAAAYAHELPQYGLX

SEQ ID NO: 3933 - protein, 157 aa, Glycine max
  unsure (1)..(157): unsure at all Xaa locations
GNVEATGEDYSVEPAESRRPFRALLDVGLVRTTTGNRVFGALKGALDVFGGHVAAYMKILAEDEPEKYQSHFSEYIKRGIEADGIEALYKKVHAAIRADPTLRKSDKEPPKEHKRYNMKKLTYEERKAKLIARVAAINSAADSDEDDEXKFIADAVP

SEQ ID NO: 3934 - protein, 91 aa, Glycine max
  unsure (1)..(91): unsure at all Xaa locations
XVLAAAYAHELPRYGITLGLTNYAAAYATGLLLARRVLTKLNLADKYKGXSVNVTGEDYNVEEIDDAPRPFLALLDVGLRRTPPGCRVFAA

SEQ ID NO: 3935 - protein, 114 aa, Glycine max
  unsure (1)..(114): unsure at all Xaa locations
PTRPRASAIVYFNVHKSKAYFSIXQVLFKTIREGKTDYRARIRLINHDMNKYNTPKYRFVVRFNNNDIVAQIISAIIASYLLLATSYSHELSRYGLELXLTNYASSYCTCLLMA

SEQ ID NO: 3936 - protein, 106 aa, Glycine max
  unsure (1)..(106): unsure at all Xaa locations
MAYVMAQKSXAFFMRSQVKFKRRREGKTYYPPTIRLIHQDKNIYNTPQYRFVDRSINMDIVAQIISASIAGDLDVAASYAHELAHYGLDSWLTNYAADHCTGLLLA

SEQ ID NO: 3937 - protein, 92 aa, Glycine max
  unsure (1)..(92): unsure at all Xaa locations
MVYVKAQKSKAYFKRYQVKFKRRREGKTDYRARIRLINQDKNKYNTPKYRFVVRFSNKDIVAQIISASIAGDIVLAAALNSAAPXDNDEDDE

SEQ ID NO: 3938 - protein, 92 aa, Glycine max
  unsure (1)..(92): unsure at all Xaa locations
SFLVLVLAXXSSDXFKIYLVKFTXRRREGKTDYRARIRLINQEKNKYNPPKYRFVVRFSNKDIVAQIISASIAGDIVLAAAYAHELPRYGLX

SEQ ID NO: 3939 - protein, 92 aa, Glycine max
  unsure (1)..(92): unsure at all Xaa locations
MVYDKAQTSEAYLKSYQVXLQIRREGKTDYRAKIRLINQDKNKYNTPKYRFVVRFSNKDIVAQIISASIAGDLVHATAXSHELSRYGLEVGX

SEQ ID NO: 3940 - protein, 83 aa, Glycine max
  unsure (1)..(83): unsure at all Xaa locations
MVYVKGQRSKAXFKRYQVKFERRREGKTDYRARTRVINQDKNKYNTPEYRFVVRFSYKDIVARIISASIAGDLVLATAYAHEL

SEQ ID NO: 3941 - protein, 111 aa, Glycine max
ASARPTTASSMAYVKAHKSKSYGKIYEVIITIRRQVKTDYPAKIRLINHDNNTYNTPKYRFVVRFNNNDIDAQIISASIASDLVLATSYSHELPRYCLQLRLTNYATTYCT

SEQ ID NO: 3942 - protein, 88 aa, Glycine max
  unsure (1)..(88): unsure at all Xaa locations
MVYVKAQKSKAYFKRYRVKFKRRREGKTDYRARIRLXNQDKNRYNTPKYRFVGXXSNEXIVAQXISXSLAGDXSLATXYSHEXPRYXX

SEQ ID NO: 3943 - protein, 81 aa, Glycine max
  unsure (1)..(81): unsure at all Xaa locations
MVYVKAQKSKAYFKRYQVKFKRRREGKTDYRARIRLINHDKNIYNTSKYRFVVRFSNKDIVAQILFSSIACDIVLCXAYAH

SEQ ID NO: 3944 - protein, 140 aa, Glycine max
  unsure (1)..(140): unsure at all Xaa locations
SPFLALGSVKAQKSKAYVMRYQVNSRRSRSGKTNYRALIRSINLVKNKDFTPKDRYVVRLXSSRTMLQQIISASIDGDIWLATAYLHEPSRYGLVLGLTYYAITYCSALLFARRVLNSLAMDVEYLGNVADSVEDYFIEP

SEQ ID NO: 3945 - protein, 122 aa, Glycine max
  unsure (1)..(122): unsure at all Xaa locations
RRYVGYDDEANKLNADVLRKYIFGGHVADYMKLLAEQDNEKFSKVFSRYVKAGVKAEGLEALYKKAHAAIRADPSIKKAERKPPKHSSKKAQRLNNKQRKNAVKVRVPRANKASAQEXAKVI

SEQ ID NO: 3946 - protein, 81 aa, Glycine max
  unsure (1)..(81): unsure at all Xaa locations
MSSFTAAMVYVKEKXSKAYFKRYQVKFNRRREGKTDYRARIRLINQDKNRYRTPKYRFVVRFSNKDIVAPIMSASIAGDIX

SEQ ID NO: 3947 - protein, 105 aa, Glycine max
  unsure (1)..(105): unsure at all Xaa locations
EEIQQQWCTSRLQKSKXYFKSYQVKFKRXREGKXGYRARXIRLINQXKNKYNXXPKYRFXVRFSNKDIVAQIXSASIAGDLVLATAYSXHELPXRXGLAVGXTDX

SEQ ID NO: 3948 - protein, 71 aa, Glycine max
  unsure (1)..(71): unsure at all Xaa locations
MVYVKAHKSKAYVKRYQVEFKRRXDGXTDYRARMRLINQDKFKYNTPKYRFVVRFSNKDIVALILSASIAG

SEQ ID NO: 3949 - protein, 81 aa, Glycine max
  unsure (1)..(81): unsure at all Xaa locations
MVYVXKAQKSKAYFKRYQVXKFKRRREGKTDYRARIRLINQDKNKYNTPKYRFVVRXSNKDLLTQIISAXXXGDLFCCSXX

SEQ ID NO: 3950 - protein, 80 aa, Glycine max
  unsure (1)..(80): unsure at all Xaa locations
RASAIVYDKAQKSTXAYFKRYQVKFKSRREGXTDYRARTRLXINQDKNKYNTPKYRFAVRFSNKDIDAQIISASIAGDLV

SEQ ID NO: 3951 - protein, 62 aa, Glycine max
MVYVKAQKSKAYFKRYQVKFKRRREGKTDYRARIRLINQDKNKYNTPKYRFVVRFFNKNNFV

SEQ ID NO: 3952 - protein, 126 aa, Glycine max
  unsure (1)..(126): unsure at all Xaa locations
ASSHDLARHGFEGXLTDFATASCSGLLFALRVLTTLETDDAYERNVEASAQVYSMVPALSKMPFRSLLDVGLSQTTTRTRFFTALKGAPGGSLDISYTDHWFARSDLDPKGLAAKGKLICFFFRHV

SEQ ID NO: 3953 - protein, 123 aa, Glycine max
  unsure (1)..(123): unsure at all Xaa locations
NKRFAGFDKKKKELHAEVHRKYVCGAHVAAYMKISAQDDPEQYQSHFREYITRGIXDDGVQALAQEVHDTIRDDRTLRKFDNEPPKEHKRYNMKQLTYQESKPQXIARVAAIDFVVDSDEDDX

SEQ ID NO: 3954 - protein, 70 aa, Glycine max
AQKSEAYFMRYRGQFHIRREGWTDYRARIGLINLDKNKYGTPIYRFVGGFSNKDIVAQKISANIAGDLDL

SEQ ID NO: 3955 - protein, 77 aa, Glycine max
  unsure (1)..(77): unsure at all Xaa locations
XKWGRTIEGXTDYRARIXSLINQDMNKCITPKFRFVVRFSNKDIDVQLISANIARHLDLATAYSHELSRYCLEVRLX

SEQ ID NO: 3956 - protein, 279 aa, Pisum sativum
MSRREEEVRLITEPGFVDSTGQDKYNFPSIVCCRFTNKDIVAQIVSASIAGDIVLCAAYAHELPHYGLEVGLTNYAAAYCTGLLLARRVLKTLEMDEEYEGNVEASGEDYSVEPADSRRPFRALLDVGLVKTTTGNRVFGALKGALDGGLDIPHSDKRFAGFDKEKKELDAEVHRKYIFGGHVTAYMKTLIEDEPEKYQTHFSQYIKKGIEADGIEELYKKVHAAIRADPANKKAEKQPPKEHKRYNLKKLTYDERRTKLIARLEALNSAVDEDEDDDE

SEQ ID NO: 3957 - protein, 301 aa, Oryza sativa (japonica cultivar-group)
MGGFVKTQKTNAYHKRFQVKFKRRRQGKTDYRARIRLTNQDKNKYNTPKYRFVTNKDITAQIVYATIAGDIVMAAAYSHELPRYGLEVGLTNYAAAYCTGLLLARRVLKLRGLDQEYEGNIEATGEDYYVEPADERRPFRALLDVGLIRTTTGNRVFGALKGALDGGLDIPHSDKRFAGFKKDEKQLDSDIHRKYIYGGHVADYMRSMAEEEPEKFQAHFSEYLKKGIDADGMEALYKKVHAAIRADPTMAKSTKKEPATHKRYNLKKLTYEQRKASLVERLNALNSSAGADDDDEEEDDE

SEQ ID NO: 3958 - protein, 304 aa, Oryza sativa (japonica cultivar-group)
MSLQGGFVKTQKTHAYFKRFQVKFKRRRQGKTDYRARIRLTNQDKNKYNTPKYRFVTNKDITAQIVYATIAGDIVMAAAYSHELPRYGLEVGLTNYAAAYCTGLLLARRVLTLRGLDQEYEGNVEATGEDYYVEPADERRPFRALLDVGLIRTTTGNRVFGALKGALDGGLDIPHSDKRFAGFKKDEKQLDSDIHRKYIYGGHVADYMRSMAEEEPEKFQAHFSEYLKKGIDADGMESLYKKVHAAIRADPTMAKSTKKEPATHKRYNLKKLTYEQRKASLVERLNALNSSAGADDDDEEEDDE

SEQ ID NO: 3959 - protein, 121 aa, Solanum melongena
SSKDSKQLDAEVHRKYIYGGHVAAYMNILMEDEPEKYQSHFSSYIKADLAPDNIEEMYKKVHAAIRPDPSPKKSQKQPPKTHKRYNLKKLTYEERKAKLIERLNALNAAGGNDDDDEEDDE

SEQ ID NO: 3960 - protein, 297 aa, Helianthus annuus
MGFVKVVKNKQYFKRYQVKFKRRREGKTDYFARKRLIAQDKNKYNTPKYRLVVRFSNRDITCQVAYSRIEGDKILCAAYAHELPQYGVKVGLTNYAAAYCTGLLLARKLLSQLGLDKLYIGSTEVTGEEFNVKPVEDGPGAFRCYLDVGLMRTTTGARVFGAMKGAVDGGLNILHSTKRFPGFDSESKEFNADVHRQHIFGQHVAEYMRQLAEEDDEAYKRQFSQYIKLGLNADAIEGLYKKAHEAIRANPARKTVAKKAHPKKRWTEKKLTREQRQGKVAAAKAEWLKKIEAGEVE

SEQ ID NO: 3961 - protein, 304 aa, Oryza sativa
MGGFVKTQKTHAYFKRFQVKFKRRRQGKTDYRARIRLTNQDKNKYNTPKYRFVVRFTNKDITAQIVYATIAGDIVMAAAYSHELPRYGLEVGLTNYAAAYCTGLLLARRVLTLRGLDQEYEGNVEATGEDYYVEPADERRPFRALLDVGLIRTTTGNRVFGALKGALDGGLDIPHSDKRFAGFKKDEKQLDSDIHRKYIYGGHVADYMRSMAEEEPEKFQAHFSEYLKKGIDADGMESLYKKVHAAIRADPTMAKSTKKEPATHKRYNLKKLTYEQRKASLVERLNALNSSAGADDDDEEEDDE

SEQ ID NO: 3962 - protein, 304 aa, Oryza sativa; identical to SEQ ID NO: 3961

SEQ ID NO: 3963 - protein, 304 aa, Oryza sativa
MGGFVKTQKTNAYYKRFQVKFKRRRQGKTDYRARIRLTNQDKNKYNTPKYRFVVRFTNKDITAQIVYATIAGDIVMAAAYSHELPRYGLEVGLTNYAAAYCTGLLLARRVLKLRGLDQEYEGNIEATGEDYYVEPADERRPFRALLDVGLIRTTTGNRVFGALKGALDGGLDIPHSDKRFAGFKKDEKQLDSDIHRKYIYGGHVADYMRSMAEEEPEKFQAHFSEYLKKGIDADGMEALYKKVHAAIRADPYHAKSTKKEPATHKRYNLKKLTYEQRKASLVERLNALNSSAGADDDDEEEDDE

SEQ ID NO: 3964 - protein, 294 aa, Oryza sativa
MGGFVKTQKTNAYYKRFQVKFKRRRQGKTDYRARIRLTNQDKNKYNTPKYRFVVRFTNKDITAQIVYATIAGDIVMAAAYSHELPRYGLEVGLTNYAAAYCTGLLLARRVLKLRGLDQEYEGNIEATGEDYYVEPADERRPFRALLDVGLIRTTTGNRVFGALKGALDGGLDIPHSDKRFAGFKKDEKQLDSDIHRKYIYGGHVADYMRSMAEEEPEKFQAHFSEYLKKGIDADGMEALYKKVHAAIRADPYHGQINQEGTGDPQEIQPQEANLRTEEGQSCRKIECSQLLCWC

SEQ ID NO: 3965 - protein, 294 aa, Oryza sativa; identical to SEQ ID NO: 3964

SEQ ID NO: 3966 - protein, 233 aa, Oryza sativa
  unsure (1)..(233): unsure at all Xaa locations
DLSPLLVPLRAAAAEGEQPRQANDTGGXDKTQRTNAYHKRYRAQLKRRRHGKTDYRTSTKLTIRDNIIVNTPRFRFAVRFTHQDITAHMGYATIAGDMGMAGAYFHELSRXYGLEAGLTNYAAAYCTGLALARRVLKLLGXDQEFKGYMDAAGEDYXVEPADERRTFRALLDGGLIKTATGHRVFGALTGATDGGLDISHSDKRDAGFKMDEKQLDVCFHRMNIYSGHVADYX

SEQ ID NO: 3967 - protein, 152 aa, Oryza sativa
  unsure (1)..(152): unsure at all Xaa locations
MTFVKVIENEAFFKRYQVKFRRRREGKTDYRARKRLIAQDKNKYNSPKYRLVVRLTNKFVICQIAYAEIDGDKILASAYSSELPRYGLNVGLKNYAAAYCTGLLVGRRLLQKLGLDQDYEGNTEINGEVVKTEXSMVAHTSSMKLLMINVHS

SEQ ID NO: 3968 - protein, 121 aa, Oryza sativa
  unsure (1)..(121): unsure at all Xaa locations
XLIFQDKNKYNTXGGLFVVRCTIKDITGQIISASIAGDMDLASAYSHELPRYGLEAGLTNYAAAYCTGLLLARRVLKIRGSDQEYKGNVEATGEDFFVEPAYERRPFRALLDVGLIRTTTX

SEQ ID NO: 3969 - protein, 104 aa, Oryza sativa
  unsure (1)..(104): unsure at all Xaa locations
MGRFATTXKTHAYFKRLHSKFKRXRRQGTTDYRAXRIRLSNQDKNKANTPAYRFVARCTHKDLTFEIVYATIEDDIVMAAAYCHEQPRYGLEVGLTNYARAYCT

SEQ ID NO: 3970 - protein, 118 aa, Oryza sativa
  unsure (1)..(118): unsure at all Xaa locations
MDGGLDIPHSDKRFAGFKKDEKQLDSDIHRKYIYGGHVADYMRGIDADGMESLYKKVHAAIRADPTMGQSTKKEPATHRRYNLQKLTYEQRKASLVERLNALNSSACADDDDXEEDDX

SEQ ID NO: 3971 - protein, 210 aa, Oryza sativa
  unsure (1)..(210): unsure at all Xaa locations
GXXWVPPRXAGRDNPNSFLVTPSSFYSLLPLRRRRSGVSTYCERHGSGAERHSMTTAYFMRWQFIAEERGMAPTDYXRPAVWLTNXHDKNNRRSSKDRFFARFTDLAYPSEIVYATIAADIEXMTDGYSYELALYGLEVLLTIYADTYCTDLLVARRELTLSASNHYDEGSAEATGEDYYAAPADERMTLRALLHGSLTMTTTVNRVFGX

SEQ ID NO: 3972 - protein, 165 aa, Oryza sativa
  unsure (1)..(165): unsure at all Xaa locations
MTRACLTRFTHAYFKRLQGKIDNRTRIMIAYRGRIRLTNQDNSLDDTPTYRYVXERFTDYAITAHVVYAAVAYVLELAGAYSHELPTYCAEADRTDYASXAYCAVSLLARHQLSLRGVDHNCEDYDDAPADDYYAVPAVXRRALRATSTVGLVFTATENPVFGAL

SEQ ID NO: 3973 - protein, 85 aa, Oryza sativa
MGGFVKTQKTHAYFKRFQVKFKRRRQGKTDYRARIRLPNQDKNKYNTPKYRFDGRSESRTLTSNQGLQESALGREGGGRPPRQEP

SEQ ID NO: 3974 - protein, 306 aa, Triticum aestivum
ANTVKMPFKLVKNSAYYSRYQTKYKRRQQGKTDYYARKRLITQAKNKYNAPKYRLVVRFTNKDIICQIVTSEISGDKVFISAYAHELKAYGIEHGLTNWAAAYATGLLVARRALKKLGLDEDFAGVEEADGEYKLTEAAETDDGERRPFKVFLDVGLKRTSTGARVFGAMKGASDGGILVPHSEKRFPGYDMETKELDADTLRNYIFGGHVAEYMETLADDDEERFRSQFQKYVDDDVEAEGLEDLYTEAHAAIREDPFKKVESDAPKKTKEEWKEISQKYKSKKLTKEEKEKRVQERIQEIMQRD

SEQ ID NO: 3975 - protein, 318 aa, Triticum aestivum
  unsure (1)..(318): unsure at all Xaa locations
ANTVKMPFKLVKNSAYYSRYQTKYKRRQQGKTDYYARKRLITQAKNKYNAPKYRLVVRFTNKDIICQIVTSEISGDKVFISAYAHELKAYGIEHGLTNWAAAYATGLLVARRALKKLGLDEDFAGVEEADGEYKLTEAAETDDGERRPFKVFLDVGLKRTSTGARVFGAMKGASDGGILVPHSEKRFPGYDMETKELDADTLRNYIFGGHVAEYMETLADDDEERFRSQFQKYVDDDVEAEGLEDLYTEAHAAIREDPFXKVESDAPRRXRVQERIQEIMQRDXKVALSHWVTGIXGLLAFALGLEFRGKGRSIKRAI

SEQ ID NO: 3976 - protein, 317 aa, Triticum aestivum
  unsure (1)..(317): unsure at all Xaa locations
KPPPPPQQQQQASEMVFVKNQKTRAYSKRFQVKFKRRRQGKTDYRARLRLTNQDKNKYNTPKYRFVVRFTNKDVTAQIVYATIAGDIVMAAAYSHELPRYGLEVGLTNYAAAYCTGLLLARRVLKCRDLDQEYEGNVEATGEDFSVEPADERRPFRALLDVGLIRTTTGNRVFGALKGALDGGLDIPHSDKRFAGFKKDEKQLDAEIHRKYIYGGHVADYMKSLADEEPEKYQSHFSEYIKKGIEADNMESLYKKVHAAIRADPTMAKSTKEPPKTHKRYNPKKLTYEQRKANLVERLNALNSSAGADDDEDDDEXV

SEQ ID NO: 3977 - protein, 357 aa, Triticum aestivum
  unsure (1)..(357): unsure at all Xaa locations
THVPQQTLAATPKSSRGLCPDAVLNPPLSHFSTPLPPQEKPPPPPPQQQQQASEMVFVKNQKTRAYSKRFQVKFKRRRQGKTDYRARLRLTNQDKNKYNTPKYRFVVRFTNKDVTAQIVYATIAGDIVMAAAYSHELPRYGLEVGLTNYAAAYCTGLLLARRVLKCRDLDQEYEGNVEATGEDFSVEPADERRPFRALLDVGLIRTTTGNRVFGALKGALDGGLDIPHSDKRFAGFKKDEKQLDAEIHRKYIYGGHVADYMKSLADEEPEKYQSHFSEYIKKGIEADNMEALYKKVHAAIRADPTMAKSTKEPPKTHKRYNPKKLTYEQRKASLVERLNALNSSAGADVDEDDDEXV

SEQ ID NO: 3978 - protein, 355 aa, Triticum aestivum
  unsure (1)..(355): unsure at all Xaa locations
WIPRAAGIRHEARAAAASSIRRSSLLAGAMVYIKNQKTRAYSKRFQVKFKRRRQGKTDYRARLRLTNQDKNKYNTPKYRFVVRFTNKDVTAQIVYATIAGDIVMAAAYSHELPRYGLEVGLTNYAAAYCTGLLLARRVLKNRDLDEEYEGNVEATGEDFSVEPSDERRPFRALLDVGLIRTTTGNRVFGALKGALDGGLDIPHSDKRFAGFKKDEKSLDAEIHRKYIFGGHVADYMRSLADEEPEKFQTHFSEYIKRGISADDMEAVYKKVHAAIRADPTMAKSTKAPPKTHKRYNPKKLTYEQRKASLVERLNALNNSAGAADDDEDDDEXRALCPPQCSLATCVFVKVRHSAQ

SEQ ID NO: 3979 - protein, 387 aa, Triticum aestivum
  unsure (1)..(387): unsure at all Xaa locations
RNSARGPPARAAAASFRRSSLPAGAMVYIKNQKTRAYSKRFQVKFKRRRQGKTDYRARLRLTNQDKNKYNTPKYRFVVRFTNKDVTAQIVYATIAGDIVMAAAYSHELPRYGLEVGLTNYAAAYCTGLLLARRVLKNRDLDEEYEGNVEATGEDFSVEPSDERRPFRALLDVGLIRTTTGNRVFGALKGALDGGLDIPHSDKRFAGFKKDEKSLDAEIHRKYIFGGHVADYMRSLADEEPEKFQTHFSEYIKRGISADDMEAVYKKVHAAIRADPTMAKSTKAPPKTHKRYNPKKLTYEQRKASLVERLNALNNSAGAADDDEDDDEXNALLLVSGTLHNGPVPLSFGYYLAGVIDCVIWIMCRAGIWILILIRSSAKKKKKKKKQK

SEQ ID NO: 3980 - protein, 413 aa, Triticum aestivum
  unsure (1)..(413): unsure at all Xaa locations
SSSDRSPARAAAAASFRRSSLPAGAMVYIKNQKTRAYSKRFQVKFKRRRQGKTDYRARLRLTNQDKNKYNTPKYRFVVRFTNKDVTAQIVYATIAGDIVMAAAYSHELPRYGLEVGLTNYAAAYCTGLLLARRVLKNRDLDEEYEGNVEATGEDFSVEPSDERRPFRALLDVGLIRTTTGNRVFGALKGALDGGLDIPHSDKRFAGFKKDEKSLDAEIHRKYIFGGHVADYMRSLADEEPEKFQTHFSEYIKRGISADDMEAVYKKVHAAIRADPTMAKSTKAPPKTHKRYNPKKLTYEQRKASLVERLNALNNSAGAADDDEDDDEXNAFLLKSGTLHNGPVPLSFGYYLAGVIDCVIGIMCRAGIWILILIRSSGTLVLFLWLCRAGVGPWVMALKLLSFHRIPNQCRNRF

SEQ ID NO: 3981 - protein, 339 aa, Triticum aestivum
  unsure (1)..(339): unsure at all Xaa locations
RAAGTRRAPEGPWTLHQRGEHLRRRSQPGSLLAGEMVYIKNQKTRAYSKRFQVKFKRRRQGKTDYRARLRLTNQDKNKYNTPKYRFVVRFTNKDVTAQIVYATIAGDIVMAAAYSHELPRYGLEVGLTNYAAAYCTGLLLARRVLKNRDLDEEYEGNVEATGEDFSVEPSDERRPFRALLDVGLIRTTTGNRVFGALKGALDGGLDIPHSDKRFAGFKKDEKSLDAEIHRKYIFGGHVADYMRSLADEEPEKFQTHFSEYIKKGXISADDMEAVYKKVHAAIRADPTMAKSTKAPPKTHKRYNPKKLTYEQRKASLVERLNALNNSAGARXDDDEEDDE

SEQ ID NO: 3982 - protein, 338 aa, Triticum aestivum
  unsure (1)..(338): unsure at all Xaa locations
PAGSGALPPAPPPPPPSAGSSLLAGAMVYIKNQKTRAYSKRFQVKFKRRRQGKTDYRARLRLTNQDKNKYNTPKYRFVVRFTNKDVTAQIVYATIAGDIVMAXAAYSHELPRYGLEVGLTNYAAAYCTGLLLARRVLKNRDLDEEYEGNVEATGEDFSVEPSDERRPFRALLDVGLIRTTTGNRVFGALKGALDGGLDIPHSDKRFAGFKKDEKSLDAEIHRKYIFGGHVADYMRSLADEEPEKFQTHFSEYIKRGISADDMEAVYKKVHAAIRADPTMAKSTKAPPKTHKRYNPKKLTYEQRKASLVERLNALNNSAGAADDDEDDDEXRALLSTPV

SEQ ID NO: 3983 - protein, 326 aa, Triticum aestivum
  unsure (1)..(326): unsure at all Xaa locations
PLLPPLPRQEKPPPPHPQQASEMVFVKNQKTRAYSKRFQVKFKRRRQGKTDYRARLRLTNQDKNKYNTPKYRFVVRFTNKDVTAQIVYATIAGDIVMAAAYSHELPRYGLEVGLTNYAAAYCTGLLLARRVLKCRDLDQEYEGNVEATGEDFSVEPADERRPFRALLDVGLIRTTTGNRVFGAXLKGALDGGLDIPHSDKRFAGFKKDEKQLDAEIHRKYIYGGHVADYMKSLADEEPEKYQSHFSEYIKKGIEIDDMEALYKKVHAAIRADPTVAKSTKEPPKTHKRYNPKKLTYEQRKASLVERLNALNSSAGADVDEDDDEXV

SEQ ID NO: 3984 - protein, 350 aa, Triticum aestivum
  unsure (1)..(350): unsure at all Xaa locations
VRRNSKSLRNDAVLNPPFSHFSTPLPRQEKPPPPHPQQPHPQQASEMVFVKNQKTRAYSKRFQVKFKRRRQGKTDYRARLRLTNQDKNKYNTPKYRFVVRFTNKDVTAQIVYATIAGDIVMAAAYSHELPRYGLEVGLTNYAAAYCTGLLLARRVLKCRDLDQEYEGNVEATGEDFSVEPADERRPFRALLDVGLIRTTTGNRVFGSLRGALDGGLDIPHSDKRFAGFKKDEKQLDAEIHRKYIYGGXHVADYMKSLADEEPEKYQSHFSEYIKKGIEADNMEALYKKVHAAIRADPTMAKSTKEPPKTHKRYNPKKLTYEQRKASLVERLNALNSSAGADVDEDDDEXV

SEQ ID NO: 3985 - protein, 274 aa, Triticum aestivum
  unsure (1)..(274): unsure at all Xaa locations
PAPAAAAASFRRSSLLAGEMVYIKNQKTRAYSKRFQVKFKRRRQGKTDYRARLRLTNQDKNKYNTPKYRFVVRFTNKDVTAQIVYATIAGDIVMAAAYSHELPRYGLEVGLTNYAAAYCTGLLLARRVLKNRDLDEEYEGNVEATGEDFSVEPSDERRPFRALLDVGLIRTTLXKRXVGALKGALDGGLDIPHSDKRFAGFKKDEKALDAEIHRKYIFGGHVADYMKSLAEEETEKIQTHFKENIKKGNFGDDLEQVTRKVMAASXADPPGANX

SEQ ID NO: 3986 - protein, 216 aa, Triticum aestivum
MAGGFVKTQKTNAYFKRFQVKFKRRRAGKTDYRARIRLINQDKNKYNTPKYRFVVRFTNKDITAQIVSASIAGDMVLAAAYSHELPRYGLEVGLTNYAAAYCTGLLLARRVLKIRDLDQEYEGNVEATGEDFSVEPAEGRRPFRALLDVGLIRTTTGNRVFGALKGALDGGLDIPHSDKRFAGFKKDDKQLDADIHRKYIYGLHVAEYMKNLADEE

SEQ ID NO: 3987 - protein, 196 aa, Triticum aestivum
  unsure (1)..(196): unsure at all Xaa locations
SKTHFSTPLPRQEKPPPPHPQQASEMVFVKNQKTRAYSKRFQVKFKRRRQGKTDYRARLRLTNQDKNKYNTPKYRFVVRFTNKDVTAQIVYATIAGDIVMAAAYSHELPRYGLEVGLTNYAAAYCTGLLLARRVLKCRDLDQEYEGNVEATGEDFSVEPADERRPFRALLDVGLIRTTTGNRVFGSSRGALDGGLX

SEQ ID NO: 3988 - protein, 213 aa, Triticum aestivum
  unsure (1)..(213): unsure at all Xaa locations
XXXXLXXXXASSKLTLTKGNKSWSSTAVAAALELVDPPGCRNSARGLTNQDKNKYNTPKYRFVVRFTNKDVTAQIVYATIAGDIVMAAAYSHELPRYGLEVGLTNYAAAYCTGLLLARRVLKNRDLDEEYEGNVEATGEDFSVEPSDERRPFRALLDVGLIRTTTGNRVFGALKGALDGGLDIPHSDKRFAGFKKDEKSLDAEIHRKYIFGGX

SEQ ID NO: 3989 - protein, 185 aa, Triticum aestivum
  unsure (1)..(185): unsure at all Xaa locations
ANTVKMPFKLVKNSAYYSRYQTKYKRRQQGKTDYYARKRLITQAKNKYNAPKYRLVVRFTNKDIICQIVISEISGDKVFISAYAHELKAYGIEHGLTNWAAAYATGLLVARRALKKLGLDEDFAGVEEADGEYKLTEAAETDDGERRDHAAGLKXVALSHWVTGIXRIVGLCIGLAVSRKGTVHK

SEQ ID NO: 3990 - protein, 185 aa, Triticum aestivum
  unsure (1)..(185): unsure at all Xaa locations
VKFITLREGKTDYEARKRLVIQDKNKYYTPKYRMIVRVTDRHIICQIAYARIEGDIIVCAAYAHELPKYGVKVGLTNYAAAYCTGLLLARRLINRFGMDNIYEGQVEVTGDEYNVESIDGQPGAFTCYLDAGLAITTTGNKVFGALNGAEDGCLSIPHSTKRFRGYDSESKEFNAKVHLKHIMGX

SEQ ID NO: 3991 - protein, 143 aa, Triticum aestivum
MVFVKPSKSNAYFKRYQVKFRRRRDGKTDYRARIRLINQDKNKYNTPKYRFVVRFTNKDIVAQIVSASIAGDIVKASAYAHELPQYGLTVGLTNYAAAYCTGLLLARRVLKMLEMDEEYEGNLEATGEDFSVEPTESRRPFCA

SEQ ID NO: 3992 - protein, 113 aa, Triticum aestivum
KPPPPPQQQQQASEMVFVKNQKTRAYSKRFQVKFKRRRQGKTDYRARLRLTNQDKNKYNTPKYRFVVRFTNKDVTAQIVYATIAGDIVMAAAYSHELPRYGLEVGLTNYAAAY

SEQ ID NO: 3993 - protein, 233 aa, Triticum aestivum
  unsure (1)..(233): unsure at all Xaa locations
RLRSTPCLLPFSPLSLAKKSRRRRISTRRARWRCVNNHNTRDYSKRVQAEPQKRRQGNTDYRDRVKLTNQXXQRQNTPKHRHVTNTDVTAEIVHPTIAADIEMAXADYSHELPRXMGLSDGLTNYAXVEYCTDSLLSRRAVPCPEIYPEYEGKAEATAEDFSAEPTDETTTIRALLYASLIRTTTVNRACVALKGDVNVVHDIPQSRYRLAGFKKDEKQLHSDIPAEXIYGWH

SEQ ID NO: 3994 - protein, 142 aa, Triticum aestivum
  unsure (1)..(142): unsure at all Xaa locations
XNKVFGALKGAVDGGLFIPPRTKRFPGYDFESKEFNAEVHRKPIMGQNVADYMGYLMEEDEDVSKKQFFQYIKNRVTPDMMEEMYKKAHVAIRENPVYEKKPKKEVKKKRWTRPKMSLGQKKDGVGQKKARFLRGQEGGVES

SEQ ID NO: 3995 - protein, 108 aa, Triticum aestivum
  unsure (1)..(108): unsure at all Xaa locations
RPPTRSRPPARAVDAFSIRRSYLLAGAMVYIKNQKTRAYSKRFQVKFKRRRQGMTDYRARLRLTNQDKNKYNAPKYRFVVRFTNMDGTAQIVYATIAGDIVKAACLLX

SEQ ID NO: 3996 - protein, 99 aa, Triticum aestivum
  unsure (1)..(99): unsure at all Xaa locations
KNLLVAGAMVYIKNQKTRAFFKRFQIKFKRKRQGNTPXYTATVWLSNPGKNTYTTPKYRFFVRYTNKDVTVQQLYATISADILIGAVYSHELPLYFLEX

SEQ ID NO: 3997 - protein, 99 aa, Triticum aestivum
  unsure (1)..(99): unsure at all Xaa locations
SGPPARAVVVSFRRSSLPAGAMVYIKNHNTRAYSKRFQVKFKRRRQGKTDYRARLMLTNHYTNRYNTSKYRLGVRFSNYAVTAHCVYATIAGDTTMAGX

SEQ ID NO: 3998 - protein, 230 aa, Zea mays
  unsure (1)..(230): unsure at all Xaa locations
ANTVKMPFKLVKNSAYYSRYQTKYKRRQQGKTDYYARKRLITQAKNKYNAPKYRLVVRFTNKDIXLPIVTSEISGDKVFISAYAHELKAYGIEHGLTNWAAAYATGLLVARRALKKLGLDEDFAGVEEADGEYKLTEAAETDDGERRPFKVFLDVGLKRTSTGARXVFGAMKGASDGGILVPHSEKRFPGYDMETKELDADTLRNYIFGGHVAEYMETLADDDEERFRSQ

SEQ ID NO: 3999 - protein, 304 aa, Zea mays
  unsure (1)..(304): unsure at all Xaa locations
MGFVKLIKTKAYFKRYQVKFRRRREGKTDYRQRTRLITQDKNKYNTPKYRLVVRKTNKNIIAQIIYATVQGDRVVNAAYSSELPKFGIKLGLTNYASAYATGLLVARRHLTKIGLASKYQGKVEADGNDYTVEPAXXGPRPFKALLDIGLARTSTGARIFAVAKGALDGGINIPHSVKRFAGYNAETKKHNPEVLKKYIYGQHVAEYMKKLQKEEPQAYEKQFSRFVKAGVKAGDIEGIYKNAHKAIRADPTKKANEKKAVEHKRYNPKRLTHAQRAERVAKKKAILGLXMSFLNLQYKTYEQK

SEQ ID NO: 4000 - protein, 329 aa, Zea mays
  unsure (1)..(329): unsure at all Xaa locations
MGGFVKTQKTNAYFKRFQVKFKRRRAGKTDYRARIRLINQDKNKYNTPKYRFVVRFTNKDIIAQIVSASITGDIILAAAYSRELPRYGLEVGLTNYAAAYCTGLLLARRVLKIRDLDQEYEGNVEATGEDFSVEPAEERRPFRALLDVGLIRTTTGNRVFGALKGALDGGLDIPHSDKRFAGFKKDDKQLDADIHRKYIYGLHVAEYMKNLADEEPEKYQAHFSEYIKKGIEADDMEALYKKVHAAIRADPSMAKSTKAQPKEHKRYNPKKLTYEQRKARLVERLNALNSSGGVDDDEDDEXSAILFGDQNLRNGICCSLYSCNRHFFV

SEQ ID NO: 4001 - protein, 309 aa, Zea mays
  unsure (1)..(309): unsure at all Xaa locations
MGGFVKTHKSNAYFKRFQVKFKRRRAGKTDYRARIRLINQDKNKYNTPKYRFVVRFTNKDITAQIISASIAGDMVLASAYSHELPRYGLEVGLTNYAAAYCTGLLLARRVLKTRGLDKEYEGNVEATGEDFSVEPADERRPFRALLDVGLIRTTTGNRVFGALKGALDGGLDIPHSEKRFAGFKKDDKQLDADIHRKYIYGGHVADYMRNLAEEEPEKYQSHFSEYIKKGIEADDMEALYKKVHAAIRADPSVVKSTKQPPKEHKRYNPKKLTYEQRKASLIERLNQLNSSGGADDDDEDDEXSFVPSK

SEQ ID NO: 4002 - protein, 309 aa, Zea mays
  unsure (1)..(309): unsure at all Xaa locations
MGGFVKTHKSNAYFKRFQVKFKRRRAGKTDYRARIRLINQDKNKYNTPKYRFVVRFTNKDITAQIISASIAGDMVLASAYSHELPRYGLEVGLTNYAAAYCTGLLLARRVLKTRGLDKEYEGNVEATGEDFSVEPADERRPFRALLDVGLIRTTTGNRVFGALKGALDGGLDIPHSEKRFAGFKKDDKQLDADIHRKYIYGGHVADYMRNLAEEEPEKYQSHFSEYIKKGIEADDMEALYKKVHAAIRADPSVVKSTKQPPKEHKRYNPKKLTYEQRKASLIERLNQLNSSGGADDDDEDDEXSLVPSK

SEQ ID NO: 4003 - protein, 309 aa, Zea mays; identical to SEQ ID NO: 4001
  unsure (1)..(309): unsure at all Xaa locations

SEQ ID NO: 4004 - protein, 309 aa, Zea mays; identical to SEQ ID NO: 4002
  unsure (1)..(309): unsure at all Xaa locations

SEQ ID NO: 4005 - protein, 304 aa, Zea mays
  unsure (1)..(304): unsure at all Xaa locations
MGGFVKTHKTNAYFKRFQVKFKRRRAGKTDYRARIRLINQDKNKYNTPKYRFVVRFTNKDITAQIISASIAGDMVLASAYSHELPRYGLEVGLTNYAAAYCTGLLLARRVLKIRGLDQEYEGNVEATGEDFSVEPADERRPFRALLDVGLIRTTTGNRVFGALKGALDGGLDIPHSEKRFAGFKKDDKQLDADTHRRYIYGGHVADYMKNLAEEDPEKYQSHFSAYIKKGVEADEIEALYKKVHAAIRADPSIVKSTKQPPKEHKRYNPKKLTYEQRKASLIERLNQLNSSGGADDDDEDDEXS

SEQ ID NO: 4006 - protein, 310 aa, Zea mays
  unsure (1)..(310): unsure at all Xaa locations
PPQETEIVGFVKTHKSNAYFKRFQVKFKRRRAGKTDYRARIRLINQDXXKYNTPKYRFVVRFTNKDITAQIISASIAGDMVLASAYSHELPRYGLEVGLTNYAAAYCTGLLLARRVLKTRGLDKEYEGNVEATGEDFSVEPADERRPFRALLDVGLIRTTTGNRVFGALKGALDGGLDIPHSEKRFAGFKKDDKQLDADIHRKYIYGGHVADYMRNLAEEEPEKYQSHFSEYIKKGIEADDMEALYKKVHAAIRADPSIVKSTKQPPKEHKRYNPKKLTYEQRKASLIERLNQLNSSGGADDDDEDDEXS

SEQ ID NO: 4007 - protein, 336 aa, Zea mays
  unsure (1)..(336): unsure at all Xaa locations
MGGFVKTHKTNAYFKRFQVKFKRRRAGKTDYRARIRLINQDKNKYNTPKYRFVVRFTNKDITAQIISASIAGDMVLASAYSHELPRYGLEVGLTNYAAAYCTGLLLARRVLKIRGLDQEYEGNVEATGEDFSVEPADERRPFRALLDVGLIRTTTGNRVFGALKGALDGGLDIPHSEKRFAGFKKDDKQLDADTHRRYIYGGHVADYMKNLAEEEPEKYQSHFSAYIKKGVEADEIEALYKKVHAAIRADPSIVKSTKQPPKEHKRYNPKKLTYEQRKASLIERLNQLNSSGGADDDDEDDEXSLVPSKWCYLNPAISNCVLSYAGTCSTAIGIFV

SEQ ID NO: 4008 - protein, 309 aa, Zea mays
  unsure (1)..(309): unsure at all Xaa locations
MGGFVKTHKSNAYFKRFQVKFKRRRAGKTDYRARIRLINQDKNKYNTPKYRFVVRFTNKDITAQIISASIAGDMVLASAYSHELPRYGLEVGLTNYAAAYCTGLLLARRVLKIRGLDQEYEGNVEATGEDFSVEPADERRPFRALLDVGLIRTTTGNRVFGALKGALDGGLDIPHSEKRFAGFKKDDKQLDADTHRRYIYGGHVADYMKNLAEEEPEKYQSHFSEYIKKGVEAEEIEALYKKVHAAIRADPSVVKSTKQPPKEHKRYNPKKLTYEQRKASLIERLNQLNSSGGADDDDEDDEXSLVPSK

SEQ ID NO: 4009 - protein, 338 aa, Zea mays
  unsure (1)..(338): unsure at all Xaa locations
MGGFVKTQKTNAYFKRFQVKFKRRRAGKTDYRARIRLINQDKNKYNTPKYRFVVRFTNKDIIAQIVSASITGDIILAAAYSRELPRYGLEVGLTNYAAAYCTGLLLARRVLKIRDLDQEYEGNVEATGEDFSVEPAEERRPFRALLDVGLIRTTTGNRVFGALKGALDGGLDIPHSDKRFAGFKKDDKQLDADIHRKYIYGLHVAEYMKNLADEEPEKYQAHFSEYIKKGIEADDMEALYKKVHAAIXRADPSMAKSTKAQPKEHKRYNPKKLTYEQRKARLVERLNALNSSGGVDDDEDDEXSASRAQHSSAILFGDQNLRNGICCSLYSCNRHFFV

SEQ ID NO: 4010 - protein, 336 aa, Zea mays
  unsure (1)..(336): unsure at all Xaa locations
MGGFVKTHKTNAYFKRFQVKFKRRRAGKTDYRARIRLINQDKNKYNTPKYRFVVRFTNKDITAQIISASIAGDMVLASAYSHELPRYGLEVGLTNYAAAYCTGLLLARRVLKIRGLDKEYEGNVEATGEDFSVEPADERRPFRALLDVGLIRTTTGNRVFGALKGALDGGLDIPHSEKRFAGFKKDDKQLDADTHRRYIYGGHVADYMKNLAEEEPEKYQSHFSAYIKKGVEAEEIEALYKKVHAAIRADPSVVKSTKQPPKEHKRYNPKKLTYEQRKASLIERLNQLNSSGGADDDDEDDEXSLVPSKWCYLNPAISNCVLSYAGTCSTAIGIFV

SEQ ID NO: 4011 - protein, 309 aa, Zea mays
  unsure (1)..(309): unsure at all Xaa locations
MGGFVKTHKTNAYFKRFQVKFKRRRAGKTDYRARIRLINQDKNKYNTPKYRFVVRFTNKDITAQIISASIAGDMVLASAYSHELPRYGLEVGLTNYAAAYCTGLLLARRVLKIRGLDKEYEGNVEATGEDFSVEPADERRPFRALLDVGLIRTTTGNRVFGALKGALDGGLDIPHSEKRFAGFKKDDKQLDADTHRRYIYGGHVADYMKNLAEEEPEKYQSHFSAYIKKGVEAEEIEALYKKVHAAIRADPSVVKSTKQPPKEHKRYNPKKLTYEQRKASLIERLNQLNSSGGADDDDEDDEXSLVPSK

SEQ ID NO: 4012 - protein, 317 aa, Zea mays
  unsure (1)..(317): unsure at all Xaa locations
RRWACRSLSSSGRRSLFRRSGFVKVVKNKAYFKRYQVKFRRRREGKTDYYARKRLVIQDKNKYNTPKYRMIVRVTNRDIICQIAYARIEGDMIVCAAYAHELPKYGVKVGLTNYAAAYCTGLLLARRLLNRFGMDKIYEGQVEVTGDEYNVESIDGQPGAFTCYLDAGLARTTTGNKVFXGALKGAVDGGLSIPHSTKRFPGYDSESKEFNAEVHRKHIMGQNVADYMRYLMEEDEDAYKKQFSQYIKNSVTPDMMEEMYKEAHAAIRENPVYEKKPKKEVKKKRWNRPKMSLAQKKDRVAQKKASFLRAQERAAES

SEQ ID NO: 4013 - protein, 282 aa, Zea mays
  unsure (1)..(282): unsure at all Xaa locations
SPFARPPARAAAASSFRRSSLLAGAMVYIKNQKTRAYSKRFQVKFKRRRQGKTDYRARLRLTNQDKNKYNTPKYRFVVRFTNKDVTAQIVYATIAGDIVMAAAYSHELPRYGLEVGLTNYAAAYCTGLLLARRVLKNRDLDEEYEGNVEATGEDFSVEPSDERRPFRALLDVGLIRTTTGNRVFGALKGALDGGLDIPHSDKRFAGFKKDEKSLDAEIHRKYIFGGHVADYMRSLADEEPEKFQTHFSEYIKRGISAEDMEAVYKKVHAAIRADPXHGQITK

SEQ ID NO: 4014 - protein, 306 aa, Zea mays
  unsure (1)..(306): unsure at all Xaa locations
MGGFVKTHKTNAYFKRFQVKFKRRRAGKTDYRARIRLINQDKNKYNTPKYRFVTNKDITAQIISASIAGDMVLASAYSHELPRYGLEVGLTNYAAAYCTGLLLARRVLKTRGLDKEYEGNVEATGEDFSVEPADERRPFRALLDVGLIRTTTGNRVFGALKGALDGGLDIPHSEKRFAGFKKDDKQLDADIHRKYIYGGHVADYMRNLAEEEPEKYQSHFSEYIKKGIEADDMEALYKKVHAAIRADPSVVKSTKQPPKEHKRYNPKKLTYEQRKASLIERLNQLNSSGGADDDDEDDEXSLVPSK

SEQ ID NO: 4015 - protein, 309 aa, Zea mays
  unsure (1)..(309): unsure at all Xaa locations
MGGHERTHRSNAYFKRFQVKFKRRRAVRTHYRARIRLINQDRNKYNTPKYRFVVRSTNKDITAQIISASIAGDMVLASDYSHELPRYGLEVGLTNYAAAYCTGLLLARRVLKIRGLDQEYEGNVEATGEDFSVEPADERRPFRALLDVGLIRTTTGNRVFGALKGALDGGLDIPHSEKRFAGFKKDDKQLDADTHRRYIYGGHVADYMKNLAEEEPEKYQSHFSAYIKKGVEAEEIEALYKKVHAAIRADPSVVKSTKQPPKEHKRYNPKKLTYEQRKASLIERLNQLNSSGGADDDDEDDEXSLVPSK

SEQ ID NO: 4016 - protein, 308 aa, Zea mays
  unsure (1)..(308): unsure at all Xaa locations
MGGFVKTHKTNAYFKRFQVKFKRRRAGKTDYRARIRLINQDKNKYNTPKYRFVVRFTNKDITAQIISASIAGDMVLASAYSHELPRYGLEVGLTNYAAAYCTGLLLARRVLKIRGLDQEYEGNVEATGEDFSVEPADERRPFRALLDVGLIRTTTGNXRVFGAXLKGALDGGLDIPHSEKRFAGFKKDDKQLDADTHRRYIYGGHVAXDYMXKNLAEEEPEKYQSHFSAYIKKGVEADEIEALYKKVHAAIRADPSIVKSTKQPPKEHKRYNPKKLTYEQRKASLIERLNQLNSSGGADDDDEDDEXS

SEQ ID NO: 4017 - protein, 330 aa, Zea mays
  unsure (1)..(330): unsure at all Xaa locations
QNSCSTLPVRLTICVPFGYLPRGGFVKTHKTNAYFKRFQVKFKRRRAGKTDYRARIRLINQDKNKYNTPKYRFVTNKDITAQIISASIAGDMVLASAYSHELPRYGLEVGLTNYAAAYCTGLLLARRVLKTRGLDKEYEGNVEATGEDFSVEPADERRPFRALLDVGLIRTTTGNRVFGALKGALDGGLDIPHSEKRFAGFKKDDKQLDADIHRKYIYGGHVADYMRNLAEEXEPEKYQSHFSEYIKKGIEADDMEALYKKVHAAIRADPSVVKSTKQPPKEHKRYNPQEXLTYEQRKASLIERLNQLNSSXAGADDDDEDDEXSLVPSK

SEQ ID NO: 4018 - protein, 266 aa, Zea mays
  unsure (1)..(266): unsure at all Xaa locations
XGREKHYNTPKYRFVVRFTNKDITAQIISASIAGDMVLASAYSHELPRYGLEVGLTNYAAAYRTGLLLARRVLKIRGLDQEYEGNVEATGEDFSVEPADERRPFRALLDVGLIRTTTGNRVFGALKGALDGGLDIPHSEKRFAGFKKDDKQLDADTHRRYIYGGHVADYMKNLAEEEPEKYQSHFSAYIKKGVEADEIEALYKKVHAAIRADPSIVKSTKQPPKEHKRYNPKKLTYEQRKASLIERLNQLNSSGGADDDDEDDEXS

SEQ ID NO: 4019 - protein, 223 aa, Zea mays
KSRRRRILQQPHPQQASEMVFVKNQKTRAYSKRFQVKFKRRRQGKTDYRARLRLTNQDKNKYNTPKYRFVVRFTNKDVTAQIVYATIAGDIVMAAAYSHELPRYGLEVGLTNYAAAYCTGLLLARRVLKCRDLDQEYEGNVEATGEDFSVEPADERRPFRALLDVGLIRTTTGNRVFGALKGALDGGLDIPHSDKRFAGFKKDEKQLDAEIHRKYIYGGHVAD

SEQ ID NO: 4020 - protein, 216 aa, Zea mays
  unsure (1)..(216): unsure at all Xaa locations
MGGFVKTHKSNAYFKRFQXEFKRRCAGKTDYRARIRLINQDKNKNNTPKYRFVVRFTNKDITAQIISASIAGDMALASAYSHEYAXRYGLEVGLTNYAXAAYCTGLLLDRTXSLKTRGLDKEYEGNVEATXGEDFSAEPTDERRAFRALLDVVLITTTTGKRVFGALXVALDGGLYIPHSEKRFADLKKDDQQLDADIHRKYIYGGHGADYMRNLA

SEQ ID NO: 4021 - protein, 237 aa, Zea mays
  unsure (1)..(237): unsure at all Xaa locations
XSQKKQANFNRRFARQTXDYRTRXRLVNQEKIXCKTPKYRSVVLYASKDILLQIISVSLAGDVGLGTVYSHEPPLSGFDVGLTNYAADYLTGLXMVACRVLKTRGXDXESEGHVDATGEDWSWAPADERRALRALLDVGLIRTTSGNRIFGALKGALHGGLDIPHSEKRFAGFKKDDTQLDADIHRTYIYGGHAADYMRNLAEEEPEKYQSHLSEYIKQGIDADDMEALTKKVHAAX

SEQ ID NO: 4022 - protein, 210 aa, Zea mays
  unsure (1)..(210): unsure at all Xaa locations
MGGFGKTHKSTAYLKRFQIKINRRRAAKTDYTARIRLFNHDTDMYNTPKYRFGGRFTNKDITAHMIFDSIAGDMVLACAYSHELPRYGLEGGLTNYASAYCTGLMMHPRVLKTRCLHTEYQGNVXAIGEDFSVEPTDEMTPSQALLDVSLIRTTTWNRAFCALKGSLDGGLNIPHSEKRFAGFKNDDKQLXDADIHRKYIYGGQCDDYMX

SEQ ID NO: 4023 - protein, 278 aa, Zea mays
  unsure (1)..(278): unsure at all Xaa locations
GGFVKTQKTNAYFKRFQVKFKRRRAAYCTGLLLARRVLKIRDLDQEYEGNVEATGEDFSVEPAEERRPFRALLDVGLIRTTTGNRVFGALKGALDGGLDIPHSDKRFAGFKKDDKQLDADIHRKYIYGLHVAEYMKNLADEEPEKYQAHFSEYIKKGIEADDMEALYKKVHAAIRADPSMAKSTKAQPKEHKRHNPKKLTYEQRKARLVERLNALNSSGGVDDDEDDEXSASRGTVVLSYLAIRTCAMAFVVPFTPVTGIFFCLSLELDIWSSRCAAG

SEQ ID NO: 4024 - protein, 156 aa, Zea mays
  unsure (1)..(156): unsure at all Xaa locations
MGGFVKTHKSNAYFKRFQVKFKRRRAGKTDYRARIRLINQDKNKYNTPKYRFVVRFTNKDITAQIISASIAGDMVLASAYSHELPRYGLEVGLTNYAAAYCTGLLLARRVLKTRGLDKEYEGNVEATGEDFSVEPADERRPFRCRRQPRRVRCSDX

SEQ ID NO: 4025 - protein, 156 aa, Zea mays
  unsure (1)..(156): unsure at all Xaa locations
MGGMVKTHKSNAYFKRXQVKFKRRRAGKTDYRARIRLINQDRNKCNTPKYRFVERFTNKDITAQIISASIAGDMVLASAYSHEVPRYGLEVGLTNYAAAYCTGLLLARRELKIRGLDQEYEGHVEATGEDFCVEPTDERRAFRALSGCXLIRTTTX

SEQ ID NO: 4026 - protein, 173 aa, Zea mays
  unsure (1)..(173): unsure at all Xaa locations
MRSFGKTHKSNGYFKXFQEKFTRRRAGKTDYRFRIRLINLDKNKYNTPXYGFVPDKDITAQIISASIARDMALASAYSHEVPRYGLEVGLTNYAAAYCTGLLMARRVLETRGLDKEYERYVEDTGEDFSVEPTDERMPFRALLNDDLIRTTTDKRDFVALKGCLDGGLGICHX

SEQ ID NO: 4027 - protein, 208 aa, Zea mays
  unsure (1)..(208): unsure at all Xaa locations
PPPAAYCIFALTHYSRCYCTGVMLDSRVLNTRGLNKEHEGPAEATGEDCSDDPPDERRPFRALWDDGLIRTTTGNRAFGALTGAMDGGLDIAHSEKRIAGLNKDDKQLDADIHRKYIYGGHVADYMTNLADHEPDKNQSHFSEYINKGIEADDMEAMNKKVHAGIRADPSVVKATKHPPKEHKRYHPKKLSYQQRKAXTLIERLNQLN

SEQ ID NO: 4028 - protein, 101 aa, Zea mays
  unsure (1)..(101): unsure at all Xaa locations
MGFVKVVKNKAYFKRYQVRFRRRREGKTDYYARKRLVIQDKNKYNTPKYRMIVRVTNRDIICQIAYARIEGDMIVCAAYAHELPKYGVKVGLTNYAAAYCX

SEQ ID NO: 4029 - protein, 177 aa, Zea mays
  unsure (1)..(177): unsure at all Xaa locations
HLQYAHHXCLLVESLQGPVXQTDYGAXHRRLITQDYYNSHTPKYGIGGRSTNKDITAHIISASITGDMALAAADSHDWPRYGLETGTTNYAAAYXTALLMARRVLKTRGLHKEYVCHADATGEDFSVEPADERRPFRALLDVGLIRTTTANRVXLGDINGALDGGPNIPHREKRLAX

SEQ ID NO: 4030 - protein, 223 aa, Zea mays
  unsure (1)..(223): unsure at all Xaa locations
LTPANRSIALSCNNGRSVLLPAFERDARHGSVAAASLTARIGTMTPDKNXHKRDKYRVAVPLTHNDNTGAILSAMIQRDMLSPSRYSPEVPRYATCNCLTNIAAAYCTGLLLARPAINTRSVDPPYEGQADPTGHDLYVETDDAIRPFRPLLDVXLIRTTTGYRVFGDLNGPFNGGLDIPLSMNKFDEFHKDDKQLDIDTHRXKYIYGXHVADYTKSLAEDDX

SEQ ID NO: 4031 - protein, 132 aa, Zea mays
  unsure (1)..(132): unsure at all Xaa locations
PPQETERXGFVKTHKSNAYFKPFQVKFTXRKRACKTYYRARIKLINQDKYKYNTPKFRFVVRLTTNAFTTHIISASLAGDMVLASAYSHDLPRYGLXEVGLTNYATAYCTGLLLARRVLKTPGLDKEYXGNX

SEQ ID NO: 4032 - protein, 137 aa, Zea mays
  unsure (1)..(137): unsure at all Xaa locations
LSTAQIISARGACEMGLASAHSDEWPRPGLQVGLTNDAAAYCTGLLLGRRVLKTRGLDKEYEGNVEATGEDFCVEPADERRPFRALLDVGLIRTTTGNRVYGALKGALDGGLHIPDTEKRHAGFKHDDKQVDADIHX

SEQ ID NO: 4033 - protein, 138 aa, Zea mays
  unsure (1)..(138): unsure at all Xaa locations
AGAAALCIGPKETERGGFCQTRRSNAYLKAIFRXKFQDRRAGQTDYRASIMLINQDINKHNTPKYRFVVRFTNKDITAQIISASIACDMVLASAYSHELPRYGLEVGLTNYAAAYCTGLXLMARXRVLKTLXGSDKEX

SEQ ID NO: 4034 - protein, 110 aa, Zea mays
  unsure (1)..(110): unsure at all Xaa locations
RFQKGGFVKTHKTNAXYFKRYQCKFKRRRAGQTHYMARIRLVNQDKNKSNTPKYRFVVRFTNKDIIGPIIYGSIAGDMVLASAYXDEVPRHGLEDGLTNYSDAYCTGLLX

SEQ ID NO: 4035 - protein, 177 aa, Zea mays
  unsure (1)..(177): unsure at all Xaa locations
MGSSHXTHQSHAYFEXFQGNVKRXPAANTDYRRIIRMIRPEYDMXDTPRYRCAGRFTNDDIARSNIISCXVYHGDTVLASAYSPELPRHALEIDLTFYAAAYCTGLLLARRVLKTRALDNEYEVYVEATGEDFSVEPADERRPFRALLDAALIMTTTGKPGFGAPPATLHAGLDIPX

SEQ ID NO: 4036 - protein, 173 aa, Zea mays
  unsure (1)..(173): unsure at all Xaa locations
PPHETVIGGFAKTHTTNAYLKSFQPKTQNSAAGKTNYRGSIKMINQDKNTYNTPKSRFAARFTNPDITPQIISARMTRDMEXLASAYSHEXPRYALEAGMTNYAPVYCTGLMLTGRVLKTRVLNSEXEVNAEGPERDFFGDHCDEKTPFRALLDVGHNKTSTVNPAFGGLTGS

SEQ ID NO: 4037 - protein, 182 aa, Zea mays
  unsure (1)..(182): unsure at all Xaa locations
MRGGFVKTHKXNAYLSXFQVTFKRRRAXGKTDFRARTRLVYQDQNKHNSPKXYRIVXVRFTXQDYTXTNLSPSISGDMVPASAYSHQLARYGXLELVLTHYAAAYCTGPLSASRALKTXGPDKEYEGXNVEATGEGFXFFEPLDEKEALSVLSLDVGXLLGTSTWETVVXFGAPQGKLLDGX

SEQ ID NO: 4038 - protein, 123 aa, Zea mays
  unsure (1)..(123): unsure at all Xaa locations
SKRVAMXKSKRRPSWSDYKSRIRLVNLDKTKTNTPKYRLQVRFTNKDITVQIISDNIQCDMAKAYAYSYELPRYALEDGLTNYPSIYWTGLLLYRRVLKIRLLYYEYEGIVDVTAEDSSGEPA

SEQ ID NO: 4039 - protein, 135 aa, Zea mays
  unsure (1)..(135): unsure at all Xaa locations
MGGLTRTHRTNASFIRSLGKFKEKRGSGXHMTHRARVSTRDKGTXTTARYKLVVRFTNKDITAQMISAXLVDDQALASAYLNELPRYGLVAGLTNYADGYCTGLLVARRVLKIRELDEDYXGSADATGDDLCVRA

SEQ ID NO: 4040 - protein, 136 aa, Zea mays
  unsure (1)..(136): unsure at all Xaa locations
XARVRPRXRRFVVRFTNKDITAHISCAIIGGGMGLASAYXHELPRYELEIGPTNYAAAYCTGLLFARRVLKTHCLDKEYDGNVEATVXFFSXXSSYHKKTFRALLDVGLIMTTTWNQRFDALNGAXLDGGLDLPHX

SEQ ID NO: 4041 - protein, 118 aa, Zea mays
  unsure (1)..(118): unsure at all Xaa locations
PPQETEXGXXXKTHRSXAYFKXXQXKXKRRRAGKTDYRARIRLINQDKNKSNTPNCGGVVRFTNLDITAXIISASLAGDMVLASACSHELPRCGLAVGLSCFAAXAFCAVLLLARRVX

SEQ ID NO: 4042 - protein, 154 aa, Zea mays
  unsure (1)..(154): unsure at all Xaa locations
MGGCVRTHMSVAYYLRDHVNFRTGLPAPTNYRVRVRLIIHYPSRYFTPHYRFVERFTIVDVTSHIISASISSDMVFASAYSYELTQYGLEGGMTNYAGDCCTDLLLARPVLKTGGSYKECEGIVDATGDDVCGAPCDERRPCPALLDGGLSRTX

SEQ ID NO: 4043 - protein, 74 aa, Zea mays
  unsure (1)..(74): unsure at all Xaa locations
MVYVKAQKSKAYFKRYQVKFKRRRXGKTDYRARIRLINQDKNKYNTPKYRFVVRFSNKDIVAQIISASIAGDIV

SEQ ID NO: 4044 - protein, 204 aa, Zea mays
  unsure (1)..(204): unsure at all Xaa locations
RSGRRCCFLSLLSRRFLITLNRTECFRRVKXRLERTRIGMMDYGGSIVVTSLQKHTYLTPQYRFVXVRSTLDDITAQIMFAKIAADSVLASAYSPEMTLYGLERGLTNYAAVYCTGLLSSRLVLEXRMRVIKMYYGQXPTSLWEDFSVEPGDDMRLFRXALLHGGLITTTXLIRGSAVLTVILQGGLYIPHSDMRLAGFDTXQX

SEQ ID NO: 4045 - protein, 219 aa, Zea mays
  unsure (1)..(219): unsure at all Xaa locations
RLSKTHVPDLQTGSLEAXYRRREEALGNDTTTREQDRGMIXAKQNNHSSTCTPRYSGMCDLHHQDITAQIISATIAXNDMVLASAYSHALPPYALEFGLMIYVDVYCIGLLLPHPELKISALDLEYKGNGHATGDDFSVETAAAEDGYRALLDACXLIMTTKANRDFXSALSVALDASLAIPHGKKRFAGLNKVDICLNDETQRRHIYGGHDAEYLKNL

SEQ ID NO: 4046 - protein, 123 aa, Zea mays
  unsure (1)..(123): unsure at all Xaa locations
SRRRCSAHKHRSRLTWGDLCKTHKSNAYFLRFQLKLQRRXRAGKTDYRRSIRLISQDLNQYKTPSYRXVDVRFTNKVLSPQIISASITCEMVTASAXYSHELARYGPEVGLINYAYVYCTGLX

SEQ ID NO: 4047 - protein, 108 aa, Zea mays
  unsure (1)..(108): unsure at all Xaa locations
DSQAGFLNTDQSNAYFKPFHVNFIXQRSXSKTYYTATIMLINQDKNXYNTPKYKFLVPFTNNDITTQIISTNITSHILLASAYSHXFPRYYLXTCLTNYATYYYTGLL

SEQ ID NO: 4048 - protein, 102 aa, Zea mays
  unsure (1)..(102): unsure at all Xaa locations
MAGSVITHNTIAHLNLFQMTFKRKPPGITHYRAKIRLTSQHTFMYSTPIXIFVVRFITNDITSHIISASTAXDMVLASAYSHELPQYGLEFGLTNYTAAYCX

SEQ ID NO: 4049 - protein, 87 aa, Zea mays
  unsure (1)..(87): unsure at all Xaa locations
MSGVQKTPKTXAYFHXFSEKFKRTRAVCTHYRGRIMLINLDMNKYNTPIYRFVVRFTNDDITAQIISASIAGDMGLASAYSHELPRY

SEQ ID NO: 4050 - protein, 90 aa, Zea mays
  unsure (1)..(90): unsure at all Xaa locations
RVQNAEVQGFVAAHKSSAYFSRFHVNVRMNRDGKTDYMAMIRMITLDSYKYNADIYRVVVRYTAKDISAQVISASIAGDMVLASAYSHEX

SEQ ID NO: 4051 - protein, 119 aa, Zea mays
  unsure (1)..(119): unsure at all Xaa locations
XHRKYVFGGHVAAYMKXLRXDEPEKYQSHFXEYIKRGIEADGIEALYKKVHAAIRADPSLKKSEKQPPKEHKRYNLKKLTYEERKAKLIARVAAINSAADNDEDDEXKFIADSMSSLHN

SEQ ID NO: 4052 - protein, 191 aa, Zea mays
  unsure (1)..(191): unsure at all Xaa locations
NKKKKKKKILPQRGNPPPLKGPYPPKKIERGGFVKTQKTKGYLKGFQGNLKKRGVGKKNNGARKGLFTQKKNRSNPPKNNFFFFFPNRDFTEKIFFVKKKGERVLVSVNPNECPQNGFKVGLTNYEVANXIGLLWAPRGLKTRVLKKKYEGNVKAPGENFSVNPFKKRRPFRALWNVALIRTTTGNRVFGA

SEQ ID NO: 4053 - protein, 91 aa, Zea mays
  unsure (1)..(91): unsure at all Xaa locations
MESTMNMSYGTPXYRFVEEFTTXDVTAQIICASIACDTVLACCYTHEPPQSGLEVGLTNYATAYCTGLLLARRVLKTRGLYNEYEGNVEAX

SEQ ID NO: 4054 - protein, 106 aa, Zea mays
  unsure (1)..(106): unsure at all Xaa locations
MGGYVKTHKSYADSTRLPVKPTRRRPGKTDYRTRIRLINQXYKNRYSTPKYILAVRVTNKAISVHIISASIAVHMVLASAXYYEIPRHGLAXVGLPNYVRCYWTGX

SEQ ID NO: 4055 - protein, 163 aa, Zea mays
  unsure (1)..(163): unsure at all Xaa locations
MGGRAKTXKTGALVRGGPGKLPRPRSDETDYGGRIRLINHDKTXYNTPEYRLAVRVTTEVITGHIICARIAXSDMALAYAFSVEVSRXYGLEAVMTNYADAYCTVLLLPGRELKTRGEDIVYDGNVDDAGEDFFDGPADERRSSRALWDGGLIRTXTAGNRWX

SEQ ID NO: 4056 - protein, 113 aa, Zea mays
  unsure (1)..(113): unsure at all Xaa locations
IQGGCSSFILILGGGFQWQFMTVRPGWVVWVAHGSAEXKKRLACKTDSLASIRVINQNKCTSNTPKYRFVVRFTNKDITGQIISAIIVGDMGFASAYSHELAPYGLEDCLTNY

SEQ ID NO: 4057 - protein, 73 aa, Zea mays
  unsure (1)..(73): unsure at all Xaa locations
MGGFVKTHKTNAYFKRFQVKFKRRRAGKTDYRATITLINQDXNKYNTPXYRFVVRFTNKDITAAIISASIAGX

SEQ ID NO: 4058 - protein, 169 aa, Zea mays
  unsure (1)..(169): unsure at all Xaa locations
MXGMWPTHRILTXVQRYLLFFXEGAVYQTDYKRRIPLINQHRPXSSTPKYRSRAPLTNEDMLYTNLSAVYPSDXGDMMLASAYSHELPLSVPERRLTNYVAAXCTGLLLALRCAXKPELLDQGYECLVYHTACYFSDEPCDDNRTFMALLDVEHIMTTTANHVIRALNG

SEQ ID NO: 4059 - protein, 112 aa, Zea mays
  unsure (1)..(112): unsure at all Xaa locations
MPGLVKTNNTNASSKRXQVKVIRMRTAKTDYRATIRLINHDRNTVITPKYRFCAQSTNWDIPAQIICASLADDMVLASAYXHDLPRXLGLEDTMTNYSNAYCTGLLKLRLVX

SEQ ID NO: 4060 - protein, 183 aa, Zea mays
  unsure (1)..(183): unsure at all Xaa locations
TPLNHPLYPPARLGFCHHGRRRGRRPEAPLPPRLLELALRVPPPRRCPGAVAAAPGRRRGGLPPRLPARNGAATWRGRITRRGTTAQAHADSIAADRVLAMHYSIEMEKYGLEVAPTNYTTDYCIGLLSSRRELKIRAMDHEYEGTDEVTGEDFSVEPXDERRPFPALMDDGLIRTTTGNRVF

SEQ ID NO: 4061 - protein, 148 aa, Zea mays
  unsure (1)..(148): unsure at all Xaa locations
XPRVRLAGFNKDDKQLDADIHRKYIYGGHVANYMKNLAEXEPDKYQSHFREYIKKGIEADDMEALFKKVHAAIRADPSVDKXTKQPPKELKMLKLQKLTYEXQRKARLIERLXPINSSDGAYDDDEDDESGLDLSKKCYLMRRSLFEL

SEQ ID NO: 4062 - protein, 81 aa, Zea mays
  unsure (1)..(81): unsure at all Xaa locations
MGGFVGTHKTKAEFKRFQVKFNRRLSVKTDYRASIRLINQDKNKYNTPKYIFVSRFTNKDITSQIIFASIAFDMDLASVYX

SEQ ID NO: 4063 - protein, 122 aa, Zea mays
  unsure (1)..(122): unsure at all Xaa locations
NQNKNNGNVPKYTLPFQFTNNDITPQIISTNITPDIVLASSYSHXLPLYNLEIHLTNYTPSYYTLLLFSLHILKTHSLYNEYYFNYNTTFXDFSSYPSYYNNPYPTLFNFNLITTTTFNPIX

SEQ ID NO: 4064 - protein, 119 aa, Zea mays
  unsure (1)..(119): unsure at all Xaa locations
IGGCARTDISTAYFMPVYFHLTSKFLGYTDYRLLLRLVFQDKDNSNTSTYRFVDRFTNMVITALIIYDRIPSXDMHLTSDYSHQLPRYALEVGLTNYSAVYWTDLLLAGHVLTNRNLYY

SEQ ID NO: 4065 - protein, 116 aa, Zea mays
  unsure (1)..(116): unsure at all Xaa locations
XRHAYYKRTGGGQERRRAEDTGPERKNNQDKNKNKTPKCRCAERRTNKDTTAQIRSASITRDMGRAQAYSHDLTRYGLKTGRTNXAAAYNKSRLXTRRGHNTGGVHKEQQGQGEAX

SEQ ID NO: 4066 - protein, 111 aa, Zea mays
  unsure (1)..(111): unsure at all Xaa locations
PPEETGIGGFVKTHKTNAYFKRSQVYAKRRRAGXTDYCATIRLINQDKNSCITPTIDSAVRFTNXKDITAXQIMCARIERDLELALTYWTEQSLNRGEVGLTNYAAAYSTX

SEQ ID NO: 4067 - protein, 78 aa, Zea mays
  unsure (1)..(78): unsure at all Xaa locations
MGGCVKTHKTNAYFKRFQVKFXKKRSLGRTTYRSXIRLINQDKNKYNTPKFRFGGRFTNQDLTGQIIFGRLAGELGLG

SEQ ID NO: 4068 - protein, 70 aa, Zea mays
MGGFVMTHMTSAYFKRILVIFKRMRAVKTDYRARIRLINQDKNKYNILIYRFVVRFTNKDITARIISGSI

SEQ ID NO: 4069 - protein, 294 aa, Schizosaccharomyces pombe
MPFIKAVKSSPYFSRYQTKYRRRREGKTDYYARKRLIAQAKNKYNAPKYRLVVRFSNRFVTCQIVSSRVNGDYVLAHAHSSELPRYGIKWGLANWTAAYATGLLVARRALAKVGLADKYEGVTEPEGEFELTEAIEDGPRPFKVFLDVGLKRTSTGSRVFGAMKGASDGGLFIPHSPNRFPGFDIETEELDDETLRKYIYGGHVAEYMEMLIDDDEERYQKQFSGLIADGIESDQLEDIYAEAYAKIREDPSFQKSGKDAAAFKAESLKYTQRKLTAEERKERFNAKVIEAGRA

SEQ ID NO: 4070 - protein, 294 aa, Schizosaccharomyces pombe
MPFIKAVKSSPYFSRYQTKYRRRREGKTDYYARKRLIAQAKNKYNAPKYRLVVRFSNRFVTCQIVSSRVNGDYVLAHAHSSELPRYGIKWGLANWTAAYATGLLVARRALAKVGLADKYEGVTEPEGEFELTEAIEDGPRPFKVFLDVGLKRTSTGSRVFGAMKGASDGGLFIPHSPNRFPGFDIETEELDDETLRKYIYGGHVAEYMEMLIDDDEERYQKQFSGLIADGIESDQLEDIYAEAYAKIREDPSFQKSGKDAAAFKAESLKHTQRKLTAEERKERFNAKVIEAGRA

SEQ ID NO: 4071 - protein, 293 aa, Schizosaccharomyces pombe
MPFIKAVKSSPYFSRYQTKYRRREGKIDYYARKRLIAQAKNKYNAPKYRLVVRFSNRFVTCQIVSSRVNGDYVLAHAHSSELPRYGIKWGLANWTAAYATGLLVARRALAKVGLADKYEGVTEPEGEFELTEAIEDGPRPFKVFLDVGLKRTSTGSRVFGAMKGASDGGLFIPHSPNRFPGFDIETEELDDETLRKYIYGGHVAEYMEMLIDDDEERYQKQSSGLIADGIESDQLEDIYAEAYAKIREDPSFQKSGKDAAAFKAESLKHTQRKLTAEERKERFNAKVIEAGRA

SEQ ID NO: 4072 - protein, 248 aa, Schizosaccharomyces pombe
PKYRLVVRFSNRFVTCQIVSSRVNGDYVLAHAHSSELPRYGIKWGLANWTAAYATGLLVARRALAKVGLADKYEGVTEPEGEFELTEAIEDGPRPFKVFLDVGLKRTSTGSRVFGAMKGASDGGLFIPHSPNRFPGFDIETEELDDETLRKYIYGGHVAEYMEMLIDDDEERYQKQFSGLIADGIESDQLEDIYAEAYAKIREDPSFQKSGKDAAAFKAESLKYTQRKLTAEERKERFNAKVIEAGRA

SEQ ID NO: 4073 - protein, 160 aa, Thermoplasma volcanium
MAFKRKVLGKTDYGRRLRLLKSKDRRFIVRITNKGIIAQIAEYSVNGDRILATITDKALSKYGIELRGNNLQICYLVGYAAGVEAQKAGVETAVLDIGRKKFRKGGRIAACLKGITDSGVDIPHGEDVFPDKKRLNGSHLKNPVKLNEAVKNFKKLEEKA

SEQ ID NO: 4074 - protein, 300 aa, Aspergillus fumigatus
MPFHKLVKNSAYYSRYQTKYRRRREGKTDYYARKRLITQAKNKYNAPKYRLVVRFTNRDIITQIVYSEITGDKVFASAYSHELKRYGITQGLTNWAAAYATGLLLARRTLKKLGLDEQFTGVEEPDGEYKLTEAVETDDGTRRPFKAFLDVGLVRTSTGARVFGAMKGASDGGIFIPHSENRFPGYDIESEELDAETLRNYIFGGHVSEYMETLADDDEERYRSQFAKYIENEIDAGDLEEIYAEAHKAIREDPFKKDEDEKPKKSKEEWKAESKKYKKAKLSREEKKARVEQKIRELAA

SEQ ID NO: 4075 - protein, 301 aa, Neurospora crassa
MAFHKLVKNSAYYSRFQTKYKRRREGKTDYYARKRLITQAKNKYNAPKYRLVVRFTNRDIILQIVSSEITGDKVFASAYSHELKAYGIEHGLTNWAAAYATGLLLARRVLKKLGLDETFKGVEEADGEYKLTEAAETDDGERRPFKAFLDVGLARTSTGARVFGAMKGASDGGIFIPHSENRFPGYDMESEELDAETLKKYIFGGHVAEYMETLADDDEERYKSQFNRYIEDDLEADGLEDLYAEAHAAIREDPFKKAESEAPKKTKEEWKAESLKYKKSKLTREQRAAGVQERIAALRSE

SEQ ID NO: 4076 - protein, 206 aa, Pyrococcus horikoshii
MRKMAHGPRYRVPFRRRREGKTNYRKRLKLLKSGKPRLVVRKSLNHHIAQIIVYDPKGDRTLVSAHTRELIRDFGWKGHCGNTPSAYLLGLLIGYKAKKAGIEEAILDIGLHPPVRGSSIFAVLKGAIDAGLNVPHSPEIFPEDYRIRGEHIAEYARMLKEQDEDRFRRQFGGYLEKGLDPEKLPEHFEEVKARIIEKFESEGARE

SEQ ID NO: 4077 - protein, 203 aa, Pyrococcus horikoshii
MAHGPRYRVPFRRRREGKTNYRKRLKLLKSGKPRLVVRKSLNHHIAQIIVYDPKGDRTLVSAHTRELIRDFGWKGHCGNTPSAYLLGLLIGYKAKKAGIEEAILDIGLHPPVRGSSIFAVLKGAIDAGLNVPHSPEIFPEDYRIRGEHIAEYARMLKEQDEDRFRRQFGGYLEKGLDPEKLPEHFEEVKARIIEKFESEGARE

SEQ ID NO: 4078 - protein, 232 aa, Guillardia theta
MIQYALKSNASYHSRFKLKKRRRRIGKTDYKKRMKLIRQDKKKFENKKKRIIIRFSKRNLSLQMVNSNVDGDFILLSSYLKNLSKLEYKNLTNNYPFSYLLGYYFGKDLIEKVKQSETYNKKNYSSKITAIIDIGLKRATIGNKSFASMKGSVDSGINIPHNYNKIFKVKNNEIDSKELFNERSKGIHIIKYIDLLKNEDEEKLKKQFSNIFLSRDSLSTIKKNYLIKNKNK

SEQ ID NO: 4079 - protein, 214 aa, Aeropyrum pernix
MGRGPRYRVPLRRRREGKTNYYRRFRLVKSGKPRMAVRISNEYLWVQFLEARIEGDRVIAAAHSRELIKKFGWKGDGNNTCAAYLTGYLAGLRALEKGVREAVLDVGLHKPVKGSRVFAALKGALDAGVEIPHSEEILPGDERVRCEHIAQWAEALKEENAELYQRQFSRYLDRGLNPEELPGHVEEVKKAIEEAYKHVAEETAAEGEEVEVKA

SEQ ID NO: 4080 - protein, 167 aa, Entamoeba histolytica
LKVIKNRAYFKKYQTQFRRRREGKTDYYARRKMIFQDKDKFKTPKYRVVVRITNKTVIAQIAYSEIIGDKILCAAYSHELPRYGVKLGLTNYAAAYCTGLLLARRLLQKLGMDKQFVGVSDAAKLGEDYTPEEVDERRPFTCILDVGLARTTTGSKVFGGPKGMCDG

SEQ ID NO: 4081 - protein, 167 aa, Entamoeba histolytica
LKVIKNRAYFKKYQTQFRRRREGKTDYYARRKMIFQDKDKFKTPKYRVVVRITNKTVIAQIAYSEIIGDKILWAAYSHELPRYGVKLGLTNYAADYCTGLLLARRLLQKLGMDKQFGGVSDAAKLGEDYTPEEVDERRPFKCILDVGLGRTTTGSLVFGVPKGMCDG

SEQ ID NO: 4082 - protein, 283 aa, Encephalitozoon cuniculi
MGTRNYHKNFQVKRRRRREGKTDYKHRTNMIRQDSNSCGSVKHRLVVRITGSRVICQIVAAYMDGDRVMVYADSRELERYGINFGATNYSAAYATGFLIGRRALTAMSLDEVYRPKEIDGTYSVTKDIDGEKKAPRVFLDIGLARSTRGARVFGALKGASDAGLNVPHSAAKFYGHKPDGSFDAKELHDRIFGYNISEYMKQLRDGDPEKYKTQFSSYIKKGIDPEEIPRIYKSAFDKIAEDPTRKKKETKDYSGFKKYKQARLTYEERAKRVQAKLSAAEGE

SEQ ID NO: 4083 - protein, 299 aa, Schistosoma japonicum
MAIVKLVKNKAYFKRFQVKFKRRREGKTDYYARKRLIWQDKNKYNTPKYRLVVRFTNKDIICQIIYARIDGDRVLCSAYAHELPRYGVKVGLTNYAAAYCTGLLCARRVLKQLGLDGLYAGAEKVDGQEYHVESVGGNKSPFRCHLDVGLARTSSGANIFGALKGAVDGGLDIPYSPSRFPGYNQESKEYKPEVHRARILGHHVAEYMKQLQEENESDYQRQFSKYIKHGITADKIEEMYLSAHAAIRSDPSHIAHEKKEIQPKRFNRKKMSYKQKKERVRQKKALYLSQLKKEIAAVE

SEQ ID NO: 4084 - protein, 293 aa, Caenorhabditis elegans
MGLVKVIKNKAYFKRYQVKLRRRREGKTDYYARKRLTVQDKNKYNTPKYRLIVRITNKDVVAQLAYSKIEGDVVVASAYSHELPRYGLKVGLTNYAAAYATGLLLARRHLKTIGLDSTYKGHEELTGEDYNVEEEGDRAPFKAVLDIGLARTTTGSKIFAVMKGVADGGINVPHSESRFFGFDQESKEYNAEAHRDRILGKHVADYMTYLKEEDEDRYKRQFSKFLAAGLNADNLVATYQKVHSAIRADASPAAKKAAKPSKRHTAKRLTYDERKQRVADKKALLLQLKEQQE

SEQ ID NO: 4085 - protein, 183 aa, Halobacterium sp. NRC-1
MATGPRYKVPMRRRREVRTDYHQRLRLLKSGKPRLVARKSNKHVTAQLVTTGPDGDETVASAHSSDLDAYGWAAPTGNLPAAYLTGLLAGQRAVDAGVEEAVLDIGLNTATPGSKVFAIQEGAIDAGLDVPHNDSVLADWSRTRGEHIAEYAESLDEPLYSGDFDATALPAHFDETREAIMED

SEQ ID NO: 4086 - protein, 132 aa, Euprymna scolopes
MKGAVDGGMEVPHNIKRFPGYDAENGEFNAEVHRDHIFGKHVSDYMVSLKEENEEAYRRQFSRYIKLGICADVIEKMYKKAHAAIRADPEHKPVPKKTVTKKRHNAKKIGNKQRKIRIAKEKADFMKSLGKQ

SEQ ID NO: 4087 - protein, 299 aa, Bombyx mori
MGFVKVVKNKQYFKRYQVKFKRRREGKTDYYARKRLVVQDKNKYNTPKYRLIVRLSNKDVTCQVAYSRIEGDHIVCAAYSHELPRYGVKVGLTNYAAAYSTGLLLARRLLQRLGLDTLYTGTTDVTGDEYNVEPVDNGPGAFRCYLDVGLARTTTGRRVFGAMKGAVDGGLNVPHSIKRFPGYDAESKKFNAEVHRAHIFGLHVAEYMRSLEQDDEDSFKRQFSKYIKLGVTADAIEAIYKKAHEAIRADPSHKKKELKKDSVKQKRWNKRKLTLAERKNRIKQKKASFIKRLQAQAEA

SEQ ID NO: 4088 - protein, 327 aa, Anopheles gambiae
MGFVKVVKNKQYFKRYQVRFRRRREGKTDYYARKRLIFQDKNKYNTPKFRLIVRLSNRDITCQIAYRRIEGDRIVCAAYSHELPRYGVKVGLTNYAAAYCTGLLVARRILQKLRLDTLYAGCTDVTGEEYLVEPVDEGPAAFRCYLDVGLARTTTGSRVFGAMKGAVDGGLNIPHSVKRFPGYSAENKSFNAEMHRDHIFGLHVANYMRTLEEEDEEAFKRQFSKYISLGIKADDIENIYKNAHASIRKIPPSRRNPRRRSPRSGGRWPSCRSPPARRRSRSTRPTSWPRSRPTSKPKRLPRRRRPFFFSSWWCIILVLPCSSPVQG

SEQ ID NO: 4089 - protein, 299 aa, Drosophila melanogaster
MGFVKVVKNKQYFKRYQVKFRRRREGKTDYYARKRLTFQDKNKYNTPKYRLIVRLSNKDITVQIAYARIEGDRVVCAAYSHELPKYGIQVGLTNYAAAYCTGLLVARRVLNKLGLDSLYAGCTEVTGEEFNVEPVDDGPGAFRCFLDVGLARTTTGARVFGAMKGAVDGGLNIPHSVKRFPGYSAETKSFNADVHRAHIFGQHVADYMRSLEEEDEESFKRQFSRYIKLGIRADDLEDIYKKAHQAIRNDPTHKVTAKKSSAVTKKRWNAKKLTNEQRKTKIAAHKAAYVAKLQSETEA

SEQ ID NO: 4090 - protein, 177 aa, Drosophila melanogaster
  unsure (1)..(177): unsure at all Xaa locations
DSLYAGCTEVTGEEFNVEPVDDGPGAFRCFLDVGLARTTTGARVFGAMKGAVDGGLNIPHSVXLFPGYSAETKSFNADVHRAHIFGQHVADYMRSLEEEDEESFKRQFSRYIKLGIRADDLEDIYKKAHQAIRNDPTHKVTAKNLLPLRXKXGMLRNSXTNNXRLRLQLIRHIFCQX

SEQ ID NO: 4091 - protein, 294 aa, Plasmodium yoelii yoelii
MAYVKVVKNKAYFKRYQVKYRRRREGKTDYRARKALILQDKNKYNAQKLRFIVRKTNSQIICQIASAHIEGDKILSEAKSKELVRYGIPVGLKNYAAAYATGLLCARRFLKHLNLDSQFIGVEKVTAESVADDGDKEEEGERKPIKAFLDVGITRTTTGNRVFAALKGACDGGINIPHGNNRFPGSKNEFNPEQLRKNILGIHVAEYMASMKEEDMDKYKAHFNDYLKHKIDENNIENMYLTAHEKIRKNPEKKPKKATKKFIAKHQKPTKLNAKLRKQRVKEKVSEYILSLFM

SEQ ID NO: 4092 - protein, 295 aa, Styela clava
MGFVKVVKNKAYFKRYQVKYKRRRQGKTDYFARKRLVVQDKNKYNTPKYRMIVRFTNKDIVCQIAYARIEGDVVICAAYAHELPRYGVKVGLTNYAAAYCTGLLLSRRLLNKFGLDEIYEGQTEIDGDEFYVEDVDGKPGAFRAFLDVGLARTTTGAKVFGAMKGAADGGLDIPHSTKRFPGYDDESGDFSAEVHRSHIFGGHVSNYMKELEEEDEEAFKRQFSQYIKHGVTADTVEEMYTKAHAAIREDPTPKKKTDFAGKTKRWNRKKMTFSQRRDRVKQKKASFLRAKQQEG

SEQ ID NO: 4093 - protein, 271 aa, Branchiostoma lanceolatum
AYFKRFQVKFRRRREGVTDYYARKRLVIQEKNKYNTPKYRLIVRFTNKDIICQVAYARIEGDIIVSAAYAHELPRYGIKVGLTNYAAAYCTGLLLARRILKKFSLDTIYEGCTEIDGDEYNVEEVDGQPRPFRCFLDVGLVRTSTGARVFGAMKGAVDGGLDIPHSTKRFPGYDAESKDFNAEVHRGHIFGQHVAEYMRKLEEEDEEAYKSQFGSYIKLGITADSVEEMYTKAHAAIREDPEHKPKDKKEVTVKRWNRAKLSLAQRKDRIK

SEQ ID NO: 4094 - protein, 176 aa, Petromyzon marinus
  unsure (1)..(176): unsure at all Xaa locations
GFIKTVKSKAYFKRYQVKFKRRREGKTDYFARKRLIVQDKNKYNTPKYRLFVRLTNRDVICQVAYAKIEGDVMVCAAYSHELSKYGITVGLTNYAAAFTCYLDAGLTRTTTGNKVFGALKGAVDGGLSIPHSTKRFPGYDSESKEFNADVHRKHXLGVNVADYMRSLMENDXDAYK

SEQ ID NO: 4095 - protein, 296 aa, Myxine glutinosa
MGFVKVVKNRAYFRRYQVKFKRRREGKTDYYARKRLVIQDKNKYNTPKYRLIVRITNKDIICQLAYAKIEGDVIVCASYSHELPKYGIPVGLTNYAAAYCSGLLVARRVLRKFGIDRVYEGQPEVTGDEFNVESVERGPGAFTCYLDTGLARTTTGNKVFGVLKGAVDGGLSIPHSTRRFPGYDSESKEFNPDIHRQHIFGTNISNYMKQLLEDDEDLYKKQFSRYIKHAITPDMLESMYENAHARIRKNPIRKKKPKWTGKCKRWNRAKLSLAQRNDRVAQKKASYLRAKQQQAT

SEQ ID NO: 4096 - protein, 271 aa, Scyliorhinus canicula
AYFKRYQVKFRRRREGKTDYFARKRLVVQDKNKYNTPKYRMIVRFTNRDIICQIAYAKIEGDIIVCAAYGHELPKYGIKVGLTNYAASYCTGLLLARRLLRKFGLDTIYEGQVEVTGDEYNVESIDGKPSAFTCYLDAGLARTTTGNKVFGALKGAVDGGLSIPHSTKRFPGYDSESKEFNPEVHRKHIFGVNIAEYMRYLMEEDEDAFKKQFSQYVKHGVTADMIEDLFKKAHATIRENPIHEKKPKREVKKKRWNRPKMSLQQRQDRIA

SEQ ID NO: 4097 - protein, 297 aa, Danio rerio
MGFVKVVKNKSYFRRYQVKFRRRREGKTDYFARKRLVIQDKNKYNTPKYRMIIRFSNRDIVCQIAYAKIEGDAIVCAAYSHELPKYGIACGLTNYAAAYCTGLLCARRLLNKFGLDKVYEGQVEVTGDEFNVESIDGQPGAFSCYLDAGLTRTTTGNKVFGALKGAVDGGLSIPHSTKRFPGYDSESKEFNAEVHRKHILGLNVSEYMSLLMEEDEELYKKQFSRFIKNGVTPESIEEMYKKAHASIRENPVHERKPKREVKKKRWNRAKLTLAQRKDRVAQKKASFLRAQEAAADD

SEQ ID NO: 4098 - protein, 299 aa, Ictalurus punctatus
MGFVKVVKNKAYFKRYQVKFRRRREGKTDYFARKRLVIQDKNKYNTPKYRMIVRFSNRDIVCQIAYAKIEGDAIVCAAYSHELPRYGVSVGLTNYAAAYCTGLLLARRLLNKFNLDKVYEGQVEVTGEEFNVESVDGQPGAFTCYLDAGLTRTTTGNKVFGALKGAVDGGLSIPHSTKRFPGYDSESKEFSGEVHRKHILGLNVSEYMSSLIEEDEDAYKKQFSRFIKNGVTPDSVEEMYKKAHAAIRENPAHQKKPKKELKKKKRWNRAKLTLGQRKDRVAQKKASFLRAQEAAADDE

SEQ ID NO: 4099 - protein, 296 aa, Ictalurus punctatus
MGFVKVVKNKAYFKRYQVKFRRRREGKTDYFARKRLVIQDKNKYNTPKYRMIVRFSNRDIVCQIAYAKIEGDMIVCAAYSHELPKYGVTVGLTNYAAAYCTGLLLARQLLNKFGLDKVYEGQVEITGDEFNVESIDDKPSAFTCYLDAGLARTTTGNKVFGALKGAVDGGLSIPHSTKRFPGYDSESKEFNAEVHRKHILGLNVAEYMRLLIEEDEEAYKKQFSRFIKNGVTPDSIEEMYKKAHAAIRENPVHEKKPKREVKKKRWNRAKLTLAQRKDPVAQKKASFLRAQAAEED

SEQ ID NO: 4100 - protein, 226 aa, Ictalurus punctatus
MGFVKVVKNKAYFKRYQVKFRRRREGKTDYFARKRLVIQDKNKYNTPKYRMIVRFSNRDIVCQIAYAKIEGDAIVCAAYSHELPRYGVSVGLTNYAAAYCTGLLLARRLLNKFNLDKVYEGQVEVTGEEFNVESVDGQPGAFTCYLDAGLTRTTTGNKVFGALKGAVDGGLSSHTALSGSRATTPRAKSSAVRSTGSTSGLERVEYMSSLIEEDEDAYKKQFSRFI

SEQ ID NO: 4101 - protein, 296 aa, Xenopus laevis
MGFVKVVKNKAYFKRYQVKFRRRREGKTDYYARKRLVIQDKNKYNTPKYRMIVRVTNRDIICQIAYARIEGDMIVCAAYAHELPKYGVKVGLTNYAAAYCTGLLLARRLLNKFGLDKVYEGQVEVTGDEYNVESVDGEPGAFTCYLDAGLTRTTTGNKVFGALKGAVDGGLSIPHSTKRFPGYDSESKEFNPEVHRKHIFAQNIAEYMRLLMEEDEDAYKKQFSQYIKNGVAADQLEDIYKKAHAGIRENPVHEKKPKKEVKKKRWNRAKLSLEQKKDRVAQKKASFLRAQEKADS

SEQ ID NO: 4102 - protein, 296 aa, Xenopus laevis
MGFVKVVKNKAYFKRYQVKFRRRREGKTDYYARKRLVIQDKNKYNTPKYRMIVRVTNRDIICQIAYARIEGDMIVCAAYAHELPKYGIKVGLTNYAAAYCTGLLLARRLLNKFGLDKVYEGQVEVTGDEYNVESIDGEPGAFTCYLDAGLTRTTTGNKVFGALKGAVDGGLSIPHSTKRFPGYDSESKEFNPEVHRKHIFAQNVAEYMRLLMEEDEDAYKKQFSQYIKNGVTADQVEDLYKKAHAGIRENPVHEKKPKKEVKKKRWNRAKLSLEQKKDRVAQKKASFLRAQEKADS

SEQ ID NO: 4103 - protein, 296 aa, Xenopus laevis
MGFVKVVKNKAYFKRYQVKFRRRREGKTDYYARKRLVIQDKNKYNTPKYRMIVRVTNRDIICQIAYARIEGDMIVCAAYAHELPKYGVKVGLTNYAAAYCTGLLLARRLLNKFGLDKVYEGQVEVTGDEYNVESVDGEPGAFTCYLDAGLTRTTTGNKVFGALKGAVDGGLSIPHSTKRFPGYDSESKEFNAEVHRKHIFGLNIAEYMRLLIEEDEDAYKKQFSQYIKNGVAADQLEDIYKKAHAGIRENPVHEKKPKKEVKKKRWNRAKLSLEQKKDRVAQKKASFLRAQQKADS

SEQ ID NO: 4104 - protein, 296 aa, Xenopus laevis
MGFVKVVKNKAYFKRYQVKFRRRREGKTDYYARKRLVIQDKNKYNTPKYRMIVRVTNRDIICQIAYARIEGDMIVCAAYSHELPKYGIKVGLTNYASAYCTGLLLARRLLNKFGLDKVYEGQVEVTGDEYNVESIDGEPGAFTCYLDAGLTRTTTGNKVFGALKGAVDGGLSIPHSTKRFPGYDSESKEFNAEVHRKHIFAQNVAEYMRLLMEEDEDAYKKQFSQYIKNGVTADQVEDLYKKAHAGIRENPVHEKKPKKEVKKKRWNRAKLSLEQKKDRVAQKKASFLRAQEKADS

SEQ ID NO: 4105 - protein, 297 aa, Gallus gallus
MGFVKVVKNKAYFKRYQVKFRRRREGKTDYYARKRLVIQDKNKYNTPKYRMIVRVTNRDIICQIAYARIEGDMIVCAAYAHELPKYGVKVGLTNYAAAYCTGLLLARRLLNKFGLDKIYEGQVEVTGDEYNVESVDGKPGAFTCYLDAGLARTTTGNKVFGALKGAVDGGLSIPHSTKRFPGYDSESKEFNAEVHRKHIMGQNVADYMRYLMEEDEDAYKKQFSQYIKNNITPDGMEEMYKKAHAAIRDNPVHEKKPKREVKKKRVNSTKMSLAQKKDRVAQKKASFLRAQERAADS

SEQ ID NO: 4106 - protein, 297 aa, Homo sapiens [sequence omitted]

SEQ ID NO: 4107 - protein, 297 aa, Homo sapiens [sequence omitted]

SEQ ID NO: 4108 - protein, 178 aa, Homo sapiens [sequence omitted]

SEQ ID NO: 4109 - protein, 196 aa, Homo sapiens
MIVHVTKRRIICQIAYVRIEGDMIVCAAYAHKLPKYGVNVGLTNYAAAYCTGLLLARRLLNRFEVDKIYESQVEKTGDEYNVESIDGQPGAFTYYLDASLARTTTGNQVFGALKGTVDEGLSIPHSTKRFPGYDSESKEFNAEVHQKYIMGQKVADYMHYLMEGDEDPNKKQFFQYVKNSITPDMMEIYKKTHAAI

SEQ ID NO: 4110 - protein, 170 aa, Homo sapiens
MIVHVTTAYAHELPKYGVKVGLSNYAAAYCTGLLLARRLFNMFGMDKIYEAQVEVTGDEYNVESINGQPGAFTCYLDAGLARTTSGNKVFGALKGAVDGGLSIPHGTKRFPGYDSESKEFNAEVHWKHIMGQNVADYTCYLMQEDEDAYKKQFSQYIKNSITPDMMEEMC

SEQ ID NO: 4111 - protein, 965 aa, Homo sapiens
MWVRCALLVARDCGCAERVCPSVVRDRVCVVGAGKIHTKEKNIAHLLEMKYFKFNISLANAEFISQDSWLAWVGFVKVVKYKAYCKRYQVTFRRQCEGKTDYYAWKHLVVQDKNKSNTHKYRMIICVINTDTICEMAYAHIEWDMIVCAAYAHELPKYGVKVGLTNDAAACCTGLLLACRLLSRFGMDKIYKGQVEVTRDEYNVGSTDGQPGAFTCCLDAGLARTTTDNKVFGALRVLWMEVSLSLTVPNDSLSKGKPGPRKEQLPARGSLSRGVLGAFEVGSQGVEAAASPNGQYGPSWGLAAEGTEGARPQAPKRDLSYSRTDSHRDCSPVCHNMSLRGHLVPKKPSKEKQGQQKLDSKFYESWATALLTAIFPVLGILVLVESLLMNDPMRECILSTSGFSGPRARLLGVLALGGLPLHLGAPVIVMAWIVLALLFTRSRTRADPADVLPPGAFEKTRMHALPPPLGLTLDDGEVITTRLLTDASVQKVVVRISESSSCLHNGLLSGNGCEVHYRRARLFQDAQMPAQSPAYRGDLRAPVNALRIQNRSQLSPGGKIKWRQHRQLEGTHRKKSSTMFRKIHSIFNSSPQRKTAAESPFYEGASPAVKLIRSSSMYVVGDHGEKFSESLKKYKSTSSMDTSLYYLRQEEDRAWMYSRTQDCLQYLQELLALRKKYLSSFSDLKPHRTQGISSTSSKSSKGGKKTPVRSTPKEIKKATPKKYSQFSADVAEAIAFFDSIIAELDTERRPRAAEASLPNEDVDFDVATSSREHSLHSNWILRAPRRHSEDIAAHTVHTVDGQFRRSTEHRTVGTQRRLERHPIYLPKAVEGAFNTWKFKPKACKKDLGSSRQILFNFSGEDMEWDAELFALEPQLSPGEDYYETENPKGQWLLRERLWERTTGSLRSCPLSAQHEVFGRVENANCNTVNPLSTLPAGAVPVPNRPVASQGTGLRTLSELEFLCVG

SEQ ID NO: 4112 - protein, 336 aa, Homo sapiens
MRNILTVLTQETKTMLWPNCSVVRNRITASKRCLTFRGYPQRTGFMRTLQGEAMFLSPPPPPQPARHVGQEPALVQRWMLGFRDPDTPAKAKPVNIKNGQLLQLLVPDATKQWLMENTKDWPPWSRTGQSHSFSILAHVIDTEFMQDLDEEHLKKSREKIERQNLEPDGLSSLSCASEGEIIVCAAYAHELPKYDVKVGLTNYAAAYCTGLLLACSLLNRFGMDNIYDGQMEVTGDEYNVENIDGQPGAFTCYLDAGLARTITGNKVFGTLKGTVDRSLSIPHSTKRFPGYDSESNAEVHQKRIMGQNVADYMRYLMEQDEDAYKKQFSQYIKKTA

SEQ ID NO: 4113 - protein, 212 aa, Homo sapiens
MIVHVINRYIICQIAYGCIEGNVIVRAAHAHELPKYGVKVGLTNYAAAYCTCLLLACRLLNRFGMDKIYEGQVEATSDEYNVESIDGQPGAFTCYLGAGLARTTTGNKVFGTLKEAAVGGLSIPHSTKQFPDYDSESKGFNAENSITPDMMEETYKKAHAAIGENPVYEKKPKTEVMKKRQNHPRMSLAQKKDWVARKKASFLRAQEQDAES

SEQ ID NO: 4114 - protein, 101 aa, Homo sapiens
MGFVKVVKNKAYFKRYQVKFRRRREGKTDYYARKRLVIQDKNKYNTPKYRMIVRVTNRDIICQIAYARIEGDMIVCAAYAHELPKYGVKVGLTNYAAAKWR

SEQ ID NO: 4115 - protein, 230 aa, Homo sapiens
MGFVKVIKNKAYFKRYQVKFRRRREGKTDYYAQKHLDDSSWNKQSIICQIAYARTEGDMIVCTAYVHELPKYGVKVDLTNYAAAYCTGLLLDRRLLNRFDMDKIYEGQVEATGDDYNVVSIDGQPEVHRKHIMGHNVADYMCYLMEEDEDGYKKQFSQYMKNSVTPDMMEEMCKKAHAAIRESPVCEKKPKKEVKKKKWNRPKMSLAQKKDWVAQKKASFLRAQERAAES

SEQ ID NO: 4116 - protein, 145 aa, Homo sapiens
TTTGNKVFGALKGAVDGGLSIPHSTKRFPGYDSESKEFNAEVHRKHIMGQNVADYMRYLMEEDEDAYKKQFSQYIKNSVTPDMMEEMYKKAHAAIRENPVYEKKPKKEVKKKRWNRPKMSLAQKKDRVAQKKASFLRAQERAAES

SEQ ID NO: 4117 - protein, 146 aa, Homo sapiens
MDKIYEGQVEVTGNEYNVESIDGQPGAFTCYLVADLARTTTGNKVFGAPKGAVDGGLSNPHSSKRFLGLSIPHKVHRKHIMGQKFADDLRYLIEEDENASKKQFSQYTKNSVTPDLMEEMYKKAHAAVRENPVYEKKPKKEIKKKR

SEQ ID NO: 4118 - protein, 127 aa, Homo sapiens
MNYNVESIDGQPGAFTCYLDAGFARTTIGNKVFGALKGAVDGGLSIPHSKEFNEEVHQKYIIGQNVADWMHHLMEENKDAYKKELSQYIKNSVTTDVVEEMWEIVGPKHVSPLVKVSSTHSSYCGYI

SEQ ID NO: 4119 - protein, 455 aa, Homo sapiens
MAFAKAAHCCACRVTWVPLDICTLLQLHGRHTSPCGSSFQRLPVLHGRTVDFADRKRLIAPSFHTICLTWTHSKHYGFAGRMVFLLQKFCNLLIDRAPSLISSKRHSPPYWSAKSWVQCELTIGPLSILFCGVASGGSSYATIICTGFRKEPPGWALWWRGGGPTFTDAVRHASACGPVETSGTSLRTRLKEDAKGLLKDISETTKNLLLYIRTSCSGCHRKPPFLPHDPEPHPWIKVDEMTWGKSSGLRSSTAKWRCCVKLKKKMTEALGLAYGNLTGRMIVHVTPNRVIICQIAYACMQGDMNVRAPYAHKEGQEEVTGDEYDVESIDGQPDAFTYYLDAGLARTTTDSKVFGAMEAVDGGLSIPQSTKQFPGYDSESKEFNAQETVLTIHKELHNSRLGGGAHAAVGETSLSEKPKKEAKKKRWDLSPRLSPAQKNDQVAQKQAGFLRAQEL

SEQ ID NO: 4120 - protein, 247 aa, Equus caballus
MIVRVTNRDIICQIAYARIEGDMIVCAAYAHELPKYGVKVGLTNYAAAYCTGLLLARRLLNRFGMDKIYEGQVEVTGDEYNVESIDGQPGAFTCYLDAGLARTTTGNKVFGALKGAVDGGLSIPHSTKRFPGYDSESKEFNAEVHRKHIMGQNVADYMRYLMEEDEDAYKKQFSQYIKNNVTPDMMEEMYKKAHSAIRENPVYEKKPKKEVKKKRWNRPKMSLAQKKDRVAQKKASFLRAQERAAES

SEQ ID NO: 4121 - protein, 125 aa, Sus scrofa
  unsure (1)..(125): unsure at all Xaa locations
MGFVKVVKNKAYFKRYQVKFRRRREGKTDYYARKRLVIQDKNKYNTPKYRMIVRVTNRDIICQIAYARIEGDMIVCAAYAHELPKYGVKVGLTNYAAAYCTGLLLARRLLNRFGMXKIYGGQVEV

SEQ ID NO: 4122 - protein, 46 aa, Oryctolagus cuniculus
GFVKVVKNKAYFKRYQVKFRRRREGKTDYYARKRLVIQDKNKYNTP

SEQ ID NO: 4123 - protein, 402 aa, Streptomyces coelicolor A3(2)
MSPLTAADLGAPLAAALAAATEDRLVYDLAGIERRHDTLRNELPGVHVRFAMKACPVDEVLAALAGRGAGADAASPGEVEQALRAGVPAGRVHYGNTVKSDRNIAEAHRLGVRTFATDSLQDVAALAVHAPGARVFCRVATGGAGALWGLSNKFGCPPGDAVRVLVAARDAGLVPAGLSVHVGSQQMTSEAWHGAVDDLGDVLRALGRHGIRVDHVNLGGGLPALGYRDRHGAPLDPPLDKIFAVIREGMDELRRIHGGHLDFVVEPGRHLVADHGAIRAHVVRLTERRAADGERQHWLYLSCGKFNGLYEMDALQYRLVFPGHPDGPCVPAVVAGPTCDSDDAYSHEEGLVPVPAALASGDPVWVLSCGAYATSYTTRGFNGFAPLPYAFAGRPERTGADD

SEQ ID NO: 4124 - protein, 463 aa, Streptomyces coelicolor A3(2)
MSRSAHPAGPRHADVLPEGHYTAPADDLNALDPKVWARTVGRDADGVVTVGGIPVTQLAEEYGTPAYLLDEADFRERARAWRTAFGDDADVFYAGKAFLSRAVVRWLDEEGLNLDVCSGGELATALSAGMPAERIAFHGNNKSPEEIERAVRAGVGRIVLDSFQEIVRVAHIAQSLGKRQRVQIRITVGVEAHTHEFIATAHEDQKFGIPLAGGQAAEAVRRALKLDGLEVIGIHSHIGSQIFDMSGFEVAAHRVVGLLKDIRDEHGVELPEIDLGGGLGIAYTSDDDPREPHEIAKALTEIVTRECEAARLATPRISVEPGRAIVGPTAFTLYEVGTVKPLEGLRTYVSVDGGMSDNIRTALYDAEYSVALASRTSDAEPMLVRVVGKHCESGDIVVKDAFLPGDLAPGDLIAVPATGAYCRSMASNYNHALRPPVVAVRDGAARVVVRRETEEDLLRLDVG

SEQ ID NO: 4125 - protein, 455 aa, Cricetulus griseus
MNSFNKDEFDCHILDEGFTAKDILDQKINEVSSDDKDAFYVADLGDVLKKHLRWLKALPVTPFYAVKCNDSRALVNTLAAITVDCASKTEIQLVQGLGVPPERVIYANPCKQVSQIKYAASNGVQMMTFDSEIELMKVARAHPKVTKLVLRIATDDSKAVCRLSVKFGATLRTSRLLLERAKELNIDVIGVSFHVGSGCTDPETFVQALSDARCVFDMGTEVGFSMYLLDIGGGFPGSEDTKLKFEEITSVINPALDKYFPPDSGVRVIAEPGRYYVASAFTLAVNIIAKKIVSKGSDDEDESSEQTFMYYVNDGVYGSFNCILYDHAHVKPLLPKRPKPDEKYYSSSIWGPTCDGLDRIVERCNLPEMHVGDWMLFENMGAYTVAAASTFNGFQRPSIYYVMSRPMWQLMKQIQNHGFPPEVEEQDVGTLPISCAQESGMDRHPAACASASINV

SEQ ID NO: 4126 - protein, 293 aa, Cricetus cricetus
LSVKFGATLRTSRLLLERAKELNIDVIGVSFHVGSGCTDPETFVQALSDARCVFDMGTEVGFSMYLLDIGGGFPGSEDTKLKFEEITSVINPALDKYFPPDSGVRVIAEPGRYYVASAFTLAVNIIAKKIVSKGSDDEDESSEQTFMYYVNDGVYGSFNCILYDHAHVKPLLPKRPKPDEKYYSSSIWGPTCDGLDRIVERCNLPEMHVGDWMLFENMGAYTVAAASTFNGFQRPSIYYVMSRPMWQLMKQIQNHGFPPEVEEQDVGTLPISCAQESGMDRHPAACASASINV

SEQ ID NO: 4127 - protein, 424 aa, Mus musculus
MSSFTKDEFDCHILDEGFTAKDILDQKINEVSSSDDKDAFYVADLGDILKKHLRWLKALPRVTPFYAVKCNDSRAIVSTLAAIGTGFDCASKTEIQLVQGLGVPAERVIYANPCKQVSQIKYAASNGVQMMTFDSEIELMKVARAHPKAKLVLRIATDDSKAVCRLSVKFGATLKTSRLLLERAKELNIDVIGVSFHVGSGCTDPDTFVQAVSDARCVFDMATEVGFSMHLLDIGGGFPGSEDTKLKFEEITSVINPALDKYFPSDSGVRIIAEPGRYYVASAFTLAVNIIAKKTVWKEQPGSDDEDESNEQTFMYYVNDGVYGSFNCILYDHAHVKALLQKRPKPDEKYYSSSIWGPTCDGLDRIVERCNLPEMHVGDWMLFENMGAYTVAAASTFNGFQRPNIYYVMSRPMWQLMKQIQSHG

SEQ ID NO: 4128 - protein, 456 aa, Mus musculus
MSSFTKDEFDCHILDEGFTAKDILDQKINEVSSSDDKDAFYVADLGDILKKHLRWLKALPRVTPFYAVKCNDSRAIVSTLAAIGTGFDCASKTEIQLVQGLGVPAERVIYANPCKQVSQIKYAASNGVQMMTFDSEIELMKVARAHPKAKLVLRIATDDSKAVCRLSVKFGATLKTSRLLLERAKELNIDVIGVSFHVGSGCTDPETFVQAVSDARCVFDMATEVGFSMHLLDIGGGFPGSEDTKLKFEEITSVINPALDKYFPSDSGVRIIAEPGRYYVASAFTLAVNIIAKKTVWKEQPGSDDEDESNEQTFMYYVNDGVYGSFNCILYDHAHVKALLQKRPKPDEKYYSSSIWGPTCDGLDRIVERCNLPEMHVGDWMLFENMGAYTVAAASTFNGFQRPNIYYVMSRPMWQLMKQIQSHGFPPEVEEQDDGTLPMSCAQESGMDRHPAACFC

SEQ ID NO: 4129 - protein, 461 aa, Mus musculus
MSSFTKDEFDCHILDEGFTAKDILDQKINEVSSSDDKDAFYVADLGDILKKHLRWLKALPRVTPFYAVKCNDSRAIVSTLAAIGTGFDCASKTEIQLVQGLGVPAERVIYANPCKQVSQIKYAASNGVQMMTFDSEIELMKVARAHPKAKLVLRIATDDSKAVCRLSVKFGATLKTSRLLLERAKELNIDVIGVSFHVGSGCTDPDTFVQAVSDARCVFDMATEVGFSMHLLDIGGGFPGSEDTKLKFEEITSVINPALDKYFPSDSGVRIIAEPGRYYVASAFTLAVNIIAKKTVWKEQPGSDDEDESNEQTFMYYVNDGVYGSFNCILYDHAHVKALLQKRPKPDEKYYSSSIWGPTCDGLDRIVERCNLPEMHVGDWMLFENMGAYTVAAASTFNGFQRPNIYYVMSRPMWQLMKQIQSHGFPPEVEEQDDGTLPMSCAQESGMDRHPAACASARINV

SEQ ID NO: 4130 - protein, 355 aa, Mus musculus
MKSLPTDDKDAFYVADLGDILKKQQRWLKALPRVTPVYAVKRNDSRAIVSTLAAIGTGFDCASKTEIQLVQGLGVPPERIIYANPCKQVSQIKYAASNGVQMMTFDSEIELMKVARAHPKAKLVLRIATDDSKAVCRLSVKFGATLKTSRLLLERAKELNIDVIGVSFHVGSGCTDPETFVQAVLDARCVFDMATEVGFSMYLLDIGGGFPGSEDTKLKFEEITSVINPALDKYFPSDSGVRIIAETGRYYVASAFMLAVNIIVKKTVWKEQPGSDDEDESNEQTFMYYVNDGVYGSFNCILYDHAHVKALLQKRPKPDEKYYSPSIWGQHVMALIGSWSAVTCLKCMWVIRMLV

SEQ ID NO: 4131 - protein, 306 aa, Mus musculus
MSSFTKDEFDCHILDEGFTAKDILDQKINEVSSSDDKDAFYVADLGDILKKQQRWLKALPRFTPFYAVKCNDSRAIVSTLAAIGTGFDCASKTEKQLVQGPGVPPERIIYANPCKQVSQIKYAASNGVQMMTFDSEIELMKVARAHPKAKLVLRIATDDSKAVCRLSVKFGATLKTSRLLLERAKELNIDVIGVSFHVGSGCTDPDTFVQAVSDARCVFDMATEVGFSMHLLDIGGGFPRSEDTKLKFEEITSVITPALDKYFPSDSGVRIRAEPGKYYVASAFTLAVNIIAKKKKKKHVEGAARL

SEQ ID NO: 4132 - protein, 459 aa, Mus musculus
MAGYLSESDFVMVEEGFSTRDLLEELTLGASQATSGKVAAFFVADLGAVVRKHFCFLKHLPRVRPFYAVGCNSSLGVLKVLAELGLGFSCANKAEMELVQHIGVPASKIICANPCKQVAQIKYAAKHGVRLLSFDNEVELAKVVKSHPSAKMVLCIATQDSHSLNHLSLRFGASLKSCRHLLENAKKSHVEVVGVSFHIGSGCPDPQAYAQSIADARLVFQMGEELGHTMNILDLGGGFPGLEGAKVRFEEMASVINSALDLYFPEGCGVDILAELGRYYVTSAFTVAVSIVAKREVLDQASREEQTGAAPKSIVYYLDEGVYGVFNSVLFDNTCPTPALQKKPSADQPLYSSSLWGPAVEGCDCVAEGLWLPQLQVGDWLVFDNMGAYTVDTKSLLGGTQARRVTYAMSRLAWEALRGQLLPAEEDQDAEGVCKPLSCGWEITDTLCVGPVFTPASIM

SEQ ID NO: 4133 - protein, 448 aa, Mus musculus
MKGFIDDANYSVGLLDEGTNLGNVIDNYVYEHTLTEKNAFFVGDLGKIVKKHSQWQTVVAQIKPFYTVKCNSTPAVLEILAALGTGFACSSKNEMALVQELGVSPENIIFTSPCKQVSQIKYAAKVGVNIMTCDNEIELKKIARNHPNAKVLLHIATEDNIGGEDGNMKFGTTLKNCRHLLECAKELDVQIIGVKFHVSSACKEYQVYVHALSDARCVFDMAGEFGFTMNMLDIGGGFTGTEIQLEEVNHVISPLLDIYFPEGSGIQIISEPGSYYVSSAFTLAVNIIAKKVVENDKFSSGVEKNGSDEPAFVYYMNDGVYGSFASKLSEDLNTIPEVHKKYKEDEPLFTSSLWGPSCDELDQIVESCLLPELNVGDWLIFDNMGADSFHEPSAFNDFQRPAIYFMMSFSDWYEMQDAGITSDAMMKNFFFAPSCIQLSQEDSFSTEA

SEQ ID NO: 4134 - protein, 448 aa, Mus musculus
MKGFIDDANYSVGLLDEGTNLGNVIDNYVYEHTLTGKNAFFVGDLGKIVKKHSQWQTVVAQIKPFYTVKCNSTPAVLEILAALGTGFACSSKNEMALVQELGVSPENIIFTSPCKQVSQIKYAAKVGVNIMTCDNEIELKKIARNHPNAKVLLHIATEDNIGGEDGNMKFGTTLKNCRHLLECAKELDVQIIGVKFHVSSACKEYQVYVHALSDARCVFDMAGEFGFTMNMLDIGGGFTGTEIQLEEVNHVISPLLDIYFPEGSGIQIISEPGSYYVSSAFTLAVNIIAKKVVENDKFSSGVEKNGSDEPAFVYYMNDGVYGSFASKLSEDLNTIPEVHKKYKEDEPLFTSSLWGPSCDELDQIVESCLLPELNVGDWLIFDNMGADSFHEPSAFNDFQRPAIYFMMSFSDWYEMQDAGITSDAMMKNFFFAPSCIQLSQEDSFSTEA

SEQ ID NO: 4135 - protein, 448 aa, Mus musculus
MKGFIDDANYSVGLLDEGTNLGNVIDNYVYEHTLTGKNAFFVGDLGKIVKKHSQWQTVVAQIKPFYTVKCNSTPAVLEILAALGTGFACSSKNEMALVQELGVSPENIIFTSPCKQVSQIKYAAKVGVNIMTCDNEIELKKIARNHPNAKVLLHIATEDNIGGEDGNMKFGTTLKNCRHLLECAKELDVQIIGVKFHVSSACKEYQVYVHALSDARCVFDMAGEFGFTMNMLDIGGGFTGTEIQLEEVNHVISPLLDIYFPEGSGIQIISEPGSYYVSSAFTLAVNIIAKKVVENDKFSSGVEKNGSDEPAFVYYMNDGVYGSFASKLSEDLNTIPEVHKKYKEDEPLFTSSLWGPSCDELDQIVEGCLLPELNVGDWLIFDNMGADSFHEPSAFNDFQRPAIYFMMSFSDWYEMQDAGITSDAMMKNFFFAPSCIQLSQEDSFSTEA

SEQ ID NO: 4136 - protein, 191 aa, Mus musculus
MKALLLRTFWNKKINEVSSSDDKDAFYVADLGDILKKHLRWLKALPRVTPVYAVKCNDSRAIVSTLAAFGIGFDCASKTEIQLVQGPGVPPETIIYANPCKQVSQIKYAASSGVQMMTFDSEIELMKVARAHPKAKLVLRIATDDSKAVCRLSVKFGATLKTSRLLLERAKELNIDVIGVSFHVGSGCTDP

SEQ ID NO: 4137 - protein, 284 aa, Mus musculus
WLLLERAKELNIDVIGVSFHVGSGCTDPETFVQAVSDARCVFDMATEVGFSMHLLDIGGGFPGSEDTKLKFEEITSVINPALDKYFPSDSGVRIIAEPGRYYVASAFTLAVNIIAKKTVWKEQPGSDDEDESNEQTFMYYVNDGVYGSFNCILYDHAHVKALLQKRPKPDEKYYSSSIWGPTCDGLDRIVERCNLPEMHVGDWMLFENMGAYTVAAASTFNGFQRPNIYYVMSRPMWQLMKQIQSHGFPPEVEEQDDGTLPMSCAQESGMDRHPAACASARINV

SEQ ID NO: 4138 - protein, 356 aa, Mus musculus
MSSFTKDEFDCHILDEGAKDILDQKINEVFSSDDKDAFYVADLGDILKKQQRWLKALPRVTPFYAIKCNDSRAIDKTEKQLVQGPGVSPERIIYANPCKQVSQIEYAASNRVQMTFDSEIELMKVARAHPKAKLVLHIATDDPKAVCRLSVKFGATLKTSRLHLERAKELNIDVIGVSFHVGSGCTDPETFVQAVSDARCVFDMGTEVGFSMYLLDIGGGFPGSEDTKLKSEEITSVINPALDKYFPSDSGGPTCDGLDRIVELCNLPEMHVGDWMPFENMGAYTIAAASTFNGFQRPNICYVMSRPMWQLMKQIQSHGFPLEVEEQDDGTLPMSCAQESGMDRHPAAYASARINV

SEQ ID NO: 4139 - protein, 234 aa, Mus musculus
MSSYTKEEFDCCIIDVKCKDNRAIVNTLAAIGTGFDCASKTEIQLEQGLLVPPERIAYAHFCKQASQIKYAASNGVQMMTFDNDSKAVCRLGVKSGATLKTSRLLLKWAKELNIDVIDVSFHVCSGVSDARCVFDLGTKVSFSMYLLDIGGSFRRSEDTKLKFEEITSVINPALDKRQTSSTMWQLMKQIQIHGFLREEQDVDSLPVSCTQESGMDHHPAACVSASINVYMPFL

SEQ ID NO: 4140 - protein, 249 aa, Mus musculus
MSSFTKEEFDCCILDEGLSQIKYAASNGVQMMTFDSEIELMKVLRAHRKTKLVLWIVTDDSKASGTTLKTSRILLKWAKELNTDVIGVSFHVCSGCIDPETFMQAVSDARCVFDMGREVGFSMYLLDIGCGFSGSKNTKLNIEEVISVINPALEKFFPSNSVERIIAEPGRYDTQFSHSQSTSLAPTQKGQTSWPIWQLMKQIQSHGFLREEEEQDVGTLPVSCAQERGMDRHPAACVSVSINVFMPFL

SEQ ID NO: 4141 - protein, 142 aa, Mus musculus
DGVYGSFNCILYDHAHVKALLQKRPKPDEKHYSSSIWGPTCDGLDRIVERCNLPEMHVGDWMLFENMGAYTVAAASTFNGFQRPNIYYVMSRPMWQLMKQIQSHGFPPEVEEQDDGTLPMSCAQESGMDRHPAACASARINV

SEQ ID NO: 4142 - protein, 176 aa, Mus musculus
MLAVNIIAKKNVWKEQPGSDNEDESNEQTFMYYVNDGVYGSFNRILYDHAHVKALVQKRPKPDEKYYSSSIWGPTSDGLDQIVESCNLPEMHVGDWMLIENMGAYTVAASTFNGFQRPNIYYVMSRPMWQLMKQIQSHGFPPEVEEQDDGTLPMPCAQESGMDRHPAACASARINV

SEQ ID NO: 4143 - protein, 461 aa, Mus pahari
MSSFTKEEFDCHILDEGFTAKDILDQKINEVSSSDDKDAFYVADLGDILKKHLRWLKALPRVTPFYAVKCNDSRAIVSTLAATGTGFDCASKTEIQLVQGLGVPPERIIYANPCKQVSQIKYAASSGVQMMTFDSEIELMKVARAHPKAKLVLRIATDDSKAVCRLSVKFGATLKTSRLLLERAKELNIDVIGVSFHVGSGCTDPETFVQAVSDARCVFDMGTEVGFSMYLLDIGGGFPGSEDTKLKFEEITSVINPALDKYFPSDSGVRIIAEPGRYYVASAFTLAVNIIAKKTVWKEQPGSDDEDESNEQTFMYYVNDGVYGSFNCILYDHAHVKALLQKRPKPDEKYYSSSIWGPTCDGLDRIVERCNLPEMHVGDWMLFENMGAYTVAAASTFNGFQRPNIYYVMSRPMWQLMKRIQSHGFPPEVEEQDDGTLPMSCAQESGMDHHSAACASARINV

SEQ ID NO: 4144 - protein, 461 aa, Rattus norvegicus
MGSFTKEEFDCHILDEGFTAKDILDQKINEVSSSDDKDAFYVADLGDVLKKHLRWLKALPRVTPFYAVKCNDSRAIVSTLAAIGTGFDCASKTEIQLVQGLGVPPERIIYANPCKQVSQIKYAASNGVQMMTFDSEIELMKVARAHPKAKLVLRIATDDSKAVCRLSVKFGATLKTSRLLLERAKELNIDVIGVSFHVGSGCTDPETFVQAVSDARCVFDMGTEVGFSMYLLDIGGGFPGSEDTKLKFEEITSVINPALDKYFPSDSGVRIIAEPGRYYVASAFTLAVNIIAKKTVWKEQTGSDDEDESNEQTLMYYVNDGVYGSFNCILYDHAHVKALLQKRPKPDEKYYSSSIWGPTCDGLDRIVERCSLPEMHVGDWMLFENMGAYTVAAASTFNGFQRPNIYYVMSRSMWQLMKQIQSHGFPPEVEEQDVGTLPMSCAQESGMDRHPAACASASINV

SEQ ID NO: 4145 - protein, 461 aa, Rattus norvegicus
MGSFTKEEFDCHILDEGFTAKDILDQKINEVSSCDDKDAFYVADLGDVLKKHLRWLKALPRVTPFYAVKCNDSRAIVSTLAAIGTGFDCASKTEIQLVQGLGVPPERIIYANPCKQVSQIKYAASNGVQMMTFDSEIELMKVARAHPKAKLVLRIATDDSKAVCRLSVKFGATLKTSRLLLERAKELNIDVIGVSFHVGSGCTDPETFVQAVSDARCVFDMGTEVGFSMYLLDIGGGFPGSEDTKLKFEEITSVINPALDKYFPSDSGVRIIAEPGRYYVASAFTLAVNIIAKKTVWKEQTGSDDEDESNEQTLMYYVNDGVYGSFNCILYDHAHVKALLQKRPKPDEKYYSSSIWGPTCDGLDRIVERCSLPEMHVGDWMLFENMGAYTVAAASTFNGFQRPNIYYVMSRSMWQLMKQIQSHGFPPEVEEQDVGTLPMSCAQESGMDRHPAACASASINV

SEQ ID NO: 4146 - protein, 448 aa, Rattus norvegicus
MKGFIDDANYSVGLLDEGTNLGNVIDNYVYEHTLTGKNAFFVGDLGKIVKKHSQWQNVVAQIKPFYMVKCNSTPAVLEILAALGTGFACSTKNEMALVQELGVSPENIIYTSPCKQASQIKYAAKVGVNIMTCDNEVELKKIARNHPNAKVLLHIATEDNIGGEDGNMKFGTTLKNCRHLLECAKELDVQIIGVKFHISSACKEYQVYVHALSDARCVFDMAGEFGFTMNMLDIGGGFTGTEIQLEEVNHVISPLLDIYFPEGSGIQIISEPGSYYVSSAFTLAVNIIAKKVVENDKLSSGVEKNGSDEPAFVYYMNDGVYGSFASKLSEDLNTVPEVHKKYKEDEPLFTSSLWGPSCDELDQIVESCLLPELSVGDWLIFDNMGADSLHGPSAFSDTQRPAIYFMMSLSDWYEMQDAGITSDAMMKNFFFAPSCIQLSQEDNFSTEA

SEQ ID NO: 4147 - protein, 527 aa, Rattus norvegicus
MTTPSEGRREPLGVTESLWPSEPITLGPETSARQLVLKKIQDLSISGHQDPFMVADLDVLASRHQTFLQALPRVWPFYAVKCNNRPSLLLVLAALGTGFDCASQGELEQVLGLGVAPSRIIFANPCKAVSHIQYAARCGVQLLTFDSEEELTKLARHHPGARLILRIQTLGGRSTFPLHTKFGARLLACGRLLQVARELGLAVVGASGPVSSWHWLAQVWKPVGGWVFLGVSPLTLTSVFTCVSSTPMATLSFHVGSDCHTPQSYRQAIADCHRVFEMGCKAGHQMSLLDLGGGFPGIEGSEAKFEEMARVVNAALAQYFPEGTGVEVIAEPGRFYAESVCTAAVNIIAKKASLEPGGHRKLAYYLNEGHYGAFRIFLRDPVPRIPIVVKELPSDPHLFPCTLYGPTCDAFDRLFSTEVQLPELDVGDWLVFPDMGAYRSTMSSTFNGFPITTVYDAMSPQLSSGTKGISSRQRREGRSVVSMAAEVRRDEVGKRELRGCQWALVHVSKKPCGDLETFLDPLYLLRV

SEQ ID NO: 4148 - protein, 269 aa, Rattus norvegicus
MTFDSEIELTKVTRAHPEAKLVLRIATDGSKAVCHLRVKFGATLKTSRLLMGQAKELNIDVIGICFHVDNRCTDPETFPQAVSDACCVFVGVSIYLLDNGDPGVRIIAEPGRYYFMSAFTLAVNIIAKSTLWQERPSSDNEDESMSKPSCIREKYEKYYSSSIWGPTCDGLHQIIEPCNLPEMHVGDWMLFENMGAYTVAAASIFNGFQRPNIYYVMSRWQLMKQIQSQGFPTEVEEQDVGTLPMLVPRRMFVSVPIRRKNSPKDSGKI

SEQ ID NO: 4149 - protein, 335 aa, Rattus norvegicus
MASEQKTKLSTNLMRMKFMQRGLDSENQKQLEEEEQKMIRDEHWYLDSPGLKEESFIIEEQSFSLCEDLLYRRMPFRGFNPEVEKLMLRMNSKNRAAAAEVEETIEGHVSGEEMARRYETLDLTVQARLKYNWCTGLGWLQSITYANPCKQVSQIKYATSNGVHIRTFDSEIELMQVNRAQTKAKLVLQLDIDTSKAFCPLNVKFGVSLKTSRLLMEKAKQIKSDIIGISFHAGSGCTAPETFLQALTDASCVVPMGTKVVVSMYLLDIGGGSPVSEDTTCNFKHYKILRTWEIQSHGFPPEVDEQDVGSFPISCLQESRKDPHPTACASATLNV

SEQ ID NO: 4150 - protein, 238 aa, Rattus norvegicus
MPKDKNPDNPRAAELFHQLSQALEDLTVQARLKYNWCTGLGWLQSITYANPCKQVSQIKYATSNGVHIRTCDSEIELMQVTRAQTKAKLVLQLDIDTSKAFCPLNVKFGISLKTSRLLMEKAKEIKSDILGLSFHAGSGCTSRETFLQALTDASCVVAMGTKVVVSMYLLDIGGGSPVSEDTTCNFKHYEILRTWEIQSHGFPPEVDEQDVGSFPISCLQESRKDPHPTACASATLNV

SEQ ID NO: 4151 - protein, 186 aa, Rattus norvegicus
MGEAKEKLAAYQLPSPFACIPAILDTGSDDEEESNEQTLMYYVNDGVYGSFNCILYDHAHVKALLQKRPKPDEKYYSSSIWRPTCDGLDRIVERCSLPEMHVGDWMLFENMGAYTVAAASTFNGFQRPNIYYVMSRSMWQLMKQIQSHGFPPEVEEQDVGTLPMSCAQERGMDRHPAACASASINV

SEQ ID NO: 4152 - protein, 372 aa, Paramecium bursaria Chlorella virus 1
MNSVVNNILKAHPHQTKSFYVSSPKIVEDLIDQWTILFPRVTPHYAVKCNNDEVLLKTMCDKNVNFDCASSSEIKKVIQIGVSPSRIIFAHTMKTIDDLIFAKDQGVDIATFDSSFELDKIHTYHPNCKMILRIRCDDPNATVQLGNKFGANEDEIRHLLEYAKQLDIEVIGISFHVGSGSRNPEAYYRAIKSSKEAFNEAISVGHKPYILDIGGGLHADIDEGELSTYMSDYINDAIKDFFPEDTVTIVAEPGRFFAEHYSVLATQVIGKRVRDGLYEYFFNESTYGGFSNVIFEKSVPTPQLLRDVPDDEEYVPSVLYGCTCDGVDVINHNVALPELHIGDWVYFPSWGAYTNVLTTSFNGFGEYDVYYI

SEQ ID NO: 4153 - protein, 404 aa, Rhodobacter sphaeroides
MPPNFPPCNAGRGLASCWPKGTPMGLSKTIWTNPAEYLRALSPEAPVLFFSPSTLQATARRFIDGFPGMVTYAVKSNPEEVVIENLAAAGIRGYDVASPHEIRMIRRIAPDAALHYNNPVRSRSEIGVGVEMGVKSWSVDSASELAKLIELVPAEGCEIAVRFKLAVSGAAYNFGAKFGATVELAVELLRRVAEAGFIPSMTFHPGTQCTDPAAWETYIRTAAEIARDAGVTIARLNVGGGFPSHRLNGVEPELEAIFHLIDRVTDEAFGADRPLLVCEPGRGICADAFTLAARIKAVRDDAHVFLNDGVYGSLTELPMIGVIDRVAVLTPEGRRRDGETRDRIIFGPTCDSVDRLPGELPLAADVEEGDFLVFQGMGAYSAATNTRFNGFGELSMATVLSLKL

SEQ ID NO: 4154 - protein, 458 aa, Rhodobacter sphaeroides
MARAPIPRPAPRPGPRSSAPAGASAPSRAPDLQADQTMDHFLYRNGSLHAEEVPLSDIAATVGTPFYCYSAATLERHYRLFTEALTPLPHLVCFAIKSLSNLAVLKLLGDLGAGMDVVSAGEYLRARAAGVPGDRIVFSGVGKTREEMRIALEGGIRQFNVESEPEMRALSEVASSMGLRAPIAVRVNPDVDARTHEKIATGKKENKFGIPIERASEVYAEAAALPGLEVMGIDVHIGSQLTELEPFEQAYLKVAELTGRLRAEGHEIRRLDLGGGLGIPYTRSNEAPPLPTDYGALIKRTVGHLGCEIEIEPGRLISGNSGVLVSRVIYVKNGEGRDFLILDAAMNDLVRPSMYGAHHDIVPLAEAAPGTESQPYDVVGPVCETGDTFAKARALPPMAEGDLVAFRSAGAYGAVMASEYNSRPLVPEVLVRGDHFAVIRARPTFDEMLGRDSIPEWL

SEQ ID NO: 4155 - protein, 380 aa, Rhodopseudomonas palustris
MTERIREFLRDRRAKGLDVEPCLVVDLEVVRDNFMHFAKALPDSRVFYAIKANPAPEVLSLLASLGSCFDCASVQEIQMALAAGATPDRISFGNTIKKERDIARAYELGIRLFSVDCTPEVEKVARAAPGSKVFCRILYDCAGAEWPLSRKFGCDPEMAVDVLDNAKRLGLEAYGISFHVGSQQRKVKAWDRALAMAAQVFRDCAERGISLSMVNMGGGFPTKYLKEVPPVVQYGRSIFRALRKHFGNQIPETIIEPGRGMVGNAGVIETEVVLISKKSDEDDVRWVYLDIGKFGGLAETMDESIRYAIKSRHDGAEMTPCVLAGPTCDSADVLYEKMPYPLPVTLEIGDKLLIEGTGAYTSTYSSVAFNGFPPLATYHI

SEQ ID NO: 4156 - protein, 421 aa, Rhodopseudomonas palustris
MRHFDYRDGVLHAEGVSLASIAQDVGTPFYCYSSATLERHYRVFTEAFAGLDALVCYAMKANSNQSVLRTLAKLGAGADVVSGGELQRALAAGIPPSKIVFSGVGKTEAELRAALDHDIKCLNVESEPELEQLSRIAVETGRTARISLRVNPDVDSGTHAKISTGKSENKFGIPIRHAREVYARAAKLPGIQVTGVDVHIGSQIIDLAPMEAAFRKVAEFIHVLRGDGHTVNHVDFGGGLGIPYYEDRDAPPEPFAYAEMVKRVTHNLGCTLLFEPGRMIVGNAGILVAKVIYVKHGDGKTFVIIDAAMNDLIRPTLYEAYHEILPVAAPAPGVATMVADVVGPVCETGDYLALDRKLPELKAGDLIAIMTAGAYGAVQACTYNTRALVPEVLVKDDQVAVVRPRIEVEQLIAMDKPAPWL

SEQ ID NO: 4157 - protein, 425 aa, Rhodospirillum rubrum
MEKLMHNQAIRANQPEEPPDAFIAAESRPPGGAPTLALVAEPPRWVATGITEKMAAFLAEEPETPCLVVDLDVVEGNYRALRGALPQAEVYYAVKSNPAPPLVARLIALGSSFDTASLPEIDLCLGLGADPAKLSFGNTIKKSKDIAAAYERGVRLFAFDAEEELEKLAEHAPGSQVFCRLFVDNVGAEWPLSRKFGCSVAMAGDLLIKAQALGLEAHGVSFHVGSQQKDLGQWDVALEKAAELFRDLAAVGITLKMVNLGGGLPTSYGNRLPYGVDEYGAHVLGAVDRLFDGPRPRLIVEPGRYMGGNAGVLETEVVLVSRKDAADDRRWVYIDAGRFNGLAETEGEAIRYPIISDKDDGETGPVIIAGPTCDSVDILYDKAGYTLPLSLKAGDRLRLLSTGAYTTSYASVGFNGFLPLKAHYL

SEQ ID NO: 4158 - protein, 445 aa, Thermoanaerobacter tengcongensis
MLHGTMRINSKGHLEIGGCDTVALAKKFGTPLYVIDEELLRQNCRAFYNGFKRDYPGNEVIYASKAFMTMAICKIIEEENLGLDVVSGGELYTALKAGFPPEKIYFHGNNKSREELIMALENDIGKIIVDNWHELNMLNELARKMNKVPNIYIRVSPGIEAHTHQYVKTGQIDSKFGFPLFNGDAMRAIEYALTLKNVNLVGLHSHIGSQIFDSYSYKAEIEIMMNFIKLIKEFLGWEVEELDLGGGFGIAYTEEDDPQPIEKIAHEMMQSVKEYSVSLNVKMPKIIVEPGRSIIGNAGTTLYTVGAIKEIPGIRKYVAVDGGMSDNIRTALYGAKYEAIVANKARLPRVEKVSIAGKLCESGDMLIWDILLPEIEEGDILAVLSTGAYNYSMASNYNRLPRPAAVLVSNGQADVIVERETYEDLVRKDVIPERLLSVKRKIVNY

SEQ ID NO: 4159 - protein, 506 aa, Ralstonia metallidurans
MLRLYRRLPPHSRCPWPDVAFAARCTCRPCRPLRRRQPWPIPDWANLMRPEPSSPRAPCRSRRPPRPCPWNRLVTVPPPQHVECRLNMTDFFSRRDGILAVEQVPLTRIADQFGSPTFVYSRAALTAAYNAYAAACKGRNAHVQYAVKANSNLAVLQVFAQLGAGFDIVSGGELLRVIAAGGDPRKVVFSGVAKNVADMELALSHDVRGFNVESIPELDRLNAVAGRLGKRARVSLRINPDVDAKTHPYISTGLKANKFGVAFEDVLPTYRAAAALPNIEVTGIDCHIGSQITEVAPYLEALDKVLDVVEALEAEGIKLEHIDVGGGLGITYNDETPPDITKFATTLIDRVAARGHGHREVLFEPGRSLVGNAGVLLTRVEFLKPGAAKNFCIVDAAMNDLARPAMYEAFHRIEPVAPRNDAGVMYDVVGPVCESGDWLGRDRTLAVQAGDLLAVMSAGAYGFVMSSNYNTRGRAAEVMVDGDTVHLVRERELPADLFRNERLLKV

SEQ ID NO: 4160 - protein, 447 aa, Paracoccidioides brasiliensis
MAPFVFAPHDIYVTRNYPDDSSNYKSSTHHGGFDLFQARDASKDLIFDILKKKVSEIDVHNCHPGEEDPFYVADLGQVYRQHIRWKKNLGRVKPFYAVKCNPDPQILRLMVQLGNGFDCASKAEIDYALDVGVDPSRIIYAQPCKTKSFLRYASQVGVKQMTFDNSDELYKIKEMCPDAELYLRILTDDSASLCRLSMKFGASLSVARSLLELAKELKLNVIGVSFHVGSGAEDPKSFVKAVEDSRFVFDQAAEVGFDLKVLDVGGGFSEDTFERFAATLSDALDEYFPPHIRIIAEPGRYYVASAFTLAANVIARRDVSLEMSDSDSTAGATEAYMIYLNDGVYGNFSNIIFDHQHPVPQILTMESRVCAPIEYSIWGPTCDGIDLICERIALPELDVGNWLYFENMGAYTKCSATRFNGFTDKHEVIYISTEPSATALLELSNEL

SEQ ID NO: 4161 - protein, 79 aa, Paracoccidioides brasiliensis
GVSFHVGSGAEDPKSFVKAVEDSRFVFDQAAEVGFDLKVLDVGGGFSEDTFERFAATLSDALDEYFPPHIRIIAEPGRI

SEQ ID NO: 4162 - protein, 414 aa, Neisseria meningitidis MC58
MTLFCEQVPYPRLAEAFGTPLYVYSQSALTEAFEHYQTAFAALNPLVCYAVKANGNLSIIKHFASLGSGFDIVSGGELARVLAAGGDAAKTIFSGVGKSEAEIEFALNAGVKCFNMESIPEIDRIQKVAARLGKTAPVSLRINPDVDAKTHPYISTGLKANKFGIAYADALEAYHYAAQQPNLKIIGIDCHIGSQLTDLSPLVEACERILILVDALAAEGIVLEHLDLGGGVGIVYQDENVPDLGAYAQAVQKLIGTRRLKLILEPGRSLVGNAGSLLTRVEFVKYGEEKNFVMVDAAMNDLMRPALYDAYHHIEAVETKDIATLTANIVGPICETGDFLGKDRTIACEEGDLLLIRSAGAYGASMASNYNARNRAAEVLVDGNEYRLIRRRETLEQQMANELACLQAEHQNAV

SEQ ID NO: 4163 - protein, 406 aa, Neisseria meningitidis Z2491
MTLFCEQVPYPRLAEAFGTPLYVYSQSALTEAFEHYQTAFAELSPLVCYAVKANGNLSIIKHFASLGSGFDIVSGGELARVLAAGGDAAKTIFSGVGKSEAEIEFALNAGVKCFNMESIPEIDRIQKVAARLGKTASVSLRVNPDVDAKTHPYISTGLKANKFGIAYADALEAYRHAAQQPNLKIIGIDCHIGSQLTDLSPLVEACERILILVDALAAEGIVLEHLDLGGGVGIVYQDEDVPDLGAYAQAVQKLIGTRRLKLILEPGRSLVGNAGALLTRVEFVKYGEEKNFVMVDAAMNDLMRPALYDAYHHIEAVEPKNIAPLTANIVGPICETGDFLGKDRTIACEEGDLLLIRSAGAYGASMASNYNARNRAAEVLVDGNEYRLIRRRETLEQQMANELACL

SEQ ID NO: 4164 - protein, 398 aa, Staphylococcus aureus
SFGTPTIVYDELQIREQMRRYHRAFKDSGLKYNISYASKAFTCIQMVKLVAEEDLQLDVVSEGELYTALEAGFEPSRIHFHGNNKTKHEIRYALENNIGYFVIDSLEEIELIDRYANDTVQVVLRVNPGVEAHTHEFIQTGQEDSKFGLSIQYGLAKKAIDKVQQSKHLKLKGVHCHIGSQIEGTEAFIETAKIVLRWLKEQGIQVELLNLGGGFGIKYVEGDESFPIESGIKDITDAIKSEIKVLGIDAPEIGIEPGRSIVGEAGVTLYEVGTIKEIPEINKYVSIDGGMSDHIRTALYDAKYQALLVNRNEEADDSVTIAGKLCESGDIIIKDAKLPSSVKRGDYLAILSTGAYHYSMASNYNQMQKPSVFFLKDGKAREVIKRQSLRQLIINDTK

SEQ ID NO: 4165 - protein, 379 aa, Deinococcus radiodurans
MSLSRHALQDAAQRFGTPLYLYDAEELDAALWRVQRAFGDARIFYAMKANPNLNLLRRYAAAGVGFECVSLGELLRAEAAGAGGERMILNGPAKSDAEYAAAARLGATIVVDREEEVVLLPPGSRVLVRVNPAMTVSTHEHLATGTARSKFGLTPEQVPGTLAELRDAGHEVLGLHMHIGSAIEQAEDFTAAFARVTELRAHIGGLSVLNVGGGWSLNADLEGIAYEAHEAARVFGAELWVEPGRYLVASAGWLLTRVVGTKRTGRNFCLVDAGMTEFLRPMLYGASHPLYPMWDALATEVWDVAGPACESGDLIARGVPLPTPQRGHLLLIGEAGAYGASMSSTYLSRPRPAEVLWTGHDWQLLRRRETPQDIWAAEV

SEQ ID NO: 4166 - protein, 402 aa, Burkholderia fungorum
MTLTFVRRPPGLQFGGLDVRQLADRAGRTPFFAYDRSAIDIRVRELRNLLPAGMHLHYSIKANPMPAVIHHLAQRVDGFDVASAQEMALALDAGTAPDAIGFAGPGKSHDDLRRAVASGINVHVESETQLRLVTALGWELGVQPSVAIRVNPDFQVGHSGMRMGGGAAPFGVDVDQVPALLRELEAREVALAGFHVFWGSQCLHAATIIKAQRQSADLILRLASGVPRPLRFVNLGGGFGIPYFPGETPLDVKAVCEAMQDWLPPLCERLPGTTPILELGRYLVGEAGIYVCRVIDRKVSRGRTFVVTDGGLHHHLAASGNFGQVLRRNFPVVIGNRPDGVPRERCHVVGCLCTPLDRLADEVELPEAHIGDFVVIMQSGAYGRSASPVRFLSHPEPVEMLV

SEQ ID NO: 4167 - protein, 420 aa, Burkholderia fungorum
MTRSAFDYVDGVLHAEGVSAVSLAEQFGTPLYVYSRAALTAAWNAYAGACAGRRASVHVAVKANSNLAVLNVFARLGAGFDIVSGGELARVLAAGGKAENTVFSGVGKNANEMREALAAGVKCFNVESIPELDRLNAVAAEMGKKAPVSLRVNPDVDAKTHPYISTGLKSNKFGVAFEDARATYQAAAGMANLEVVGIDCHIGSQITEAAPYLDAVDKVLELVEQIEQDGLKIRHIDVGGGLGITYDDETPPEIGEFVRTVLDRIEARGHGHREVYFEPGRSLVGNAGVLLTRVEFLKPGAEKNFAIVDAAMNDLARPAMYEAYHAIDPVVKRDVPAHVYDVVGPVCESGDWLGRERLLAVEPGDLLAIRSAGAYGFVMSSNYNTRPRAAEVMVDGTQVHVARAREEVRQLFVGETILPA

SEQ ID NO: 4168 - protein, 445 aa, Phaeosphaeria nodorum
MAPSAITTTEEYQTLKDSLQSLNSQTLGSVENHGAWKSKQLIGSALKSRVEAIDHDSCDVGDEDAFFIADLGEVYRQHLRWKKNLARVKPHYAVKCNPDTQVLRLMSELGMGFDCASKNEIETVLKLGVDPARIIYAQPCKTKSYVRYAANSGVKQMTFDNADELYKTKQLFPDAELYLRILTDDSGSLCRLSQKFGASLDTTAELLELAHKLELNVVGVAFHVGSGASDPKAFIKAVQDARFVFDQAAAFGFDMHTLDVGGGFTGDITFEPMAAVLSASLDEYFPPHIRVIGEPGRYYVSTAFTIACHVIARRTVADATLGTTSYMLYLNDGVYGNFSSIIFDHQHPVPRVLKSGNDVLYDVRTSGYDTPSQVEYSIWGPTCDGIDIISSSCSFPELLDVGDWLYFEDMGAYTKCSATKFNGFTDSHDVVYVCSEPGAKALMGM

SEQ ID NO: 4169 - protein, 428 aa, Bacillus circulans
MNLDQAEITALTKRFETPFYLYDGDFIEAHYRQLRSRTNPAIQFYLSLKANNNIHLAKLFRQWGLGVEVASAGELALARHAGFSAENIIFSGPGKKRSELEIAVQSGIYCIIAESVEELFYIEELAEKENKTARVAIRINPDKSFGSTAIKMGGVPRQFGMDESMLDAVMDAVRSLQFTKFIGIHVYTGTQNLNTDSIIESMKYTVDLGRNIYERYGIVCECINLGGGFGVPYFSHEKALDIGKITRTVSDYVQEARDTRFPQTTFIIESGRYLLAQAAVYVTEVLYRKASKGEVFVIVDGGMHHHAASTFRGRSMRSNYPMEYIPVREDSGRRELEKVTIAGPLCTPEDCLGKDVHVPALYPGDLVCVLNSGAYGLSFSPVHFLGHPTPIEILKRNGSYELIRRKGTADDIVATQLQTESNLLFVDK

SEQ ID NO: 4170 - protein, 434 aa, Magnetococcus sp. MC-1
MCHDTRDFSPRWGVMMDYFHYQDDQLFCEEVALEQIAQAVGTPFYCYSERTLLHHLQVFQQAFASQDSLICYSVKANSNLAVLDALAKQGAGFDIVSGGELERVRRVGCPGERVVFSGVGKSRAEIQAALAYGVRMFNVESIPELQRIQEVALAMDVAAPVTLRINPDVDPKTHPYISTGLKRNKFGIPFGEAVAVYQQAAQMSHVQVVGLDCHIGSQLTQLSPFVDALKRVMVLIQALKGHGIEIKNLDLGGGLGIPYEDGDTPPSPAELAAALLEQLDGMPVTVILEPGRAIVGNAGVLVTRVEYVKKGEQRHFVITDAGMNDLLRPAIYNAYHGVIPLQRKFDREEQVVDVVGPICETGDFFARDRYLSEVYQGELLAVRSAGAYGFVMSSNYNTRPRVAEVLVRGDRYAVVRKRESVAQLLENESLFEDA

SEQ ID NO: 4171 - protein, 421 aa, Staphylococcus aureus subsp. aureus Mu50
MTVKYNQNGELTMDGISLKTIAQSFGTPTIVYDELQIREQMRRYHRAFKDSGLKYNISYASKAFTCIQMVKLVAEEDLQLDVVSEGELYTALEAGFEPSRIHFHGNNKTKHEIRYALENNIGYFVIDSLEEIELIDRYANDTVQVVLRVNPGVEAHTHEFIQTGQEDSKFGLSIQYGLAKKAIDKVQQSKHLKLKGVHCHIGSQIEGTEAFIETAKIVLRWLKEQGIQVELLNLGGGFGIKYVEGDESFPIESGIKDITDAIKSEIKVLGIDAPEIGIEPGRSIVGEAGVTLYEVGTIKEIPEINKYVSIDGGMSDHIRTALYDAKYQALLVNRNEEADDSVTIAGKLCESGDIIIKDAKLPSSVKRGDYLAILSTGAYHYSMASNYNQMQKPSVFFLKDGKAREVIKRQSLRQLIINDTK

SEQ ID NO: 4172 - protein, 371 aa, Pseudomonas putida KT2440
MKAFADKQETPFVLIDTQMISQAYDDLRAGFEFAKVYYAVKANPAVEIIDLLKEKGSSFDIASIYELDKVMGRGVSADRISYGNTIKKSKDIRYFYEKGVRLYATDSEADLRNIAKAAPGSKVYVRILTEGSTTADWPLSRKFGCQTDMAMDLLILARDLGLVPYGISFHVGSQQRDISVWDAAIAKVKVIFERLKEEDGIELKLINMGGGFPANYITRTNSLETYAEEIIRFLKEDFGDELPEIILEPGRSLIANAGILVSEVVLVARKSRTAVERWIYTDVGKFSGLIETMDEAIKFPIWTEKKGEAEEVVIAGPTCDSADIMYENYKYGLPLNLAIGDRLYWLSTGAYTTSYSAVEFNGFPPLKAYYL

SEQ ID NO: 4173 - protein, 415 aa, Pseudomonas putida KT2440
MNAFNYRDGELFAEGVALSAIAERYGTPTYVYSRAHIEAQYRSYADALQGTEHLVCFAVKANSNLGVLNVLARLGAGFDIVSGGELERVLAAGGRADRVVFSGVGKTREDMRRALEVGVHCFNVESTDELERLQVVAAEMGKVAPVSLRVNPDVDAGTHPYISTGLKENKFGIAIADAEAIYVRAAQLPNLEVVGVDCHIGSQLTTVEPFLDALDRLLVLVDRLAECGIHLRHLDLGGGVGVRYRDEQPPRVADYIKAIRERVGERDLALVFEPGRYIVANAGVLLTRVEYLKHTEHKDFAIIDAAMNDLIRPALYQAWMGVSAVKPRAGEGRAYDLVGPICETGDFLGKDRVLNLAEGDLLAVESAGAYGFVMSSNYNTRGRCAEILVDGDQAFEVRRRETVAELYAGESLLPE

SEQ ID NO: 4174 - protein, 410 aa, Pseudomonas putida KT2440
MTAPFTLLAEAVRQHGSPLWAYDTRTIADRVEQLNVFDTVRFAQKANPNLHVLRLMRAHGLVLDAVSLGEMERAFAAGASVDGDPAGVVLTCDALDRPTLERVVASKIEVNAGSIDMLHQLGERSPGHRVWIRINPGFGHGHSRKTNTGGENSKHGIWHEELDEALACIKAHGLHLVGVHMHIGSGVDYQHLEQVARSMIELIGRLGVDIEAFSIGGGLSTPYRSTDKPVDLQRYAQTWAVARKEIEAMLGHPVRMEIEPGRFLVAESGYLVAEVRAVKQVGRNTFVIIDAGFNDLMRPAMYGAYHGMTLLDADGQAVDRPRQPTVVAGPLCESGDVFTQDDQALTPQDLPQAQVGDLLVIHDAGAYGASMSSNYNSRPLLPEFLIENGALRMIRRRQTVQDLLSLEADF

SEQ ID NO: 4175 - protein, 453 aa, Anopheles gambiae str. PEST
NSAYHIPKSHTQTVRSKAPCSKMKFLENESDKIEIVDGEVEVPAIIDQLAEQLPTDNPFYVMDIGDIVRKHQQWIEKMPRVVPHYAVKCNDTDLVCATLAALGASFDCASKGEIAKILSLGVAPERIIFANPMKPASHVRYAASNAVKTMTYDSDTELHKIKQYCPDAKLVIRIRCEAEKAQCPLGKKFGCDPVEEAPRLIKIARSLGLEVIGVSFHVGSGCADFPIYYKAISYARDLFDYAAQLGYSFSLLDIGGGFPGDTGTSIDEVAMIVNAALDTFFPDKAVRVISEPGRYYVSSAFTLVTNVQSKRVCLNARTGTIDRMMYYLNDGVYASFNSILYDHQVPQPKLIGGQAGKQYKSTLWGPTCDALDQLIETIALPELQIDDWVVFENMGAYTIPVASPFNGFELPKVYCYISRKHWEMLETLFPLQNECSLIAASRLPASYEPVACA

SEQ ID NO: 4176 - protein, 390 aa, Anopheles gambiae str. PEST
LEEEISRIIEDEPREHPLHLLDLDDLVGKHLVWLRSMPRVTPFYAVKCNDDPAILATLAALGTGFDCASEAEMRTILALGVTPDRIIFAHPIKSVQALAFAKAHGIRRMTFDNECELEKVAREYPEAELVLRIRHDSDRVLIALGKKFGCDARGDGRVLLARAQALGVAVIGVSFHVGCGSLDADCFYHAIASARSVFDYAKDELGMRLWLLDVGGGFPGDNDKPIDQYAEAVSRALQEFFPPEQDEEVYVLGEPGRFYVGSAATLLTTVQGKKIVRDDAGQIQQMMYYINDGVFGTLFDWLSLREIKDLKRAVPLVRREREHEPAFPTTIWGPTCDSTDIVCEDVPYPEHHIGDYIVFENLGAYGMTFATNFNGFPKPTVQVYVKEHTW

SEQ ID NO: 4177 - protein, 374 aa, Anopheles gambiae str. PEST
VRMGPHEEPLHVLDLDDVVRKHYGWCAQMPRVKPYYAVKCNDDPRILQTLMTLGTGFDCASKGEMERMLGYGVKPESIIFAQPAKSIPSLLYARSKQVSVMTFDGAVELEKIHQYYPEARLVLRMRHDSLKVRCSLGKKFGCDPIAEAPELLRYAATLRMNVIGISFHVGSDCDEHEVYYEAVKIAKGLFEYAKTIGYEFSLLDIGGGFPGDNDKPIDRYVQAVNVAIDQFFPAESDIRIIAEPGRYYVSSAVTLVSFVDSKRVMKEKQPDGTEKTRMYYYLNDGIFGTFYCTALEGQQVVPIVRSKLTKRYDTTLWGPTCHVVDKIAEARLPELDVGDSVVFENVGAYGMVLANQFNGFPLPKVRAYLREGTW

SEQ ID NO: 4178 - protein, 299 aa, Anopheles gambiae str. PEST
VLNLDDIVAKHRNWQAKLPTVAPFYAVKCNSHPTILRLLAALGCGFDCASRAELDSVLELGVTPDRIVYAHPNKSIGSIVHAKKLGVKRMTFDGSDELEKLARHYPEAELILRVRHDAAAAQLSLGRKFGCDQVRDARPLLERARELGLSVIGVSFHVGSGSMDAECFYGGIRKAIEIFRVGSTLGMKMELLDVGGGYPGANGALFDRCAYYINKALKELVPTPVAVIAEPGKYYVESAVTALVNVVSKSYEKDVDGAVVRVRYYVDDGLYDTFDWCDDQGSGPLLQEDKRGAPCVRSV

SEQ ID NO: 4179 - protein, 307 aa, Anopheles gambiae str. PEST
EEPLHVLDLDDVVRKHYGWCAQMPRVKPYYAVKCNDDPRILQTLMTLGTGFDCASKGEMERMLGYGVKPESIIFAQPAKSIPSLLYARSKQVSVMTFDGAVELEKIHQYYPEARLVAHAPRLTEAKGLFEYAKTIGYEFSLLDIGGGFPGDNDKPIDRYVQAVNVAIDQFFPAESDIRIIAEPGRYYVSSAVTLVSFVDSKRVMKEKQPDGTEKTRMYYYLNDGIFGTFYCTALEGQQVVPIVRSKLTKRYDTTLWGPTCHVVDKIAEARLPELDVGDSVVFENVGAYGMVLANQFNGFPLPKVRAY

SEQ ID NO: 4180 - protein, 408 aa, Anopheles gambiae str. PEST
CPPRMESSPEPLSVFATTKALLLKRFVAQGHTETSLNILDLDEIVHSHHRAMARFGSFATPYYPPGVNNHPAALTILSKLGLGFSCASIAEMGAVLGTGVPPQRIILAHPVKSPDTILYAKQQDIQRIVCDSVQEITKVQRLYPMAKIILRLRMCVTQKFGCCPYNDVEEILHYIKSAQTVTIEGIHIALLQTPSAPSLLGETLQKAIHIAQDVFNLAHALGCPDIPELILSGMDNVPPAELQQIPTAFYHDPTLRIIIETDRQLVESAVTLLASVQSKRVIRLGGTDGPVLEIMYFINDGRYGSFEWWNAVDKRPAVIRSDGTVLHAGLTYPSSLWGQSCDSADIICERIELPELEIGDYLVFSGMGAYGVTLASRFNGFPIPETVVCAGQSTTKALIESTGTRWLS

SEQ ID NO: 4181 - protein, 465 aa, Agrobacterium tumefaciens str. C58 (U. Washington)
MRAFLVLCRLSISRGTEEAHHHCLKCGRVIPSNRWQTKPNDALAGHRSHSRLERMLSILRLHRLIRMHISSVLCPPDSAGVGFIGNISMTTARILDFIKTRRPEGPCLVVDLDVVRDNFNAFRHSLPNSAIYYAVKANPAPEILKLLASLGSNFDCASVAEIQMALDAGATSDRISFGNTIKKERDVARAHALGIDLFAVDSHEEVEKVARAAPGARVFCRVLTDGEGAEWPLSRKFGCVPQMAVDVLVYAHQMGLESYGVSFHVGSQMMNLDAWDAALADAKRVFASLAKQGIHLQMVNMGGGFPTKYLRDVPAAEEYGQAIDTALRKHFGNQIPKTIIEPGRGMVGNAGVIKAEVVLVSKKSDNDNHRWVFLDIGKFGGLAETMDEAIRYPIRTERDQDEMQPCVLAGPTCDSADVLYEKNMYPLPVSLTIGDEVLIEGTGAYTTTYSAVAFNGFEPLKAYVI

SEQ ID NO: 4182 - protein, 393 aa, Agrobacterium tumefaciens str. C58 (U. Washington)
MRDIVAETGTPCFLYDNSAMRQAYRDLETALSGFADIYYSVKANPLPAIISLFREEGAGAEIASVGEYRAAVKAGVAPDNIIFAGPGKSMAELREVIEGGIGEIHIESAEEIARIEAINRPVKASIRINPVPDAQAGAMRMGGKATAFGFDEEELENVLKLFANVRHIDLVGIHIYGGTQILDADMLVSQWRHAIALAGRMAQMLGKPLETIDLGGGLGIPYFAGETSLDLAKVAAAIPDLKALLKAHPLIADAHVIVEPGRFLAGPGGLYVVEVNSVKTSRGTTFVVTDGGMHHHLAASGNLGQIVKRNYPIVAPAMMQAAHDETATIVGPLCTPLDTLARNATLPKLNAGDLLAILQSGAYGASASPGGFLSHTVAKEVLVEDGAFEVIGR

SEQ ID NO: 4183 - protein, 512 aa, Agrobacterium tumefaciens str. C58 (Cereon)
MLPKVARAHVCPPSPRCGEDLGKVPGTNPSSRYSGQPGNARTYEATTVRAFLVLCRLSISRGTEEAHHHCLKCGRVIPSNRWQTKPNDALAGHRSHSRLERMLSILRLHRLIRMHISSVLCPPDSAGVGFIGNISMTTARILDFIKTRRPEGPCLVVDLDVVRDNFNAFRHSLPNSAIYYAVKANPAPEILKLLASLGSNFDCASVAEIQMALDAGATSDRISFGNTIKKERDVARAHALGIDLFAVDSHEEVEKVARAAPGARVFCRVLTDGEGAEWPLSRKFGCVPQMAVDVLVYAHQMGLESYGVSFHVGSQMMNLDAWDAALADAKRVFASLAKQGIHLQMVNMGGGFPTKYLRDVPAAEEYGQAIDTALRKHFGNQIPKTIIEPGRGMVGNAGVIKAEVVLVSKKSDNDNHRWVFLDIGKFGGLAETMDEAIRYPIRTERDQDEMQPCVLAGPTCDSADVLYEKNMYPLPVSLTIGDEVLIEGTGAYTTTYSAVAFNGFEPLKAYVI

SEQ ID NO: 4184 - protein, 440 aa, Agrobacterium tumefaciens str. C58 (Cereon)
MARWITARWCANGRTMAPTDKSQNHGPALAAGLFDISENDLLIGGLSVRDIVAETGTPCFLYDNSAMRQAYRDLETALSGFADIYYSVKANPLPAIISLFREEGAGAEIASVGEYRAAVKAGVAPDNIIFAGPGKSMAELREVIEGGIGEIHIESAEEIARIEAINRPVKASIRINPVPDAQAGAMRMGGKATAFGFDEEELENVLKLFANVRHIDLVGIHIYGGTQILDADMLVSQWRHAIALAGRMAQMLGKPLETIDLGGGLGIPYFAGETSLDLAKVAAAIPDLKALLKAHPLIADAHVIVEPGRFLAGPGGLYVVEVNSVKTSRGTTFVVTDGGMHHHLAASGNLGQIVKRNYPIVAPAMMQAAHDETATIVGPLCTPLDTLARNATLPKLNAGDLLAILQSGAYGASASPGGFLSHTVAKEVLVEDGAFEVIGR

SEQ ID NO: 4185 - protein, 422 aa, Agrobacterium tumefaciens str. C58 (Cereon)
MNHFGYIDGVLHAENVPVPEIAKAVGTPFYVYSTATLERHYKVFSGAFADVDAMVCYAMKANSNQAVLKTLAKLGAGIDVVSGGELRRALAAGVPASRIMFSGVGKTVAEMDYALEAGIYCFNIESEPELEVLNLRAVKAGKRAHVSFRINPDVDARTHAKISTGKKENKFGISYERARAVYAHAATLPGIEVTGIDMHIGSQITELQPFEDAFRLLRELVEVLRTDGHAISHVDIGGGLGIPYRDDNNPPPLPDAYAHIVKNELKSLNCKIVTEPGRLIVGNAGILVTEVIYVKDGGDKTFVIVDGAMNDLIRPTLYEAYHGIRPVVQPSENAPRIKADIVGPVCETGDYLALDREMAAPQPGDLIAVSSAGAYGAVQAGTYNSRLLVPEVLVKGDRFHVIRPRGTYEELIALDSVPAWLD

SEQ ID NO: 4186 - protein, 868 aa, Xylella fastidiosa Temecula1
MSASPTAERWIVLKFGGTSVSRRHRWDTIAMVVRKRLEEHGTRVLIVVSALSGVTNELTAIAQGVVDSAKRVTALEQRHRDFLVELGLDAQAVLGTRFAMLSDLLQDARAVTRSLDWQAELLGQGELLSSTLGAAYLGASGIDIGWMDARDWLTALPPQPNQSEWSQRLSVSCQWKSDVEWRTRFDAQRAQVLITQGFISRHQDGGTAILGRGGSDTSAAYFGALLGAACVEIWTDVPGMFSANPKEVPDARLLTRLDYYEAQEIATTGAKVLHPRSIKPCRDTGVPMLILDTERPDVLGTRIDAEVEPVLGVKAISRRDGIVLVSMEGIGMWQQVGFLADVFTLFKKHGLSVDLIGSAETNVTVSLDPSENLVNTDVLTALSTDLSQICKVKIIVPCAAITLVGRGMRSLLHKLSEVWATFGKERVHMISQSSNDLNLTFVIDETDADGLLAVLHFKLIESGAMPVQDRAVFGSPWREIIGHVRTRVMPWWHSARMRLLAMRDEEGIGPCYVYHLPTVRERARQLNAVAAVDQCYYAIKANPHPAILRTLIEEGFGLECVSLGELRHVFEVVPHLVPSRVLFTPSFASRVEYEQAFLLGVNVTLDNVEALRLWPEVFRERTLWLRIDLGYGDGHHEKVTTGGKTSKFGLSVTRIDEFIDVAKTLNITVTGLHAHLGSGVESGNHWSRMYDELAGFASRIGSVSTLDIGGGLPIPYRPDDEPFDVGAWGASLAEVKALHPKFQLVIEPGRFLVAEAGVLLTRVTQVIEKDDILRVGLEAGMHTLIRPALYDAWHGVENLTRLDETPHVLCDVVGPICESSDVFGRRRHLPAATASGDLMLIADAGAYGFSMASTYNLRGLPAEVVLDA

SEQ ID NO: 4187 - protein, 448 aa, Giardia lamblia ATCC 50803
MSVLTRASLVEYNLLPIGKGADISKVIVDAYAKSGREAVCVLNVSEIERHYNIWKTHLPEVQVRYAVKCNMHPLLLRSLHLLGAGFDCASPAEVRAALSAGCPPSKIIYANPQKPKRSIEEAFRLNCNTFTFDSEHELLSMLESTPPGKVGRFVLRLLPPDESSSICRFGVKFGASPSECYRLIRLCKHLGANLVGFSFHVGSGCGSVDSFRLAVQYMGEAAKFAKEQGFTLTVLNIGGGYMSKGAERHYDEPNRHAHITPPSFEEIASALREEINRIKVYFTNKSEDLEIMAEPGRFFAGDIMTLGTRIYGRRIIFDKIEDNSCLTEKEIMESGKASINEVKYYVGDGVYGYYNAILFDHVVPHLRFTDKHGNRKELSGAHAGSSLNTSSIFGPTCDSLDCILKERKLPLLDVGDWVITDAFGAYTYAAATEFNGIPHVSVVCCIEE

SEQ ID NO: 4188 - protein, 428 aa, Methanothermobacter thermautotrophicus str. Delta H
MFPDIEVNDKGHLLIGGADAVELADEYGTPLYVIDEMRIRENYRRLYRAFSGEYSRFQVFYACKANTNLAVMRILEEEGSGIDAVSPGEIYTALMAGFDPDRILYTGNNVRDDELQFALDSGVRINVDSRSQLLRLSEIAPEGLRISFRVNPLVGAGHHEHCITGGEMSKFGVMEREAPEVYRMAMDLGFEPVGIHAHIGSGILDPEPFMLAVETLMDIAGRVHEATGVEFEFIDFGGGLGIPYTPEEEPLDIDEFASKITGLFKDKLSEYGLGRPMMCLEPGRYIVGDASYLLTRVNTIKESYRKFAGVDAGFNTLLRPAMYGSYHHILVAERPLDEPSEKMDVAGNVCESGDLFARDRQLPEINEGDVLAIMNAGAYSFSMSSQYNSRPRPAEVLVREGKVDVVRERETFSDLLRGQNVPARLLKR

SEQ ID NO: 4189 - protein, 399 aa, Magnetospirillum magnetotacticum
MRWAEQREFSGLFHDPAVREDFAMTAKIARFLEEVRPQTPCVVVDLDVVRDNYHSLRRWLPLAEVYYAVKANPAPEIVRMLTEEGSRFDVASRGEIDLCLSNGTPAERISFGNTIKKQSDIAYAYAKGVRLYAFDSEAELEKLALAAPGSRVFCRILMTCDGAEWPLSRKFGCEIDMAKDLLVKARDLGLDPYGVSFHVGSQQTDLKQWDIAVGKAAMLFSALDAAGIDLRMVNLGGGFPARYRKEVDGIERYAEAVMDAMTKHFGNNIPAMIIEPGRSLVGDAGILETEVVLISRKGYEDDTRWVYLDVGKFGGLAETMDEAIKYRIVTGRDGEDTAPVILAGPTCDSADILYEKAGYEMPVSLKVGDKVRILSTGAYTTSYSAVNFNGFEPLKAYFI

SEQ ID NO: 4190 - protein, 274 aa, Magnetospirillum magnetotacticum
MTDRIRDYLRARRDLGRDEGPVMVLDLDVVRENYTAFARALPDTRVFYAVKANPAAEVLRLLAEMGSCFDTASVAEIEMALSAGATADRVSFGNTIKKERDIVRALKLGIRLFAVDCQAEVEKISRASEAAGIEAGDVQVFCRILCDGAGADWPLSRKFGCEPEMAVNVLEHAHRHGLHAYGVSFHVGSQQANTEAWDGALASAAAIFQDCALRGIGLSMVNLGGGFPTKYLKQVPGVETYGDAIFRALTKHFGNRIPETNHRAGAAAWSAMRA

SEQ ID NO: 4191 - protein, 424 aa, Magnetospirillum magnetotacticum
MNHFHYSNGTLFAEDVAIARIAREVGTPFYCYSTATLERHYTVFAEALKSAGLDATICFAAKANPNMAVIRTFAQLGAGADVVSEGELRQALAAGVPAARIVFSGVGKTRHELEFAVAKGIFQINVESEPELEMLSEVAAARGLVMPIAIRVNPDVDAGTHAKITTGKKENKFGIEWTRAREVYARAKALPGVEPVSIACHIGSQLTELDPFREAFLRVRDLVAMLRADGIDIRRLDLGGGLGVPYDDETPPEPKAYAEVIKASLGDLGCRFIFEPGRLLVGNAGILVSSIIRVKEGSTRTFLIVDAAMNDLARPSLYDAYHSIFPVAEPKAGAPLAEVDVVGPVCETGDTFARQRRLPPMRAGDLLALGTAGAYGAAMSSTYNTRPLIPEVLVKGADYAVIRARPSYEDMRSLESLPGWLSDD

SEQ ID NO: 4192 - protein, 390 aa, Methanosarcina acetivorans C2A
MRKESYEFPLEDFIPREDFNKIKKFSRDKETPFLVIDLQKIERSYEELVEHMPFAKIHYAVKANPMDRVVLALKDKGSNFDVATIYELDQVLRLGVEPERISYGNTIKKEKDIAYAYEKGVRLFVTDSESDLKKLSREAPGSRVFFRILTESDGADWPLSRKFGSHPDLIYKLILKAEKLGLEPYGLSFHVGSQQRDIGQWDNAISKCKYLFEAAAEKGIQLKMINLGGGFPAKYQAQANDLETYAREIRRFLHDDFGEELPEILIEPGRSLVADAGIIVSEVVMISKKARFNQYKWVYLDIGKFGGLIETLDECIKYPIFCDKKGCAEEVILAGPTCDSMDILYEHHKYSFPHTMREGNRAYIFTTGAYTQSYCSVNFNGFPPLKAYLI

SEQ ID NO: 4193 - protein, 405 aa, Methanopyrus kandleri AV19
MVESSTTSWRRPVRGHRCTSTTRMLPVKAAREYQEAFSWFPDRVYVCYAMKANFNPYLVEHIVDETRAADVVSLWEMKVAVNAGAETVVVNGNAKSSDEIRAAVERSWVINVDSFEEFQRIEKIARHEGERALVALRVNPKVSPDTHSHIATAVEGSKFGVELEIAERVCRRMIESEWVEFLGLHYHIGSQITDLRPFSEALRSVRTFLEDTGLIEEISYLNIGGGLGIRYRRGEEVPSPHDLAEELQEDLKELHSESSGFDLYLEPGRSIVGEAGILVTSVRQVKRGRRRWVFVDTGMNALIRPALYDAYHEVVVHGGDYSATEKASVAGPLCESGDVLAEDRELPIDISEGDLVVFLSAGAYCESMASNYNCYPIPGSVVVRNGEITGVRRVQDYEAFSKTWW

SEQ ID NO: 4194 - protein, 419 aa, Caulobacter crescentus CB15
MRTYHSPLDLVRERSPERPVALVRPDAVAVAARWFQSEFKGDVFYAVKANPSPWVIRELAKAGVRSFDVASLNEVELVANEAPGSRMAFMHPVKSRAAISAAYFDHGVKTFSFDTHEELAKILDATGQAKDLNLIVRMGVQAEGAAYSLSGKFGVEMHNAPDLLLAARRATQDLMGVSFHVGSQCMRPTAFQAAMAQASRALVRAGVLADVVDVGGGFPSIYPGMVPPDLSEYLAAIDRGFAEMMVHETTELWCEPGRALVAEASSLLVKVELKKGDALYLNDGSYGSLFDAAHMKWPFPVKLYRKSGEVVEEGLKPFRFYGPTCDSVDHMPGPFYLPESVDEGDYIEIGMLGAYGVAMNTRFNGFGETDTAQVQDAPMASMYGLAKRSIPVVRQETEERKIVRFSRPKGAAGKRKRRR

SEQ ID NO: 4195 - protein, 421 aa, Caulobacter crescentus CB15
MNHFEYGPQGLACEGVPLAKIAAEVGTPVYVYSRATLERHFVVFRDALAMSGVVDPLIAYAVKANSNVAVLKVLGDLGAGADTVSEGEVRRALAAGIPGERIVFSGVGKARREIAFALQAGVAEINVESEPELNLIAEVAAELGVRAKVAFRVNPDVAAGGHAKIATGKSENKFGVSFAEAARLYANASNNANLQPVGVACHIGSQITDLAPMRAAFTKMRGLVEQLLAEGLSVERLDLGGGLGVPYFNHPEPPSPAEFAAMVGEVTQGLPVTLAFEPGRVIAANAGVLVSEVIHVHERPEGRKFLVIDAAMNDLVRPAMYDAFHDIRPVIQRTGETVYDVVGPVCETGDTFTRDRALPPFAAGDLVAFMSAGAYGAAMASEYNTRPLVPEVLVDGDRYAVIRQRPTYDEMLARDLVPDWV

SEQ ID NO: 4196 - protein, 402 aa, Campylobacter jejuni subsp. jejuni NCTC 11168
MDYKQLKQEFNTPFYIYNFDFIKERFLNLKEAFKARKSQIFYAVKANSNLSLLQMLANLDSGFDCVSIGEVKRALKAGAKAYKIIFSGVGKTKEELRQALEYDILYINLESEAEMMLLESVAKELNLKARISIRVNPNVDAKTHPYISTGLNENKFGVEIDIARKMYLYAKNSSFLEPVGVHFHIGSQLLDISPIHEAAAIVAKLVRELKALQIDLKFFDIGGGLGVAYEKNECEPDLYDYAQGILAQLHGLDLTIGMEPGRYLVAKSGEFVCSVLYEKQNKTKRFVVVDGAMNDLIRPSLYEAYHEIILPYNQGEESLCDVVGGICESGDFFAKARSLPSTQSDDIMVIKNTGAYGFSMSSNYNTRNKVCELALEEGQVRLIRQRENFEDQIALEEKFLKA

SEQ ID NO: 4197 - protein, 390 aa, Methanosarcina mazei Goe1
MRKEPYDFPLDDYISREEFNKIKKFSRDKETPFLIVDLQKIERSYDELVEHMPFAKIHYAVKANPLDKVVLALKRKGSNFDVATIYELDQLIRLGVEPERISYGNTIKKEKDIAYAYDNGVRLFVTDSESDLKKLARRAPGSRVFFRILTESDGADWPLSRKFGSHPDLIYKLILKAEKLGLEPYGLSFHVGSQQRDIGQWDNAIAKCKYLFEAVAEKGIHLKMINLGGGFPAKYQSQAHDLETYAHEIRRFLHEDFGEELPEILIEPGRSLVADAGIIVSEVIMIAKKARFNQYKWVYLDIGKFGGLIETLDECIKYPIFCDKKGCAEEVILAGPTCDSMDILYEHHKYSFPHTMRDGNRVYIFTTGAYTQSYSSICFNGFPPLKAYVI

SEQ ID NO: 4198 - protein, 416 aa, Chlorobium tepidum TLS
MLDSHFFSFSDGILCCESVALDELARQFGTPLFVTSRQSLVSQYRSFEEAFASLPHFTCYSVKANFNLAVIRTLAEEGCGCDVNSGGELYRALTAGVPANKIIMAGVGKSEAEIKYGLTSGVMMIKAESISELKAINSVAEHLGKVAQVGVRINPNVTAETHPYITTGDSKEKFGIDEAGLGEVFELFKTLPNLELHGLDMHIGSQIFDPEYYVAATQKLLEVLESARHLGFDIKWLDLGGGFPVTYDPQKPAPPITKFAEKLIPMLQDKGVTVIFEPGRFIAANASVIVTKILYRKKNQIGKEFFIVDAGMTELIRPALYQSHHEVLSVKQHDRSVVADVVGPICESSDFFARHRTIDDAPEGELLAVLSSGAYGAVMSSNYNGRLRPAEVMVDGDEVTLTRRRETYEQLVQNEL

SEQ ID NO: 4199 - protein, 447 aa, Coccidioides posadasii
MVMAPSVFEPTDVYITEKYHHESKGSYNSTNHGGPELSHAREASKELILDILQKKAASIDVQNCCPGEEDPFYVADLGEVYRQHIRWKMNLGRVKPFYAVKCNPDPQVLRLMAHLGNGFDCASKAEIDYVLAAGSTPSRIIYAHPCKTKSYLRYAAQQGVNEMTFDNADELYKIKTMCPDRDVFLRILTDDSASLCRLSMKFGASLTVTRSLLELAKDLGLNVVGVSFHVGSGAEDQQHFVKAVEDARFVFDQASDIGHDLKVLDVGGGFCDETFERFAAALSDALDTYFPPHIRVIAEPGRYYVASAFTLAANVIARRDVSPAASDSDSASGPAEMYMIYLNDGCYGNFSNIVFDHQHPVAQILTKDDMDSTHPVEYSIWGPTCDGIDVITKRVTLNREVLGVGNWLYFENMGAYTQCSATRFNGFTDKHDIIYISTEPSAGAMGY

SEQ ID NO: 4200 - protein, 445 aa, Clostridium thermocellum ATCC 27405
MLMRKVENMFVSKALKVNSKNHLEIGGCDCVDLVNNFGTPLYVMDESLIRENCRIYKNALDKYYNGNGLVLYASKAFCTMAMCKIVQQEGLGLDVVSGGELYTAIKAGFPMEKVYFHGNNKTIDELELAIDNNVRRIVVDNRQELLHVNRIAAEKGKTVNISFRIKPGIDAHTHDFIRTGQIDSKFGVALENGEAMEIIGEAVKLSNVKVVGLHCHIGSQIFELAPFEEAARVMLTFIAKIKEELGIEIEELNLGGGFGIKYTQDDDPIEYDRYIKSVSEVVKSVCEDKGIKLPFIVIEPGRSIVASAGITLYRIGTIKDIKGVRKYIAVDGGMTDNPRYALYQSKYEGVIANKADAAKTEKVTIAGKCCESGDLLGKDVLLPEAEEGDILAILATGAYNYSMSSNYNRIPRPAVVLVKDGKARVIVKREDYNDIIRNDIIPEDL

SEQ ID NO: 4201 - protein, 414 aa, Microbulbifer degradans 2-40
MSDFHYQNGELFAEQCSLNAIADALGTPCYVYSKAAFTRAYQDYANALGNHPGMVCYAVKANSNIAVLQVLAKLGAGFDIVSSGELRRVLKAGGQPNRIIFSGVGKTREEMREALEVGIACFNVESEAELERLADVAAELGVVASISLRVNPDVDAKTHPYISTGLKENKFGIDIQRAPAVYARASELASLKVVGVDCHIGSQLTELTPFLDALDRLLQLVDTLAETGITIEHLDIGGGLGVTYRDEVPPAVADYLTQIKAKLGDRKLAIIMEPGRSIAANAGVMLTEVEFLKPTEHKNFAIIDGAMNDNIRPALYQAWQDVKPLSQREGETQQWDLVGPVCETGDFLAKDRALALQAGDRLALMSSGAYGFVMSSNYNTRGRAAEVLVDGDKYFVVRERESFEDLIRGEHLLP

SEQ ID NO: 4202 - protein, 377 aa, Brucella suis 1330
MATQRIIDFLNTRRPEGPCLVVDTDVVRENYQGFEKALPYSRIFYAVKANPAPEILRLLASLGSSFDTASVAEIEMALEAGATPDRISYGNTIKKERDIARAFDLGIRLYAVDCVEEVEKIARVAPGSRVFCRVLTDGEGAEWPLSRKFGCVPAMAKDVLRRAKALGLDAYGVSFHVGSQQTDLTAWDRALADAAAVFRTLADEGIILRMVNMGGGFPTRYLKDVPTAQAYGMAIFDALSRHFGNRIPETIIEPGRGMVGNAGVIKTEVVLVSRKADNDNVRWVYLDIGKFGGLAETMDEAIRYQIVTPHDGSETEPCVLAGPTCDSADVLYEKTPYPLPVSLTIGDEILIEGTGAYTTTYSAVAFNGFEPLRSYVI

SEQ ID NO: 4203 - protein, 421 aa, Brucella suis 1330
MNHFEYRNGVLHAENVSLPEIAKAVGTPFYVYSRATIERHFRVFHDAFADMDTLVTYALKANSNQAVLTALAKLGAGADTVSQGEIRRALAAGIPANRIVFSGVGKTPREMDFALEAGIYCFNVESEPELEILSARAVAAGKVAPVSLRINPDVDAKTHAKISTGKSENKFGIPRDKARAAYARAASLPGLNVVGIDMHIGSQIIDLEPFDNAFALMAELVKELQADGHNIRHVDVGGGLGIPYRTDNTPPPPPVAYAQIVAKHIKPLGLKTVFEPGRLIVGNAGLLVTEVIFVKEGDAKNFVIVDAAMNDLIRPTLYDAFHDIRPVIMPNDNAPRIRADFVGPVCETGDYLGLDREVAKPAPGDLIAICTTGAYGAVLSSTYNSRLLIPEVLVDGERYHVVRPRRTYEELLALDSVPDWL

SEQ ID NO: 4204 - protein, 417 aa, Haemophilus somnus 129PT
MDFFLYKDGHLMAENVSVKKIAEQFGTPAYIYSRATLERHWYAFDNALGDHPHLICFAVKSNPNIAILNIMAKLGSGFDIVSQGELERVLFAGGDPKKVVFSGVAKSEQEIARALEVGIRCFNVESAAELIRINQVARKMGKIASISLRVNPDVDAHTHPYISTGLKENKFGVSVEQAREVYRQASQLENIKIVGIDCHIGSQLTELQPFLDATDRLIVLMEQLKKDGITLEHVDLGGGLGVTYSDEKAPHPSEYATALLEKLKNYQNLEIILEPGRAITANAGILLTRVEYIKSNESRHFAIVDTGMNDMIRPALYQAYMNIIEVDRTLSRETKVYDVVGPICETSDFLGKQRSLAIAQGDFIVQRSAGAYGASMASTYNSRPRAIEIMVDGEQVHLIKRREEFAELWHLEKLLEM

SEQ ID NO: 4205 - protein, 387 aa, Pseudomonas syringae pv. syringae B728a
MPINVEDYYSAETFKKMKAFADKQETPFVVIDTDIISKAYDDLRAGFEFAKVYYAVKANPAVEVINLLKEKGSSFDIASIYELDKVLSCGVGPERMSYGNTIKKSKDIRYFYEKGVRLFATDSEADLRNIAKAAPGAKVYVRILTEGSTTADWPLSRKFGCQTDMAMDLLILARDLGLVPYGISFHVGSQQRDISVWDAAIAKVKVIFERLKEEDGIVLKLINMGGGFPANYITRTNSLETYAEEIIRFLKEDFGDDLPEIILEPGRSLISNAGILVSEVVLVARKSRTAVERWVYTDVGKFSGLIETMDEAIKFPIWTEKKGEMEEVVIAGPTCDSADIMYENYKYGLPLNLAIGDRMYWLSTGAYTTSYSAVEFNGFPPLKSFYL

SEQ ID NO: 4206 - protein, 371 aa, Pseudomonas syringae pv. syringae B728a
MDTLFAQLADDTNDTFYTVDPRWITQNAQQFSGCFPGTVLYAMKANPLVHVLEALSQGGINHFDVASLAEVQTVHNTLPNAVQYLMNPVKSRHCLHEAYYRHGVRSFVLDSEEELSKLRDVLPERDSTISMFVRYAPSESTAVYDLRGKFGASPALATQLVHQVAASTDWSLGLSFHVGSQAIEDGPWLAALDDADAIVRDTAQHVRHLDIGGGFPGNYLNSMGNTPDLVGRVCEHIQTSPTLKDLNLICEAGRGLVYGGMSLFARVLSRREHSVFCGAGIFGGLLSAQQWLQFPARVWRDAAPYAGSAEATFNIFGPTCDSMDRLAFPYSLASDIREGDWLEFQSTGAYSVSLRTPFNGFYADRIISLPS

SEQ ID NO: 4207 - protein, 415 aa, Pseudomonas syringae pv. syringae B728a
MDAFNYRDGELFAEGVALSAIAERFGTPTYVYSRAHIEAQYRAYADALSGMPHMVCFAVKANSNLGVLNVLARLGAGFDIVSRGELERVLAAGGKAEKIVFSGVGKTREDMRRALEVGVHCFNVESTDELERLQEVAAELNVRAPISLRVNPDVDAGTHPYISTGLKENKFGIAIAAAEDVYIRASQLPNLEVIGVDCHIGSQLTTLEPFIDALDRLLALVDRLGDCGIHLHHIDLGGGLGVRYRDEEPPLAADYIKAVRERLAGRDLGLLFEPGRFIVANAGALLTRVEYLKHTEHKDFAIVDAAMNDLIRPALYQAWMDVTAVRPRDSEPRAYDIVGPICETGDFLAKGRELALAEGDLLAVHSAGAYGFVMSSNYNTRGRAAEVLVDGSQAFEVRRRETVAELFAGESLLPE

SEQ ID NO: 4208 - protein, 387 aa, Pseudomonas fluorescens PfO-1
MSIQVEDYFARETFQKMKAFADKQETPFVVIDTAMIAQAYDDLRAGFEFAKVYYAVKANPAVEIIDLLKEKGSSFDIASIYELDKVLSRGVSADQISYGNTIKKSKDIRYFYEKGVRLFATDSEADLRNIAKAAPGAKVYVRILTEGSTTADWPLSRKFGCQTDMAMDLLILARDLGLVPYGISFHVGSQQRDISVWDAAIAKVKVIFERLKEEDGIHLKLINMGGGFPANYITRTNSLETYAEEIIRFLKEDFGDDLPEIILEPGRSLIANAGILVSEVVLVARKSRTAVERWVYTDVGKFSGLIETMDEAIKFPIWTEKKGEMEEVVIAGPTCDSADIMYENYKYGLPLNLAIGDRLYWLSTGAYTTSYSAVEFNGFPPLKSFYV

SEQ ID NO: 4209 - protein, 415 aa, Pseudomonas fluorescens PfO-1
MDAFNYRGGELFAEGVALSAIADRFGTPTYVYSRAHIEAQYLAYADALAGMPHLVCFAVKANSNLGVLNVLARIGAGFDIVSRGELERVLAAGGSPDKIVFSGVGKTRDDMRRALEVGVHCFNVESTDELERLQVVAAELGVRAPISLRVNPDVDAGTHPYISTGLKENKFGIAIADAEDVYVRAAHLPNLEVVGVDCHIGSQLTTLPPFLDALDRLLDLVDRLGDCGIHLRHIDLGGGLGVRYRDEEPPLAADYIKAVRERLVGRDLALVFEPGRFIVANAGVLLTQVEYLKHTEHKDFAIVDAAMNDLIRPALYQAWMDVTPVKPRETAARTYDVVGPICETGDFLAKERELALEEGDLLAVHSAGAYGFVMSSNYNTRGRAAEVLVDGDQAFEVRRRETVAELFAGESLLPE

SEQ ID NO: 4210 - protein, 387 aa, Pseudomonas aeruginosa PAO1
MSIKVEDYFAPETFQRMKAFADKQETPFVVIDKQTIADAYDQLTDCFPFARIYYAVKANPATEITELLRDKGSNFDIASIYELDKVMKTGVGPERISYGNTIKKSKDIRYFYEKGVRLFATDSEADLRNIAKAAPGAKVYVRILTEGSTTADWPLSRKFGCQTDMAMDLLILARQLGLEPYGISFHVGSQQRDISVWDAAIAKVKVIFERLKEEDGIVLKMINMGGGFPANYITKTNDLETYAEEIIRFLKEDFGDDLPEIILEPGRSLIANAGILVSEVVLVARKSRTAVERWVYADVGKFSGLIETMDESIKFPIWTEKQGEMEEVVIAGPTCDSADIMYEHYKYGLPLNLASGDRLYWLSTGAYTTSYSAVEFNGFPPLKAFYL

SEQ ID NO: 4211 - protein, 415 aa, Pseudomonas aeruginosa PAO1
MDTFSYRDAELFAEGVALSRIAERFGTPTYVYSRAHIEAQYRAYADALAGMPHLVCFAVKANSNLGVLNVLARLGAGFDIVSRGELERVLAAGGDPAKVVFSGVGKTRDDMRRALEVGVHCFNVESGEELERLQRVAAELGVKAPVSLRVNPDVDAQTHPYISTGLKENKFGIAIDEAEAVYARAAELDHLEVIGVDCHIGSQLTQLEPFLDALERLLGLVDRLAGKGIGIRHLDLGGGLGVRYRDEQPPLAGDYIRAIRERLHGRDLTLVFEPGRSIVANAGVLLTRVEYLKHTEHKDFAIVDAAMNDLIRPALYQAWMDVQAVRPRDAAPRRYDLVGPICETGDFLAKDRDLALAEGDLLAVRSAGAYGFVMSSNYNTRGRAAEVLVDGEQTHEVRRRETVQELYAGESLLPQ

SEQ ID NO: 4212 - protein, 391 aa, Shewanella oneidensis MR-1
MSQFQSIDVADYYDAQTFKRIEEFAKDKATPFVVIDTSIIAKQYDDMVNSFPYADVYYAVKANPAAEILTLLKDKGSNFDIASIYELDMVMNVGVTADRVSYGNTIKKRQDVRAFYERGVRMYASDSEADLRMIAEEAPGSRIYVRILTEGTDTADWPLSRKFGCQNEMAYELLVLANELGLEPYGISFHVGSQQRDIGAWDSAIGKVKSIFDRLRDEHNIVLKMINMGGGFPANYIDKTNQLGVYAEQITHFLKEDFGDDLPQIILEPGRSLISNAGVLVSEVVLISKKSYTALERWVFTDVGKFSGLIETMDEAIKFPIFTHKQGELEKCVIAGPTCDSADIMYEHYSYGLPNDLAIGDRMYWLTAGAYTTTYSAVCFNGFPPLKDYYL

SEQ ID NO: 4213 - protein, 432 aa, Clostridium tetani E88
MRLFGTMEVKDNNLYIGGVSCKELKNKYSTPLYIIDEDFLRGRCKEYYNNFGVEKHGNKVAYAGKSFLTIAMCQIIKEEGLFLDVVSSGELYTALKANFPMNKIYFHGNNKTLDEIEMGIELGVGKFVVDNFYEMNNINNMARKKGIKQSILLRITPGIEAHTHDYIKTGQVDSKFGFSMVGEEVYKAVETALSLPNINLSGIHCHIGSQIFETTPYEEAVDIMFEILKEIKNRYDYEISEVDLGGGFGIYYTKEDKPKETKEYCEAILKKALNKSKELGIKLPMLGIEPGRSIIGNAATLIYTIGAIKEIPGIRKYVSIDGGMNNNIRPALYDAKYECEVANNMNSDDRELVTIAGKCCETGDIVIEDVEISKSKSGDILAIPSVGAYGYSMSSNYNKIPKPAIVLVKDGESRVMCKRESFDDMLKNELSL

SEQ ID NO: 4214 - protein, 399 aa, Vibrio vulnificus CMCP6
MAHSQSIFDIHSLTSPVLSAEEIHLIEASVEQFGAPLLLLDCDVIRQQYRALKNALPNVTLHYALKPLPHPVVVRTLLAEGASFDLATTGEVELVASEGVPADLTIHTHPIKRDADIRDALAYGCNVFVVDNLNELEKFKAYRDDVELLVRLSFRNSEAFADLSKKFGCSPEQALVIIETAKEWNIRIKGLSFHVGSQTTNPNKYVEAIHTCRHVMEQVVERGLPALSTLDIGGGFPVNYTQQVMPIDQFCAPINEALSLLPETVHVLAEPGRFICAPAVTSVASVMGQAEREGQIWYYLDDGIYGSFSGLMFDDARYPLTTIKQGGELIPSVLSGPTCDSVDVIAENILLPKLNNGDLVIGRTMGAYTSATATDFNFFKRAQTIALNEFVASSERMIG

SEQ ID NO: 4215 - protein, 417 aa, Vibrio vulnificus CMCP6
MDYFNYQDDGQLWAEEVSLTSLAEQYGTPLYVYSRATLERHWHAFDRSVEGHPHLVCYAVKANSNLGVLNTLARLGSGFDIVSGGELERVLAAGGDPRKVVFSGVGKTEAEMRRALELNIKCFNVESEPELERLNRVAGELGVKAPISLRINPDVDAQTHPYISTGLRDNKFGIAFDRAPAVYQFAQSLANLNVQGIDCHIGSQLTAIEPFIDATDRLLALIDDLKEQGINIRHLDVGGGLGVVYRNELPPQPSEYAKALLGRLENHQDLELIFEPGRAIAANAGVLLTKVEFLKHTEHKNFAIIDAAMNDLMRPALYQAWQDIVPVQPRQGEAVTYDLVGPICETGDFLGKDRSLVLAENDLLAVRSAGAYGFVMSSNYNTRVRAAEVMVDGKQHYLVRQREELRSLWELEHILPE

SEQ ID NO: 4216 - protein, 385 aa, Methanosarcina barkeri
MCFRWRISFQEHDFNRIKKFSRGKETPFLTVDLQKIEQSYDELVEHMPFAKIHYAVKANPMDEVVLALKSKGSNFDVATVYELDQLLRLGVEPERISYGNTIKKEKDIEYAYEKGVRLYVTDSDSDLKKLARKAPGSRVFFRILTESDGADWPLSKKFGSHPDLIYKLILKAEKLGLEPYGLSFHVGSQQRDIGQWDNAISKCKYLFEAAAEKGIHLKMINLGGGFPAKYQAQAHDLETYAGEIRRFLHEDFGEELPEIIIEPGRSLVANAGIIVSEVVMISKKARFNQYKWVYLDIGKFGGLIETLDECIKYPIFCDKKGCAEEVILAGPTCDSMDILYEHHKYTFPHTMREGNRVYIFTAGAYTQSYSSVCFNGFPPLKAYLT

SEQ ID NO: 4217 - protein, 359 aa, Pseudomonas syringae pv. tomato str. DC3000
MVIDTAIISKAYDDLRAGFDFAKVYYAVKANPAVEVINLLKDKGSSFDIASIYELDKVLSCGVGPERMSYGNTIKKSKDIRYFYEKGVRLFATDSEADLRNIAKAAPGAKVYVRILTEGSTTADWPLSRKFGCQTDMAMDLLILARDLGLVPYGISFHVGSQQRDISVWDAAIAKVKVIFERLKEEDGIVLKLINMGGGFPANYITRTNSLETYAEEIIRFLKEDFGDDLPEIILEPGRSLISNAGILVSEVVLVARKSRTAVERWVYTDVGKFSGLIETMDEAIKFPIWTEKKGEMEEVVIAGPTCDSADIMYENYKYGLPLNLAIGDRMYWLSTGAYTTSYSAVEFNGFPPLKSFYL

SEQ ID NO: 4218 - protein, 415 aa, Pseudomonas syringae pv. tomato str. DC3000
MDAFNYRDGELFAEGVALSAIAERFGTPTYVYSRAHIEAQYRAFADALSGMPHMVCFAVKANSNLGVLNVLARLGAGFDIVSRGELERVLAAGGKAERIVFSGVGKTREDMRRALEVGVHCFNVESTDELERLQEVAAELNVRAPISLRVNPDVDAGTHPYISTGLKENKFGIAIAAAEDVYIRASQLPNLEVIGVDCHIGSQLTTLEPFIDALDRLLDLVDRLGDCGIHLHHIDLGGGLGVRYRHEEPPLAGDYIKAVRERLAGRDLGLLFEPGRFIVANAGVLLTQVEYLKHTEHKDFAIVDAAMNDLIRPALYQAWMDVTAVRPRDSEPRAYDIVGPICETGDFLAKGRELALAEGDLLAVHSAGAYGFVMSSNYNTRGRAAEVLVDGTQAFEVRRRETVAELFAGESLLPE

SEQ ID NO: 4219 - protein, 390 aa, Aquifex aeolicus VF5
MTKVVNYGEVQYGFAKRYFEEFLSERKGRIEKLLKPEKTPVLLMDIQGVKKKYLEVKYHFPEFNVYYAVKANDDESVIRALVEVGAGFEVASSQELEKVLRLGGKIEKVISSNPVKPPEFIEFAYQKGVRTFAVDSITEVKKIKDIAPRSKVYVRIAVPNEGSDWPLSRKFGVSVEEAVEILEYANDLGLVPYGITFHVGSQCNNLRNWFIAVKLSAQLWEKARAKGLKLQMLNMGGGIPVRYNYEALSVEDIAYYVKGLMRKYFPVQPYELQIEPGRGIVGDQGIMVTKVIGKAKRGSENWLYIDTGVFNGLAEALGGIRYPFFLEREGELKEWTIGGVSCDSMDVVAKNVYLPEPEVGDYLYILSAGAYTTVYASNFNGFPKPEVVPF

SEQ ID NO: 4220 - protein, 420 aa, Aquifex aeolicus VF5
MELLKEYNPYLEYRDGELFIEGVSLKELAQTFGTPLYVYSSNFIKERFEAYRKAFPDALICYAVKANFNPHLVKLLGELGAGADIVSGGELYLAKKAGIPPERIVYAGVGKTEKELTDAVDSEILMFNVESRQELDVLNEIAGKLGKKARIAIRVNPDVDPKTHPYIATGMQKSKFGVDIREAQKEYEYASKLENLEIVGIHCHIGSQILDISPYREAVEKVVSLYESLTQKGFDIKYLDIGGGLGIKYKPEDKEPAPQDLADLLKDLLENVKAKIILEPGRSIMGNAGILITQVQFLKDKGSKHFIIVDAGMNDLIRPSIYNAYHHIIPVETKERKKVVADIVGPICETGDFLALDREIEEVQRGEYLAVLSAGAYGFAMSSHYNMRPRAAEVLVENGSVKLIRKRENYDYIVEPSLDI

SEQ ID NO: 4221 - protein, 380 aa, Bradyrhizobium japonicum USDA 110
MTERIQEFLRNRRSEGRDTEPCLVVDLEVVRDNYQTFSKALPDSRVFYAVKANPAPEVLALLASMGSCFDTATVAEIEMALAAGATPDRISFGNTIKKERDIARAFALGIRLFAVDCAAEVEKIARAAPGAKVFCRILYDCAGAEWPLSRKFGCDPEMAVDVLDVAKRLGLEPCGISFHVGSQQRKVKAWDRALAMASQVFRDCAERGINLSMVNMGGGFPTKYLKDVPPVVTYGRSIFRALRKHFGNQIPETIIEPGRGMVGNAGIIESEVVLISKKSDEDEVRWVYLDIGKFGGLAETMDESIRYAIRTAHDGADMTPCVLAGPTCDSADVLYEKNPYPLPVTLEIGDKVLIEGTGAYTSTYSSVAFNGIPPLKTYHI

SEQ ID NO: 4222 - protein, 421 aa, Bradyrhizobium japonicum USDA 110
MNHFDYRNGVLHAEAVNLSELAATVGTPFYCYSTATLERHYRVFADAFAGEKVLVCYAMKANSNQSVLRTLARLGAGADVVSGGELKRALAAGIPARKILFSGVGKTEDELRAALAADILCLNVESEPELELLSRLATEMGKTARISVRVNPDVDAGTHAKISTGKSENKFGIPIAHAREVYARAAKLPGIQVTGTDVHIGSQITDLSKMETAFRILSEFVQTLRADGHDISHVDFGGGLGIPYYMDREAPPAPDAYAAMVKRVSHNLGCTLMFEPGRMIVGNAGILVAKVIYVKHGDGKNFVIIDAAMNDLIRPTLYEAHHDILPVTQPARDAATMVADVVGPVCETGDYLALDRTLPTPKAGDLLAIMTAGAYGAVQAGTYNTRPLVPEVLVKDDQYAVVRPRIDVEQLIAMDTPAPWL

SEQ ID NO: 4223 - protein, 377 aa, Brucella melitensis 16M
MATQRIIDFLNTRRPEGPCLVVDTDVVRENYQGFEKALPYSRIFYAVKANPAPEILRLLASLGSSFDTASVAEIEMALEAGATPDRISYGNTIKKERDIARAFDLGIRLYAVDCVEEVEKIARVAPGSRVFCRVLTDGEGAKWPLSRKFGCVPAMAKDVLRRAKALGLDAYGVSFHVGSQQTDLTAWDRALADAAAVFRTLADEGIILRMVNMGGGFPTRYLKDVPTAQAYGMAIFDALSRHFGNRIPETIIEPGRGMVGNAGVIKTEVVLVSRKADNDNVRWVYLDIGKFGGLAETMDEAIRYQIVTPHDGSETEPCVLAGPTCDSADVLYEKTPYPLPVSLTIGDEILIEGTGAYTTTYSAVAFNGFEPLRSYVI

SEQ ID NO: 4224 - protein, 396 aa, Coxiella burnetii RSA 493
MKLQTITSIAESRPIQPVFAFRPAALGRAVNYFCTQFDGRVLYAVKTNPEKHVIQAVHAHGVTAFDVASYEEIRIIKEYAPGAELYFMHPVKSPHAIREAYFEYGVRHFSLDCLEELHKILRHTENAKDLCLHLRLAIPNTFAEFNLAEKFGINLHEAPELLKQLRKAAYQLGVTFHVGSQCMHPDAYRIAIRMADKVINEAQVEIESFNVGGGFPSIYPGMIPPALTIYFEAIHDEFAKVAQRHPGIQLLCEPGRSLVAESTSVIVNVELRKDDILYINDGTYGSLFDAGIPHFIFPVHLLRPKHTADVDLLPFSFYGPTCDSLDYMKGPFYLPNDIKAGDYIEIGQMGAYGRTLSTAFNGFKQREGVIMVSDEPLMTMYSDEYITHEPLEVIAA

SEQ ID NO: 4225 - protein, 463 aa, Streptomyces avermitilis MA-4680
MSRSAHPAGPRHADVLPEGHYSAPAADLNALDPKVWSHTVSRGDDGVVRVGGIDVKQLAEEFGTPGYFLDEADFRERARAWRTAFGHDADVFYAGKAFLSRAVVRWLHEEGLNLDVCSGGELATALSAGMPADRIAFHGNNKSEEEIRTAVEAGVGRIVLDSFQEIVRVAHIAQSLGKRQRAQIRVTVGVEAHTHEFIATAHEDQKFGIGLADGQAAEAVRRALALDGLELVGIHSHIGSQIFDMAGFEVAARRVVKLLAEVRDEHGVELPEIDLGGGLGIAYTSEDDPREPHEIAKALSEIVTRECEAAKLRTPRISVEPGRAIVGPTAFTLYEVGTIKPLDGLRTYVSVDGGMSDNIRTALYDAEYSVALVSRASDAEPMLVRVVGKHCESGDIVVKDAFLPADLAPGDLIAVPATGAYCRSMASNYNHALRPPVVAVHDGEARVIVRRETEEDILRLDVG

SEQ ID NO: 4226 - protein, 388 aa, Thermotoga maritima
MMEYWIRRALEVVKTPFLLFDLSVVEKKYLEMKAALKKADIYYAVKANSHPRIISLLARLGSNFDVASKGEIEKLLALGVDGKRMSFGNTIKREEDIAFAYKNGIRLFAVDSEMEVEKVAINAPGSFVFVRVETDGADADWPLSRKFGTNPEHALQLLSYASKMKLIPAGLSFHVGSQNLNPESWKKAIEIAGRVFKKAMRSGLNLFLLNVGGGFPVQHTKPIPSMEEIGKAIEEAIDENLWFVHNLKVIAEPGRYMVGEAGWLVTKVLLKSERSGEKWVYIDAGVFHGLAETIQNFEYEIRVLGKEREELEEYHLAGPTCDSVDVIYDRIFLPKSITLNDLVCFINAGAYTVEYNTRFNGIEPPKMVFIEELTEISIEEKIKTRVLD

SEQ ID NO: 4227 - protein, 386 aa, Thermotoga maritima
MDILRKVAEIHGTPTYVYFEETLRKRSRLVKEVFEGVNLLPTFAVKANNNPVLLKILREEGFGMDVVTKGELLAAKLAGVPSHTVVWNGNGKSRDQMEHFLREDVRIVNVDSFEEMEIWRELNPEGVEYFIRVNPEVDAKTHPHISTGLKKHKFGIPLEDLDSFMERFRSMNIRGLHVHIGSQITRVEPFVEAFSKVVRASERYGFEEINIGGGWGINYSGEELDLSSYREKVVPDLKRFKRVIVEIGRYIVAPSGYLLLRVVLVKRRHNKAFVVVDGGMNVLIRPALYSAYHRIFVLGKQGKEMRADVVGPLCESGDVIAYDRELPEVEPGDIIAVENAGAYGYTMSNNYNSTTRPAEVLVRENGRISLIRRRETEMDIFKDVVM

SEQ ID NO: 4228 - protein, 415 aa, Pseudomonas aeruginosa
MDTFSYRDAELFAEGVALSRIAERFGTPTYVYSRAHIEAQYRAYADALAGMPHLVCFAVKANSNLGVLNVLARLGAGFDIVSRGELERVLAAGGDPAKVVFSGVGKTRDDMRRALEVGVHCFNVESGEELERLQRVAAELGVKAPVSLRVNPDVDAQTHPYISTGLKENKFGIAIDEAEAVYARAAELDHLEVIGVDCHIGSQLTQLEPFLDALERLLGLVDRLAGKGIGIRHLDLGGGLGVRYRDEQPPLAGDYIRAIRERLHGRDLTLVFEPGRSIVANAGVLLTRVEYLKHTEHKDFAIVDAAMNDLIRPALYQAWMDVQAVRPRDAAPRRYDLVGPICETGDFLAKDRDLALAEGDLLAVRSAGAYGFVMSSNYNTRGRAAEVLVDGQQTHEVRRRETVEELYAGESLLPQ

SEQ ID NO: 4229 - protein, 416 aa, Pseudomonas fluorescens
MDAFNYRGGELFAEGVALSAIAERFGTPTYVYSRAHIEAQYRTFADALEGMPHLVCFAVKANSNLGVLNVLARLGAGFDIVSGGELERVLAAGGSADKIVFSGVGKTREDMRRALEVGVHCFNIESTDELGSRLQIVAAELGVRAPISLRVNPDVDAGTHPYISTGLKENKFGIAIADAEDVYVRAAQLPNLEVLGVDCHIGSQLTTLEPFIDALDRLLALVDRLGDCGIYLRHIDLGGGVGVRYRDEEPPLVADYIKAVRERLDGRDLALMFEPGRYIVANAGVLLTQVEYLKHTEHKDFAIVDAAMNDLIRPALYQAWMDVTAVRPRDTAARSYDIVGPICETGDFLAKGRELALEEGDLLAVHSAGAYGFVMSSNYNTRGRCAEVLVDGDQAFEVRRRETVAELFAGESLLPE

SEQ ID NO: 4230 - protein, 433 aa, Mucor circinelloides f. lusitanicus
MLTDLETVVINPPYNVGALFKSAPSSPDISVHNRSVSEVFQQRLESITNQKWESDQENAFFVGDLGEVVRQHIRWKSLLPRIEPFYAIKCNPDPMVVQLLASLGCGFDCASKQEIQQVLDVGVDPSRIIYANPCKQASFIRYSAQQNVSRMTFDNAEELFKIKKYYPDAELVLRILTDDSMSLCQLGLKFGAPLHTVQHLLQLAKELNLNVIGVSFHVGSGCLDENAFGDAVVRAKNVFDQAKAMGYDFKFLDVGGGFPGADVKNGITFEKVAAVLGPIVDRLFPKDVRVIAEPGRYYVASAFNLAVNVIGRRTNMAHQDQTDASPEYMYYVNDGMYGSVNCIIFDHQVVHPKVLMKNELFAYGQDLPEAQYESSVWGPTCDSIDCLNKSARLPKLEPGDWLYFENMGAHTICAASQFNGFRKSEVLYTNTFC

SEQ ID NO: 4231 - protein, 451 aa, Ralstonia solanacearum
MPPAQSRPAADSVLPLSFSTGVAVRRPDGFLFMSESLIRQDGALMIEGVALEAIAARFGTPTYVYSRAALTANYRAYAAACEGRNARVQYAMKANSNLAVLQIFAQLGAGFDIVSGGELRRVLAAGGKAADVVFSGVGKTADEMRLALEAGVACFNVESIPELHRLNEVAGSLGKTAPVSLRVNPDVDAKTHPYISTGLKGNKFGVAFDEVLPTYRAAAAMPNLRVVGIDCHIGSQITEVSPYLDAIDKVLDVVARLDAEGIRLSHIDVGGGLGITYTDETPPDITAFARTLLDRIEQRGFGDRTVLFEPGRSLVGNAGLLLTRVEFLKPGAAKNFCIVDAAMNDLARPAMYEAYHHIVPVRERGGAPTVYDIVGPVCESGDWLGRDRALDAQPGDLLAILSAGAYGFTMSSNYNTRGRAAEVIVDGDRVHVARERERFEDLIRGEQLLSA

SEQ ID NO: 4232 - protein, 387 aa, Azotobacter vinelandii
MSIKIEDYYPPATFQRMKAFADKQETPFVVIDTEIIANAYEELGDCFPFARIYYAVKANPAVEIIRLLRDKGSNFDIASRYELDKVMAEGVGPERVSYGNTIKKAKDIRYFYEKGVRLFATDSEADLRNIAKAAPGSKVYVRILTEGTASADWPLSRKFGCQPDMALDLMILARQLGLVPYGLSFHVGSQQRDIDVWDAVIAKVKVIFERLKQEDGIELKMINMGGGFPANYITKTNSLQTYAEEIIRFLKEDFGEELPEIILEPGRSLIANAGILVSEVVLVSRKSRTAVERWVYTDVGKFSGLIETMDEAIKYPIWTEKKGEMEEVVIAGPTCDSADIMYENYKYGLPLNLASGDRLYWLSTGAYTTSYSAVEFNGFPPLKSYYL

SEQ ID NO: 4233 - protein, 415 aa, Azotobacter vinelandii
MEPFIYRDGTLFAEGVALSAIAARFGTPTYVYSRAHIEERYRAYADALAGMPHLVCFAVKANSNLAVLNLLARLGAGFDIVSRGELERVLAAGGDPARVVFSGVGKTREDMRRALEVGVHCFNVESDVELERLQEVAAELGVKAPVSLRVNPDVDAQTHPYISTGLKENKFGIDIEQAEEVYARAAELPNLEVLGIDCHIGSQLTTLSPFLDTLDRLLLLVDRLAARGIVIRHLDLGGGLGVRYRDEQPPAPGDYIAAVRERIEGRALALVFEPGRSIVANAGVLLTRVEYLKHTEHKDFAVIDAAMNDLIRPALYQAWMDVVPVTPHGGEVCSYDLVGPVCETGDFLAKDRELALVEGDLLAVRSAGAYGFVMSSNYNTRGRAAEVLVDGERMHLIRRRETIEDLYAGESLLPN

SEQ ID NO: 4234 - protein, 432 aa, Nicotiana glutinosa
MAGQTIIVSGLNPAAILQSTIGGGASPTAAAAENGTRKVIPLSRDALQDFMLSIITQKLQDEKQPFYVLDLGEVVSLMDQWKSSLPNIRPFYAVKCNPEPSFLSILSAMGSNFDCASRAEIEYVLALGISPDRIVFANPCKPESDIIFAAKVGVNLTTYDSEDEVYKIRKHHPKSELLPRIKPMFDGNARCPMGPKYGALPEEVEPLLRAAQAARLTVSGVSFHIGSGDADSNAYLGAIAAAKEVFETAAKLGMSKMTVLDVGGGFTSGHQFTTAAVAVKSALKQHFDDEPELTIIAEPGRFFAETAFTLATTVIGKRVRGELREYWINDGLYGSMNCVLYDHATVNATPLAVLSNRTNVTCGGSKTFPTTVFGPTCDALDTVLRDYQLPELQVNDWLVFPNMGAYTKAAGSNFNGFNTSTIVTHLAYTYPS

SEQ ID NO: 4235 - protein, 1434 aa, Plasmodium falciparum 3D7
MNGIFEGIEKRVVIKLKESFFKGNRNVNSFLDIPKELWEEKLKYIGCSIVSEISEDKNERRGERCRVYLLSESSLYIFDDSLFIKTCGKTRVLFFIPFVVDLLIYHMDNVGIIEKNCVYDETFIENEKFHNIAEFIKEHFLYCFFTHMNYRNKTKDGYFEQEYPHKSLEDEKKFFEFFFKNVQMYNTHLPMEKMHYIFFYSSDDVHMTDIASTFKFCSEIHLFGINKYNEKNQFHDAYLNNKSLNLFTRVHEDNLKLYDSSDADKEVTTHIYSTRGTYEDTGMVNCVDVIYKNESTLLNRNNIENIPSIENKESNNNSRCCHNNNYSGSCHNIVSVVPSERNNDHVHHRHYEDTLNRSNISAEDNNRNAQLEKEKDEDVRRDDEENKVLIKMIDTNLYECINYNKESFLYNEFYFTPCGYSCNVSEKNNYFCVHYSPEDSVSYVSVEVSSNLSCDRFLDFMHKQLNFYNGKYMFMINYVFCEESNNMSKMVPDDDNNNYSSGKSCVYYQDLNKKEKEEYYRLNKKLRNDLFINSKQFYELHTFTERTVGFMRVQYFVYKLRDVVKCVEKETLLARSSSCLFMFNNIKRNDVHDDYVTKSSNGGVIKQLTERDVDDMYEYALNFCKQNKIVVVDTNTFFDASKRKENLIKLEKVQTNEKDEYEEKDEVYRRGNNELSSLDHLDSKNNLIHMYYEKNKCDIINKDDENSTIATNNNDNNNDNNNDSSSYDKSITISRSSSCNNSHLSYSSFDNNHGNEKMKDYISVDENNNNNNNNNNNNNNNNNKNNNVLLTLQRNSDDENGKDKDNEKNDVSLENNMEKNYKEEIWNYYTKNKVEVKTLEKVLNENIDTSVVCINLQKILAQYVRFKKNLPHVTPFYSVKSNNDEVVIKFLYGLNCNFDCASIGEISKVIKLLPNLSRDRIIFANTIKSINSLIYARKENINLCTFDNLDELKKIYKYHPKCSLILRINVDFKNYKSYMSSKYGANEYEWEEMLLYAKKHNLNIVGVSFHVGSNTKNLFDFCLAIKLCRDVFDMSSNMGFNFYIINLGGGYPEELEYDNAKKHDKIHYCTLSLQEIKKDIQKFLNEETFLKTKYGYYSFEKISLAINMSIDHYFSHMKDNLRVICEPGRYMVAASSTLAVKIIGKRRPTFQGIMLKDLKDHYDPLNFAQQENKKQDETKINHNNDNNDNNDNNDNNDNNINNNNNNQKGGQGNIMNDLIITSTNDSTNKKNDHSSSQVIQNVSCTIRDKEGDNIKINTHTINNPNINGKENTVDGDNINIAHKNIGNNFSSSNSKLGNITNIKKKVVNINDNRYNYFSYYVSDSIYGCFSGIIFDEYNRCPIYVIKNKNNPNQNFMNFNLYLANVFGQSCDGLDMINSITYLPECYINDWLLYEYAGAYTFVSSSNFNGFKKCKKVYIFPESKPSLKGQPNKHW

SEQ ID NO: 4236 - protein, 251 aa, Carica papaya
IAVKCNPEPSFLSMLAAMGSNFDCASRAEIEYVLSLGISPERIVFANPCKPESDIIFAEKVGVNLTTYDSEDEVYENKKHHPKCELLLRIKPMNDGNARCPMGPKYGALPEEIEPLLRIAQASRLTVSGVSFHIGSGDADSNAYLGAIAAAKQVFETAAKFGMSKMNVLDIGGGFTSGHQFTTAATAVKSALQQHFSNEPELTIIAEPGRFFAETAFTLATTIIGKRVRGDLREYWINDGLYGSMNCVLYD

SEQ ID NO: 4237 - protein, 377 aa, Mesorhizobium loti
MATQRILDFLATRRPSGPCLVVDLDVVRDNFRAFEKALPDSKIYYAVKANPAPEILRLLAAMGSSFDTASVAEVEMAMDAGAPADRISFGNTIKKERDIARAYQLGIRLFAVDCVEEVEKIARVAPGARVFCRVLTDGEGAEWPLSRKFGCVPAMAVDVLRHAKGLGLDAYGVSFHVGSQQTDLTAWDRALADAKKVFATLAEEGIVLKMVNMGGGFPTRYLRDVPAAQAYGQAIFSALRKHFGNAIPETIIEPGRGMVGNAGVIKSEVVLISKKADNDNVRWVFLDIGKFGGLAETMDEAIRYPLVTRHDGSETAPCVLAGPTCDSADVMYEKTPYPLPLSLTIGDEVLIEGTGAYTTTYSAVAFNGFEPLRSYVI

SEQ ID NO: 4238 - protein, 406 aa, Mesorhizobium loti
MQRFENAREAALALRPDDPVYCFRPQVLKADARQFMGMFPGKTAYAVKTNGEQIVLKTLVEAGVTAFDVASPGEFAAVRAVSPDAEMLYMHPVKAQSDIKLALEKYGIRVISLDHEDEITKLTRVVRALDIDPGSISVFVRIQTKGSAAYELSKKFGAGPAYAVELAERLNRTGYKVGLCFHVGSQIEDPDTYERALASADWVRNRLTFDIAGLDVGGGFPAEYGHDPNRKQIEMPSLGQIMSRLSGDLKEYQFDQMPLVAEPGRVIVARCLSLIVRVLLRKGKRLYINDGIWASLSDSWTGKITLPARFIPDPAIRTRNGAEKNVVPFKVCGATCDSVDILSRPFWLPETVDTGDWIEIGHIGAYSLSLRTRFNGFYPDTFVEVTTPFDEGDAPQGFASLETMAD

SEQ ID NO: 4239 - protein, 379 aa, Sinorhizobium meliloti
MAMTTARIIDFLNTRRPEGPCLVVDLDVVRDNFKAFRHALPDSAIYYAVKANPAPEILRLLAGLGSNFDCASVAEIEMALDAGATPNRISYGNTIKKERDVARAHALGISLFAVDSHEEVEKIARAAPGARVFCRVLTDGEGAEWPLSRKFGCVPQMAVDVLVYAHQLGLVSYGVSFHVGSQMTKLDAWDAALADAKRVFVQLAKQGIELKMVNMGGGFPTKYLRDVPSAEAYGQAIFGALKKHFGNNIPETIIEPGRGMVGNAGVIKAEVVLVSKKSDNDSHRWVFLDIGKFGGLAETMDEAIRYPIRTARDADAMEPCVLAGPTCDSADVLYEKNMYPLPISLTIGDEVLIEGTGAYTTTYSAVAFNGFEPLKAYVI

SEQ ID NO: 4240 - protein, 422 aa, Sinorhizobium meliloti
MNHFQYRDGILYAEDVPLTEIARAVGTPFYCYSTATLERHYKVFSQAFADVDAMVCYAMKANSNQAVLKTLGRLGAGLDVVSEGELRRALAAGIPAGRIMFSGVGKTAREMDFALEAGIYCFNVESEPELEVLNQRAVRAGRRAPVSFRINPDVDARTHAKISTGKKENKFGISWERARGVYAHAAELPGIEVTGIDMHIGSQITELQPFDDAFKLLRELVDTLRSDGHVIEHVDIGGGLGIPYREDNNPPPLPDAYADIVKNQLKGLDCKIVTEPGRLIVGNAGILVTEVVYVKDGGDKTFVIVDGAMNDLIRPTLYEAYHEIRPVKISAASAPRIKADVVGPVCETGDYLALDREMAMPKPGDLFAIGSAGAYGAVQAGTYNSRLLVPEVLVKGDRFHVIRPRRDYDELIGLDSVPDWLD

SEQ ID NO: 4241 - protein, 431 aa, Glycine max
  unsure (1)..(431): unsure at all Xaa locations
MPSLVAEAFEAKGAEPLSLXXPIFSASGVKGKRVTALSADALTDFIQAIIADKXXDIDSPFSVLDLGVVMGLMDKWACKLPTVQPFYAVKCNPNLSLIGALAALGSSFDCASKAEIESVLSLGVSPDRIIYANPCKSESHIRYAASVGVNVTTYDSLDEVEKIRNCHPTCELLLRIKPPQDSGARTSLGLKYGALPEEVHELLQAAHEAGLKVTGVSFHIGSGGADTRAYDGAISAAKNVFEMASGLGLPRMRVLDIGGGFTSGPPFEAAALKINAAIQASFGNEEGLVVIGEPGRYFAETAFTLATRVIGKRVRGDVREYWIDDGIYGTLNNIVFDYATVTCMPLACTSKPENPTCWNLKTYPSTVFGPTCDSIDTVLRDYQLPELQVNDWLVFPNMGAYTTSSGTNFNGFSSSAKSIFLACSSPEHTMF

SEQ ID NO: 4242 - protein, 251 aa, Phaseolus vulgaris
IAVKCNPEPSFLSMLAAMGSNFDCASRAEIEYVLSLGISPERIVFANPCKPESDIIFAEKVGVNLTTYDSEDEVYKIKKHHPKCELLLRIKPMNDGNARCPMGPKYGALPEEIEPLLRIAQASRLTVSGVSFHIGSGDADSNAYLGAIAAAKQVFETADKFGMSKMNVLDIGGGFTSGHQFTTAATAVKSALQQHFSNEPELTIIAEPGRFFAETAFTLATTIIGKRVRGDLREYWINDGLYGSMNCVLYD

SEQ ID NO: 4243 - protein, 115 aa, Sphaerechinus granularis
MEQLNDKSMKTELFDSSETTLKDIIVSKINDPTMREDADDAFFIGDLGDVIQKHRKWLRNLPRVEPHYAVKCNPDVHVLKLLAGLNIGFDCASKNEIQEILKIGVSPSRIIFANP

SEQ ID NO: 4244 - protein, 251 aa, Daucus carota
IAVKCNPEPSFLSMLAAMGSNFDCASRAEIEYVLSLGISPGRIVFANPCKPESDIIFAEKVGVNLTTYDSEDEVYKIKKHHPKCELLLRIKPMNDGNARCPMGPKYGALPEEVEPLLRIAQASRLTVSGVSFHIGSGDADSNAYLGAIAAAKQVFETADKFGMSKMNVLDIGGGFTSGHQFTTAATAVRSALQQHFSNEPELTIIAEPGRFFAETAFTLATTIIGKRVRGDLREYWINDGLYGSMNCVLYD

SEQ ID NO: 4245 - protein, 435 aa, Capsicum annuum
MAGQTVIVSGLNPAAILQSTIGGAPPSTAAAAAENGDTTRKVVPLSKDALQDFMVSIITQKLQGKKKPFYVLDLGEVVSLMDQWNVALPNVHPFYAVKCNPEPSFLSMLAAMGSNFDCASRAEIEYVLSLGISPERIVFANPCKPESDIIFAEKVGVNLTTYDSEDEVYKIKKHHPKCELLLRIKPMNDGNARCPMGPKYGALPEEIEPLLRIAQASRLTVSGVSFHIGSGDADSNAYLGAIAAAKQVFETAAKFGMSKMNVLDIGGGFTSGHQFTTAATAVKSALQQHFSNEPELTIIAEPGRFFAETAFTLATTIIGKRVRGDLREYWINDGLYGSMNCVLYDHATVTATPLACMSNRVNLNCSGSKMFPSTIFGPTCDALDTVLRDYQLPELQVNDWLIFPNMGAYTKAAGSNFNGFNTSAIVTHLAYAYPS

SEQ ID NO: 4246 - protein, 435 aa, Capsicum annuum
MAGQTVIVSGLNPAAILQSTIGGAPPSTAAAAAENGDTTRKVVPLSKDALQDFMVSIITQKLQGEKKPFYVLDLGEVVSLMDQWNVALPNVRPFYAVKCNPEPSFLSMLAAMGSNFVCASRAEIEYVLSLGISPERIVFANPCKPESDIIFAEKVGVNLTTYDSEDEVYKIKKHHPKCELLLRIKPMNDGNARCPMGPKYGALPEEIEPLLRIAQASRLTVSGVSFHIGSGDADSNAYLGAIAAAKQVFETAAKFGMSKMNVLDIGGGFTSGHQFTTAATAVKSALQQHFSNEPELTIIAEPGRFFAETAFTLATTIIGKRVRGDLREYWINDGLYGSMNCVLYDHATVTATPLACMSNRVNLNCSGSKMFPSTIFGPTCDALDTVLRDYHVPELQVNDWVIFPNMGAYTKAAGSNFNGFNTSAIVTHLAYAYPS

SEQ ID NO: 4247 - protein, 335 aa, Capsicum annuum
AILQSTIGGAPPSTAAAAAENGDTTRKVVPLSKDALQDFMVSIITQKLQGEKKPFYVLDLGEVVSLMDQWNVALPNVRPFYAVKCNPEPSFLSMLAAMGSNFDCASRAEIEYVLSLGISPERIVFANPRKPESDIIFAEKVGVNLTTYDSEDEVYKIKKHHPRCELLLRIKPMNDGNARCPMGPKYGALPKEIEPLLRIAQASRLTVSGVSFHIGSGDADSNAYLGAIAAAKQVFKTAAKFGMSKVNVLDVGDGFTSGHQFTTAATAVKSALQQHFSNEPELTIIAEPGRFFAETAFTLATTIIGKRVRGDLREYWINDGLYGSMNCVLYDKGEF

SEQ ID NO: 4248 - protein, 431 aa, Datura stramonium
MAGQTVIVSGLNPAAILQSTIGGATPAPAAENDHTRKVVPLSRDALQDFMVSIITQKLQDEKQPFYVLDLGEVVSLMDQWNAGLPNIRPFYAVKCNPEPSFLSMLSAMGSNFDCASRAEIEYVLSLGISPDRIVFANPCKPESDIIFAAKVGVNLTTFDSEDEVYKIRKHHPKCELLLRIKPMDDGNARCPMGPKYGALPEEVEPLLRTAQAARLTVSGVSFHIGSGDADSKAYLGAIAAAKGVFETAARFGMSKMTVLDIGGGFTSGHQFTTASAAVRSALEQHFHDEQELTIIAEPGRFFAETAFTLATTIIGKRVRGELREYWINDGLYGSMNCVLYDHATVNATPLACMSNRSNLNCGGSKTFPSTVFGPTCDALDTVLRDYQLPELQVNDWLIFPNMGAYTKAAGSNFNGFNTSAIVTHLAYAYPS

SEQ ID NO: 4249 - protein, 431 aa, Lycopersicon esculentum
MAGQTVIVSGLNPAAILQSTIGGAPVAAAAENGHTRKVVPLSKDALQDFMVSIITQKLQDDKQPFYVLDLGEVVSLMEQWNSALPNIRPFYAVKCNPEPSFLSMLSAMGSNFDCASRAEIEYVLSHGISPDRIVFANPCKPESDIIFAEKIGVNLTTYDSEDEVYKIRKHHPKCELLLRIKPMTDGNARCPMGPKYGALPEEIEPLLRTAQAARLTVSGVSFHIGSGDADSNAYLGAIAAAKQVFETAAQLGMPKMTVLDIGGGFTSGHQFTTAAPAVKSALETHFHDFPELTIIAEPGRFFAETAFTLATTIIGKRVRGELKEYWINDGLYGSMNCVLYDHATVTATPLACMSNRNNLNCGGSKTFPSTVFGPTCDALDTVLRDYQLPELQVNDWLIFPNMGAYTKAAGSNFNGFNTSAIVTHLAYAYPN

SEQ ID NO: 4250 - protein, 433 aa, Nicotiana tabacum
MAGQTIIVSGLNPAAILQSTIGGGASPTAAAAAENGTRKVIPLSRDALQDFMLSIITQKLQDEKQPFYVLDLGEVVSLMDQWKSALPNIRPFYAVKCNPEPSFLSILSAMGSNFDCASRAEIEYVLSLGISPDRIVFANPCKPESDIIFAAKVGVNLTTYDSEDEVYKIRKHHPKSELLLRIKPMLDGNARCPMGPKYGALPEEVDPLLRAAQAARLTVSGVSFHIGSGDADSNAYLGAIAAAKEVFETAAKLGMSKMTVLDVGGGFTSGHQFTTAAVAVKSALKQHFDDEPELTIIAEPGRFFAETAFTLATTIIGKRVRGELREYWINDGLYGSMNCVLYDHATVNATPLAVLSNRSNVTCGGSKTFPTTVFGPTCDALDTVLRDYQLPELQVNDWLVFPNMGAYTKAAGSNFNGFNTSAIVTHLAYSYPS

SEQ ID NO: 4251 - protein, 432 aa, Nicotiana tabacum
MAGQTIIVSGLNPAAILQSTIGGGASPTAAAAENGTRKVIPLSRDALQDFMLSIITQKLQDEKQPFYVLDLGEVVSLMDQWKSALPNIRPFYAVKCNPEPSFLSILSAMGSNFDCASRAEIEYVLSLGISPDRIVFANPCKPESDIIFAAKVGVNLTTYDSEDEVYKIRKHHPKSELLLRIKPMFDGNARCPMGPKYGALPEEVEPLLRAAQAARLTVSGVSFHIGSGDADSNAYLGAIAAAKEVFETAAKLGMSKMTVLDVGGGFTSGHQFTTAAVAVRSALKQHFDDQPELTIIAEPGRFFAETAFTLATTIIGKRVRGELREYWINDGLYGSMNCVLYDHATVNATPLAVLSNRTNVTCGGSKTFPTTVFGPTCDALDTVLRDYQLPELQVNDWLVFPNMGAYTKAAGSNFNGFNTCAIVTHLAYTYPS

SEQ ID NO: 4252 - protein, 433 aa, Nicotiana tabacum
MAGQTVIVSGLNPAAILQSTIGGGASPTAAAAAENGTRKVIPLSRDALQDFMLSIITQKLQDEKQPFYVLDLGEVVSLMDQWKSALPNIRPFYAVKCNPEPSFLSILSAMGSNFDCASRAEIEYVLSLGISPDRIVFANPCKPESDIIFAAKVGVNLTTYDSEDEVNKIRKHHPKSELLLRIKPMLDGNARCPMGPKYGALPEEVDPLLRAAQAARLTVSGVSFHIGSGDADSNAYLGAIAAAKEVFETAAKLGMSKMTVLDVGGGFTSGHQFTTAAVAVKSALKQHFDDEPELTIIAEPGRFFAETAFALATTIIGKRVRGELREYWINDGLYGSMNCVLYDHATVNATPLAVLSNRSNVTCGGSKKFPTTVFGPTCDAFDTVLRDYQLPELQVNDWLVFPNMGAYTKAAESNFNGFNNSAIVTHLAYFYPS

SEQ ID NO: 4253 - protein, 245 aa, Nicotiana tabacum
GTRCPMGPKYGALPEEVDPLLRAAQAARLTVSGVSFHIGSGDADSNAYLGAIAAAKEVFETAAKLGMSKMTVLDVGGGFTSGHQFTTAAVAVKSALKQHFDDEPELTIIAEPGRFFAETAFTLATTIIGKRVRGELREYWINDGLYGSMNCVLYDHATVNATPLAVLSNRSNVTCGGSKTFPTTVFGPTCDALDTVLRDYQLPELQVNDWLVFPNMGAYTKAAGSNFNGFNTSAIVTHLAYSYPS

SEQ ID NO: 4254 - protein, 293 aa, Oryza sativa
  unsure (1)..(293): unsure at all Xaa locations
MFNHLELSDTLYNALSENSIYNYFNCVDKSALPDLLTNKAASEPQLDFSSVELLRQPIDVEQQIREKISQQTEDNAFFIVNLSDIIRKKKQWNNCLPRVEPFYAVKCNPDIEIIKCLAVMGVNFDCASRGEIDLVMSIGVTADRIIYANPCXPKAHLNYAREVGVNMSVFDGEAELYKIKECHPNLKVVMRIATDDRNSMCAFFVKFGARGNPSTAFLMVAKSLNPSXIGVAFHVGSGXCLDWDTYKSSFRRVSRFFQNGEELGLTMNLLGHLGGFPXDIVLFLEIISALIFS

SEQ ID NO: 4255 - protein, 339 aa, Sorghum bicolor
LNPAAILQSTNGGAPPSTAAAAAENGDTTRKVVPLSKDALQDFMVSIITQKFQGEKKPFYVLDLGEVVSLMDQWNVALPNVRPFYAVKCNPEPSFLSMLAAMGSNFDCASRAEIEYVLSLGISPERIVFANPCKPESDIIFAEKVGVNLTTYDLEDEVYKIKKHHPKCELLLRIKPMSDGNARCPMGSKFGAFPEEIEPVFRIAQASRLTVSGVSFHIDSGDADSNAYLGAIAAAKQVFETAAKFGMSKMNVLDIDGGFTSGHQFTTATTTVKSALQQHFSNEPELTIIAGPGRFFAETAYTLATTIIGKRVRGDLREYWINDGLYGSMNCVLYDNATS

SEQ ID NO: 4256 - protein, 497 aa, Triticum aestivum
  unsure (1)..(497): unsure at all Xaa locations
MCREVEQKPHTPRGIPRASDLLAALHTVARARATPRETVTYHAELGSHCLSEIFTVASVVEMVGSSPMQAVLVAPGVKDKKVLAFRQDALKDVAALMRTIAAGGVRSAFYVFDLARVVDLYPSXWRRALPGVRACYAVKCNPEPALLGALAALGAGFDCASRREIEAVLALGVQPGSIVYANPCKPEAHLEYAAEVGVNLTTYDSEEEVVKVKRCHPGCELILRIKGPDGGEARVDLGTKYGAHEDEVLPLLRAAQREGLNVAGVSFHVGSGASNTDVYRGAIEAARGVFDAAAALGMPPMRVLDIGGGFMAGSAFDEAATVINAALERYFGELPCVEVIGEPGRYFAETAFTMAARVIGKRTRGEVREYWIDDGLYGTLSCIPMDHYVPHPRPLAVXXRAGEKAYTSTVFGPTCDSLDTVVTGYQLPEMNVGDWLVFDDMGAYTTASGSNFNGFSTSDIKTYLAYSSXYGTYDVATYYVAHAIRFVFAVHKTKSCN

SEQ ID NO: 4257 - protein, 194 aa, Triticum aestivum
  unsure (1)..(194): unsure at all Xaa locations
XARAAFDAAAQLGMPPMRVLDIGGGFMPDATFDEAAEAINDALAQHFPPGCGVEVIGEPGQYFAEKAFTLAARVIGRRARGEAREXGASTCRARGRSLPHLGRLRAAPEAAHCPASARRRGEGTTYASTVFGPTCDSRDKVVTGHQLPEMKVGDWLVFDGIGAYAASSGSNFNGFLISDIKTHLAYSTXPPTSS

SEQ ID NO: 4258 - protein, 126 aa, Triticum aestivum
  unsure (1)..(126): unsure at all Xaa locations
XEGKGYMLYVNDGVYGNFSNIMFDHQQPTAKILRTSGKTLFETAAAEPTPVGEGFEYSIWGPTCDGIDRITDSTRFDPILDVGDWLYFEDMGAYTKCSATQFNGFSNAHDVIYVCSEPGAKALLGL

SEQ ID NO: 4259 - protein, 148 aa, Triticum aestivum
  unsure (1)..(148): unsure at all Xaa locations
IPATQAEHTPHQQCPAQVLARIRSRPDRHGRRQPNAVGAGGPRGXXGRKLHAFKRNGXXDAGVTGVMRSIAGTEEPFFVFDLATVVDLYSRWCRALDGVRPYYAVKCNPEPAMLGAMAALGAGFDCASRAEIEAVLALGVVEPGSIVX

SEQ ID NO: 4260 - protein, 125 aa, Triticum aestivum
  unsure (1)..(125): unsure at all Xaa locations
DSALRAHHXIAARQTWPEAALQAAVLGAPGVKGRKVRALKRSDKDAVAGLIRSIAGXXEEQGAFFVFDLAAVADLYSRWCRALDGVRPFYAVKCNPEPAMLGAMAALGAGFDCASRAEIEAVLAH

SEQ ID NO: 4261 - protein, 467 aa, Zea mays
  unsure (1)..(467): unsure at all Xaa locations
SHQTTFSPQGLLGITCQVRWIGHRLVNTSSPTNKFDPAAHLSPSSIVITMVGSSPLQAVLVAPGVKDRKVLAFKRDALKDSLIHSILASSPAQRSAFYVFDLAKVVDLFRAWRRALPDARPCYAVKCNPDPALLGALAALGAGFDCASRAEIEAVLALGVRPGDIVYANPCKPEAHLEYAAEVGVNLTTYDSEEEVAKVRRCHPGCELLLRLKGPDGGDVRVDLGTKYGAHPDEVVPLLRAAQRAGVGVAGVSFHVGSGASNLHVYRGAIQAARAAFDAAAALGMPPMRVLDIGGGFVSGPTFDDAAAVINDALAHHFGDLPCVEVIAEPGRYFAETAFTLAARVIGKRTRGEVREYWIDDGLYGSLNCIIMDHYVPTPRPLASPRPGDKTYTSTVFGPTCDSLDTVLTGYLLPEMSVGDWLVFDDMGAYTTGAGSNFNGYATSDIKIYVAYSSXMRTSPRRRAWTN

SEQ ID NO: 4262 - protein, 339 aa, Zea mays
LNPTAILQSTIGGAPPSTAAAAAENGDTTRKVVPLSKDALQDFMVSIITQKLQGEKKPFYVLDLGEVVSLMDQWNVALPNVRPFYAVKCNPEPSFLSMLAAMGSNFDCASRAEIEYVLSLGISPERIVFANPCKPESDIIFAEKVGVNLTTYDSEDEVYKIKKHHPKCELLLRIKPMNDGNARCPMGPKYGALPEEIEPLLRIAQASRLTVSGVSFHNGSGDADSNAYLGAIAAAKQVFETAAKFGMSKINVLDIGGGFTSGHQFTTAATAVKSALQQHFSNEPELTIIAEPGRFFAETAFTLATTIIGKRVRGDLREYWINDGLYGSMNCVLYDNATS

SEQ ID NO: 4263 - protein, 256 aa, Zea mays
SQHEFSIEQVRSRCSSIARVVNRLVITMVGSSPLQAVLVAPGVKDRKVLAFKRDALKDSLIHSILASSPAQRSAFYVFDLAKVVDLFRAWRRALPDARPCYAVKCNPDPALLGALAALGAGFDCASRAEIEAVLALGVRPGDIVYANPCKPEAHLEYAAEVGVNLTTYDSEEEVAKVRRCHPGCELLLRLKGPDGGDVRVDLGTKYGAHPDEVVPLLRAAQRAGVGVAGVSFHVGSGASNLHVYRGAIQAARAAFD

SEQ ID NO: 4264 - protein, 289 aa, Zea mays
CESLDSFVTAIEDAKAVFEMGKNLGFDMHILDLGGGYPGTSDAKIPFEPIAEIIQETLDRCFPPVDGLEIIAEPGRYFAASAFTLVTQVIAKREIQYDDNAAAEAIEFADREIMYYLNDGVYGSFNCTIFDHWTVYPCPWLEANPVQSYIRTVLWGPTCDSMDMIRRDIYMPELIIGDWVVFDEMGAYTIAAASPFNGFKLPKLKYQISGRVMAVLKATKDWPALKKLLVSPESSAEHQQMGCSSSSLSYSGSFGNSENHLHPTPPDTEPGDRIEPCMKNGKISYIQVH

SEQ ID NO: 4265 - protein, 164 aa, Phycomyces blakesleeanus
CKQASYIRYAAQQNVAKMTFDNADELYKIKKFYPNAELVLRILTDDSKSLCQLGIKFGAPLDTVDHLLQTAKDLDLNVIGVSFHVGSGCYDQYAFSEAVNLARGVFDKAEAMGFNFSLLDVGGGFPSADVTDGVTFEKIAAVLGPTVDALFPPNIRVIAEPGRY

SEQ ID NO: 4266 - protein, 421 aa, Novosphingobium aromaticivorans
MGTSKPQGSLVQRSVWGSLELHIHPDALAVVRASAPDQPAILNRPHAAARAARFFVEKFPGKSLYAVKANPSADLLRVLWDSGVTHYDVASIAEVRLVRATLPEATLCFMHPVKAPAAIREAYEQHGVRVFSLDSFEELEKIKEACGFAEDLTLCVRLRVSSDYSELSLASKFGCDLTNAAELLQATRQAADSLGVCFHVGSQSMSPHAYVQALERVRAAIVDASVTVDIIDVGGGFPSIYPGMEPPPLEDYFGVIDRTYESLPISYSAELWCEPGRALCAEYNSMIVRVERRRGAELYINDGAYGALFDAAHVGWRFPVRVLREEVANDGVEIEMEPFSFYGPTCDDMDHMEGPFELPADMKVGDYIEIGMLGAYGAAMKTAFNGFGATEVFEVSDEPMASQYRGDRRDPRVSDNVVSLR

SEQ ID NO: 4267 - protein, 419 aa, Novosphingobium aromaticivorans
MDHFEVSNGVLHAEDVALPVIAAEVGTPVYVYSRATLTRHARVFRDALSILPAVKIAFAVKSNPNLAVLKVLAAEGYGADVVSGGEMERALAAGMKPDGIVFSGVGKTEAEMRRGIEAGIGQFNLESEEEGLELAEIAASMGKVASAALRVNPDVDAGTHGKISTGKAENKFGVPFDRAAAIYARLADTPGLNMRGLALHIGSQLSKLDPLEAAFTKVGGLMRAIREGGHAVTHMDLGGGVGVPYKAGEVFPQPAEYAAMVAKVTADWGVTLMFEPGRVITGNTGVLMTQVVRVKEGAGHPWVVVDAAMNDLARPALYDAWHDFAAVEPTGETFVANIVGPICESSDTFAMARTIDKVGRGDLAVFRTAGAYGATMANTYNSRPLVPEVMVDGEKWAVVADRIDPATILAAERVPDFLK

SEQ ID NO: 4268 - protein, 432 aa, Schizosaccharomyces pombe
MPAIMEKNMLVSESLRTTELLGHVKPIDSVVTWSSPGSSRQAIGEAFKNTIEEIERAAVRGEPADSDAFFVADLNGVYRQLLRWHAKLPRVQPFYAVKCNPDPKVLALLNKFGTGFDCASKGELEQILGLGVSPDRIVYANPCKAITYVRYAASKGINLMTFDNADELYKVKQHHPNSRLLLRISTDDSNSLCRLSLKFGASLDDTGKLLDIAKSLELNVVGVSFHVGSGSYDPSAFLDAIQRSRQVFDQGLERGFNFDLLDIGGGFMNDSFDGVADLIRSALDTYFDPSIRVISEPGRFFVSSSFTLAVNVIAKRKLDDEEKVMYYVNDGVYGSLNCILFDHQHPVARVLKCGSRFVYNDLVGTGQHRCFIWGPTCDSLDVIANDAHLPYELNVGDWIYFEDAGAYTVAAASCFNGFKTSRIVYLDTDILD

SEQ ID NO: 4269 - protein, 363 aa, Schizosaccharomyces pombe
FVADLNGVYRQLLRWHAKLPRVQPFYAVKCNPDPKVLALLNKFGTGLDCASKGELEQILGLGVSPDRIVYANPCKAITYVRYAASKGINLMTFDNADELYKVKQHHPNSRLLLRISTDDSNSLCRLSLKFGASLDDTGKLLDIAKSLELNVVGVSFHVGSGSYDPSAFLDAIQRSRQVFDQGLERGFNFDLLDIGGGFMNDSFDGVADLIRSALDTYFDPSIRVISEPGRFFVSSSFTLAVNVIAKRKLDDEEKVMYYVNDGVYGSLNCILFDHQHPVARVLKCGSRFVYNDLVGTGQHRCFIWGPTCDSLDVIANDAHLPYEPNVGDWIYFEDAGAYTVAAASCFNGFKTSRIVYLDTDILD

SEQ ID NO: 4270 - protein, 449 aa, Yarrowia lipolytica
MAPHILGPEPVQADSSFLGTRPCPTLSYPASFVDEVSASIDQGLSESEKLIANAMKTRIEAIDLETCSPGSEDSFFVADLGIVYSQFMRWSNCLPRVTPFYAMKCNGDPKVLQLLAALGTGFDCASRNEIQTILDLGVSQDRIIYAHPCKVASYIRYASSVGVEKMVFDNAEELYKCAKYHPTAKLFLRIVTDDSQSLCQFSVKYGAALENTQSLLQLAKDLGLNVAGVSFHVGSGAGDPNAFLDAVRNAKRVFDQGAAIGMHLNTLDVGGGFSDDSFESSAAVLGDALDKYFPEESGVNLMAEPGRFFVSEAFTIASHVIARRIIENQNKAMLYLNDGVYGNMNCILFDHQEPVPKVLTYQGKFMYGERYQKQKSSQDVSVWGPTCDGIDCISKSCQLPVLLDVGDWMYFTSFGAYTVAASTTFNGFNSDCETLYVCSKKEVEQYIKL

SEQ ID NO: 4271 - protein, 81 aa, Yarrowia lipolytica
GVSFHVGSGAGDPNAFLDAVRNAKRVFDQGAAIGMHLNTLDVGGGFSDDSFESSAAVLGDALDKYFPEESGVNLIAEPGRY

SEQ ID NO: 4272 - protein, 484 aa, Neurospora crassa
MVMPTVVSDRMGTIDFIDYTNNHVFSKCQTDSLNTVNNGSLKHDDYLHGLANGKLVAKQMIGDALRQRVESIDSEFCEPGDEDTFFVADLGEVYRQHLRWKLNLPRVKPFYAVKCHPDERLLQLLAALGTGFDCASKAEIEQVLRMGVDPSRIIYAQPCKTNSYLRYVAQQGVRQMTFDNADELRKIARLYPDAELFLRILTDDSSSLCRFSMKFGASLDSTDGLLGLARQLGLNVVGVSFHVGSGASDPTAFLKAVQDAHVVFQQAAAYGYSLKTLDVGGGFCSDDSFEQMANVLRAALDEYFPAHTGVNLIAEPGRYYASSAFTLACNIIARRTIQDGSAVSVSDSSSMSDDGSVNNGDARYMVYVNDGLYGNFSSIMFDHQHPVAKILRAGGRTMYNSVAAHESSAEDAIEYSIWGPTCDGIDRITESIRFREILDVGDWLYFEDMGAYTKCSATTFNGFSNEHDVIYVCSEPGAMALLGL

SEQ ID NO: 4273 - protein, 459 aa, Ustilago maydis
MSSITLSRLMVTSPSITATLTRSVGVFSTTLTYHGCEANGENAFFVADLSEVYRQHLRWMRALPRIVPFYAVKCNPDPYVLQLLGALGTGFDCASNGEIEAVLKLGINPARIIYANPSKAASFVRHAAGHNVGLTTFDNMDELEKMKRYHPSCKLVVRILTDDSKSACQLGLKFGAPIASVPRLLERARELELDVVGVSFHVGSGCYDPDSFRDAVYRACAFEMGKQAGFSFDLLDVGGGFGHDNFEMVAGVLGPAIDAYFPDEDFAPGGKEVVGKVNGLRIIAEPGRFYVHSAFALATNIIAVRRGEPSAAMDHVEATPKAQVMYYQNDGLYGSFNCVIFDHVKFIQSSDAGPRVRVRADDWVARGASGECGRLALQQEAMTLESCSVWGPTCDSIDCVRDHVELPKGLQVGDWLVYENMGAYTICAASTFNGIRRSEIRYTLGHGQDADIVRQLMLQ

SEQ ID NO: 4274 - protein, 421 aa, Zymomonas mobilis
MIPFSLKNGTLCVEDIPLPEIAAQYGTPCYVYSHSYLTERARRFTKALDGAGKGKSLVAFAVKANPSQAILASFAKEGLGADVVSAGEIRRAVHAGIPPERIVFSGVGKTAEEMRYALEIGIGQFNIESVSEIEMLAEVATSLGKKAAVALRINPDVDPHTHAKIATGKADTKFGIAAEDALSAYEKLASYPSLKIQGIASHIGSQITDLAPFEAAAERIYEIITALEKAGHAIETADLGGGLGVRYKDDQPEPPSVEAYGEMIKRVTKGWNCRLIFEPGRSLIANAGVLLSKVIRIKESKTARFVILDAAMNDLVRPTLYDAYHEIKAVTPSAQTYQADIVGPVCETGDIFARNRSISAVKADDLMAIMSAGAYGATMASAYNSRPLVAEVMVSGNKSALIRKRQSVEDLMRDEQKVEWL

SEQ ID NO: 4275 - protein, 473 aa, Candida albicans
MKHTIIENEPEIKLQNDLNHHIEISPNTKTTNGTTTTTTTLNVNKTLKAIDLIETSIKNHISTIDHENCLPNDEDSFFVCDLGEIINSVNQWQQILPMVQPYYAVKCNSNPQILTTLSELGVNFDCASKNEIDLVLSLGIHQAHERIIYANPCKTNSFIRHAADENVNLTTVDNVHELYKLAKFHPHCKILIRLITDDSTAQCQLSTKFGCDLNTAIGEILPKAKELGLQVHGVAFHVGSGAKDFSSIYQAIKDSRILFDEMLSMGFTPKLLDIGGGFERETFPQSSQMVKFALEKFFPIEFSQSNEIKFIAEPGRFMVANAFTLITHIIARRDLPTGGNNNNNDMTPSAMLYINDGVYGNLNCILFDHQTPKVYVLTNENQLFYKQEMMRSLSVNNNNNNNNKTDGFKFSIWGPTCDGLDCVSSLAKLSKNVQVGDWLFFENVGAYTSCASTKFNGLSSGETKTLYVNSNEE

SEQ ID NO: 4276 - protein, 470 aa, Candida albicans
MKHTIIENEPEIKLQNDLNHHIEISPNTKTTNGTTTTTTTLNVNKTLKAIDLIETSIKNHISTIDHENCLPNDEDSFFVCDLGEIINSVNQWQQSLPMVQPYYAVKCNSNPQILTTLSELGVNFDCASKNEIDLVLSLGIHQAHERIIYANPCKTNSFIRHAANENVNLTTVDNVHELYKLAKFHPHCKILIRLITDDSTAQCQLSTKFGCDLNTAIGEILPKAKELSLQVHGVAFHVGSGAKDFSSIYQAIKDSRILFDEMLSMGFTPKLLDIGGGFERETFPQSSQMVKFALEKFFPIEFSQSNEIKFIAEPGRFMVANAFTLITHIIARRDLPTGGNNHNNDMTPSAMLYINDGVYGNLNCILFDHQTPKVYVLTNENQLFYKQEMMRSLSVNNNNNKTDGFKFSIWGPTCDGLDCVSSLAKLSKNVQVGDWLFFENVGAYTSCASTKFNGLSSGETKTLYVNSNEE

SEQ ID NO: 4277 - protein, 440 aa, Erwinia chrysanthemi
MADPTPPVAAEAGSLFANGYVEEIPVANIADRIGTPFYVYSARQLRRQLQQLRQQLPTGTAIYYSLKANPNLSVVRALAEQGAGCEVCSPAELKTALAAGVSPQHILYVGPGKSLPALKLAIDCGIRAIVVESVTELDNLNRLAARANTVQTVALRINPDFSSAHARLVMSGKPTQFGMMRDTLHTVLASLHRWPSISLRGFHVYLGTRILNAQAIADNTRNILQLALDLRDTHRLTLDFVDVGGGFGVPYFPKETPLDLPALGAAIASIVADFRRRAADTQIIIELGRYLVAEAGLFVTRVNTLKTAGGKTFAVCDGGANCHSAAAGLNSMLRKNFPLLRLGDNQGRPLQPYQVSGPLCTPTDLLGDNVLLPTLEVDDLIGITHSGAYGLTASPGSFLSFGYPVEVMVDGRRLTLIRQPETTEQLLARQQPVDLCGDTP

SEQ ID NO: 4278 - protein, 721 aa, Crithidia fasciculata
MSNHDVSLSNASHYNHANYTELVPLPTIAQTPTHHFAHDENHVTITENGVTMTTTVSAAAMMTATAPLPVSPVHAFDEAAQRRLLARKTALLEQYRMYPQSADRLAQQRRHHEASHLRDAEDSDGAALSPSLLSPTDCNKTTAAYAQTVAMSPNEKGGADRHTPVAASQDLVDLFFLEGSDAVNGMSFSAYPIYGERTAAERRAAVRAVFEKYGVDMQLPASPAVLAAAPAHRQRRFRTVLPRDSVETREQYWRRLSNVYIQKGVKATMAAAANPTGSNKPAYEAEDPFYMIDLGRVVEQMARWRHELPMVRPHFAVKCNPNLAIMEVLGALGAGFDCASKDEIHLVLDNHLVDSPDDIVFANPCKQLGDLREARACGVTYVTVDNVPEMEKIGRMLPSARAIIRIKTNDAAAKCAFSTKFGAGMDDVESLLQAARQHNVEVYGVSFHVGSGNGDQSAYVSALRDSYRVFQLAAGYGFNCTVLDIGGGYPGTEPIPGSGETSFETIARAMRPVLEELFGGGDVTIISEPGRYFTAATHALAMNVFATRTLRLSDVEKENCQAFQNVVNMDEPEEYQYYVNDGLYHSFNCIVFDHAHPTLLLLNDGDGADDTAEGVANAAVDDVDSEEEGEPTVDGAPTNDSLFVSAWDRRRNLTRRPLRITTIFGPTCDSMDCILKKQPFPEMKLGDWLLAPDMGSYTTAAGCPFNGFATRRREWVSSVAL

SEQ ID NO: 4279 - protein, 707 aa, Leishmania donovani
MGDHDVALCHVSRYNHANYWAFVPLPTVSDDTGCDSLHHDSASERIRMAPPASASKAGAAEERLHPYERRLLDQYQIHLQPANRNPLSRADSAAGREETAQTPAQVQMVPVVAVADSTSDQHASVASSQDLVDLFFLEGSQAVDGLCFSPYPIYGWRTAEERRAAVCEVFKTYNVVTRLPASPAALAAAQRRYSRHRHSAIAPINKSAIETREQYWRRLSNLYTQKGVKDAASAADAAATTATNGAVPAAPAYEPEDPFYIIDLGRVVEQMARWRHELPMVRPYFAVKSNPQPAVLEVLSALGAGFDCASKEEIHMVLGRQLVASPDDIIFANPCKQLGDLREAQACGVTYVTVDNPLEMEKISRLMPSAHAIIRIKTNDSKAQCSFSTKFGAPLEDVEGLLEAARQFNVTVCGVSFHVGSGNDDQSAYVSAVRDAYQVFQQAVQYGFKCTILDIGGGFPGTEVVEGSGNTSFEAIARTIRPVLAELFGGGDVTIISEPGRYFTAASHALLMNVFASRTLRLSDVEVSRQAFQSVVSMDEPEEYQYYVNDGLYHSFNCILFDHAHPTLLLLNDGDGADGVESGTEAAAVCSEEEGETSLSGPLANDPLFMSAWDRRRSFARRPLRITTIFGPTCDSMDCILKKQPFPEMKLGDWLLVPDMGSYTTAAAGFFNGFATRRLEWVSSVDLCARPRPVYTREGNTLRCVSE

SEQ ID NO: 4280 - protein, 732 aa, Leishmania tarentolae
MGDHEVSLCHVSHYNHANYLDLVPLPTVSDDMGFESLCHDSASGRIRIAHPTPALNPNAAEELLSPCPTCRLEQCHIHFQPANHNSPSPAHPATGGKEAAEVRDTDAEESLLPTQTVLSSPECSAHIPAQLQMVTGGAPADSTEDQRTPVAASQNLVDLFFLEGSQAVDGVCFSPYPIYGWRTAEERQAAIWEVFRTYNVATRLPVSPAALAAAQSRYSCYKQSATAPTNNRVAETREQYWRRLANLYIQKGVKAASSAAHNAATTVTNGAVPVAPTCDPEDPFYIIDLGRVVEQMARWRHELPMVRPYFAVKSNPQAAVLEVLSALGAGFDCASREEIQMVLRNNLVATPDDIIFANPCKQLSDMREAQACGVTYVTVDNPLEMEKISRVMPSARAIIRIKTNDSKAQCSFSTKFGASLEDVEGLLQVARQFNVAVCGVSFHVGSGNYDESAYVSAVRDAYQVFQQAAKYGFHCTILDIGGGFPGTEAVEGSGSASFESIARRIRPVLVELFGGGEVTIISEPGRYFTAASHALLMNGFASRTLPLSEVEVSRQAFQSVVSMQEPREHQYYVNDGLYHSFNCILFDHAHPKLLLLNDGDGADEVQSGTEAAAAYSDEEGGKSPSGPLANDSLFMSAWDRRRNLTSRPLRITTIFGPTCDSMDCILKKQPFPEMKLGDWLLVPDMGSYTTAAAGVFNGFATRRLEFVSSADLSARSRAVHAHEGNTFEFVSE

SEQ ID NO: 4281 - protein, 425 aa, Trypanosoma brucei
GAMDIVVNDDLSCRFLEGFNTRDALCKKISMNTCDEGDPFFVADLGDIVRKHETWKKCLPRVTPFYAVKCNDDWRVLGTLAALGTGFDCASNTEIQRVRGIGVPPEKIIYANPCKQISHIRYARDSGVDVMTFDCVDELEKVAKTHPKAKMVLRISTDDSLARCRLSVKFGAKVEDCRFILEQAKKLNIDVTGVSFHVGSGSTDASTFAQAISDSRFVFDMGTELGFNMHILDIGGGFPGTRDAPLKFEEIAGVINNALEKHFPPDLKLTIVAEPGRYYVASAFTLAVNVIAKKVTPGVQTDVGAHAESNAQSFMYYVNDGVYGSFNCILYDHAVVRPLPQREPIPNEKLYPSSVWGPTCDGLDQIVERYYLPEMQVGEWLLFEDMGAYTVVGTSSFNGFQSPTIYYVVSGLPDHVVRELKSQKS

SEQ ID NO: 4282 - protein, 445 aa, Trypanosoma brucei
MTTKSTPSSLSVNCLVAQTEKSMDIVVNDDLSCRFLEGFNTRDALCKKISMNTCDEGDPFFVADLGDIVRKHETWKKCLPRVTPFYAVKCNDDWRVLGTLAALGTGFDCASNTEIQRVRGIGVPPEKIIYANPCKQISHIRYARDSGVDVMTFDCVDELEKVAKTHPKAKMVLRISTDDSLARCRLSVKFGAKVEDCRFILEQAKKLNIDVTGVSFHVGSGSTDASTFAQAISDSRFVFDMGTELGFNMHILDIGGGFPGTRDAPLKFEEIAGVINNALEKHFPPDLKLTIVAEPGRYYVASAFTLAVNVIAKKVTPGVQTDVGAHAESNAQSFMYYVNDGVYGSFNCILYDHAVVRPLPQREPIPNEKLYPSSVWGPTCDGLDQIVERYYLPEMQVGEWLLFEDMGAYTVVGTSSFNGFQSPTIYYVVSGLPDHVVRELKSQKS

SEQ ID NO: 4283 - protein, 425 aa, Trypanosoma brucei
GAMDIVVNDDLSCRFLEGFNTRDALCKKISMNTCDEGDPFFVADLGDIVRKHETWKKCLPRVTPFYAVACNDDWRVLGTLAALGTGFDCASNTEIQRVRGIGVPPEKIIYANPCKQISHIRYARDSGVDVMTFDCVDELEKVAKTHPKAKMVLRISTDDSLARCRLSVKFGAKVEDCRFILEQAKKLNIDVTGVSFHVGSGSTDASTFAQAISDSRFVFDMGTELGFNMHILDIGGGFPGTRDAPLKFEEIAGVINNALEKHFPPDLKLTIVAEPGRYYVASAFTLAVNVIAKKVTPGVQTDVGAHAESNAQSFMYYVNDGVYGSFNCILYDHAVVRPLPQREPIPNEKLYPSSVWGPTCDGLDQIVERYYLPEMQVGEWLLFEDMGAYTVVGTSSFNGFQSPTIYYVVSGLPDHVVRELKSQKS

SEQ ID NO: 4284 - protein, 423 aa, Trypanosoma brucei brucei
MDIVVNDDLSCRFLEGFNTRDALCKKISMNTCDEGDPFFVADLGDIVRKHETWKKCLPRVTPFYAVKCNDDWRVLGTLAALGTGFDCASNTEIQRVRGIGVPPEKIIYANPCKQISHIRYARDSGVDVMTFDCVDELEKVAKTHPKAKMVLRISTDDSLARCRLSVKFGAKVEDCRFILEQAKKLNIDVTGVSFHVGSGSTDASTFAQAISDSRFVFDMGTELGFNMHILDIGGGFPGTRDAPLKFEEIAGVINNALEKHFPPDLKLTIVAEPGRYYVASAFTLAVNVIAKKVTPGVQTDVGAHAESNAQSFMYYVNDGVYGSFNCILYDHAVVRPLPQREPIPNEKLYPSSVWGPTCDGLDQIVERYYLPEMQVGEWLLFEDMGAYTVVGTSSFNGFQSPTIYYVVSGLPDHVVRELKSQKS

SEQ ID NO: 4285 - protein, 1419 aa, Plasmodium falciparum
MNGIFEGIEKRVVIKLKESFFKGNRNVNSFLDIPKELWEEKLKYIGCSIVSEISEDKNERRGERCRVYLLSESSLYIFDDSLFIKTCGKTRVLFFIPFVVDLLIYHMDNVGIIEKNCVYDETFIENEKFHNIAEFIKEHFLYCFFTHMNYRNKTKDGYFEQEYPHKSLEDEKKFFEFFFKNVQMYNTHLPMEKMHYIFFYSSDDVHMTDIASTFKFCSEIHLFGINKYNEKNQFHDAYLNNKSLNLFTRVHEDNLKLYDSSDADKEVTTHIYSTRGTYEDTGMVNCVDVIYKNESTLLNRNNIENIPSIENKESNNNSRCCHNNNYSGSCHNIVSVVPSERNNDHVHHRHYEDTLNRSNISAEDNNRNAQPEKEKDEDVRRDDEENKVLIKMIDTNLYECINYNKESFLYNEFYFTPCGYSCNVSEKNNYFCVHYSPEDSVSYVSVEVSSNLSCDRFLDFIHKQLNFYNGKYMFMINYVFCEESNNMSKMVPDDDNNNYSSGKSCVYYQDLNKKEKEEYYRLNKKLRNDLFINSKQFYELHTFTERTVGFMRVQYFVYKLRDVVKCVEKETLLARSSSCLFMFNNIKRNDVHDDYVTKSSNGGVIKQLTERDVDDMYEYALNFCKQNKIVVVDTNTFFFDASKRKENLIKLEKVQTNEKDEYEEKDEVYRRGNNELSSLDHLDSKNNLIHMYYEKNKCDIINKDDENSTIATNNNDNNNDSSSYDKSITISRSSSCNNSHLSYSSFDNNHGNEKMKDYISVDENNNNNNNNKNNNVLLTLQRNSDDENGKDKDNEKNDVSLENNMEKNYKEEIWNYYTKNKVEVKTLEKVLNENIDTSVVCINLQKILAQYVRFKKNLPHVTPFYSVKSNNDEVVIKFLYGLNCNFDCASIGEISKVIKLLPNLSRDRIIFANTIKSINSLIYARKENINLCTFDNLDELKKIYKYHPKCSLILRINVDFKNYKSYMSSKYGANEYEWEEMLLYAKKHNLNIVGVSFHVGSNTKNLFDFCLAIKLCRDVFDMSSNMGFNFYIINLGGGYPEELEYDNAKKHDKIHYCTLSLQEIKKDIQKFLNEETFLKTKYGYYSFEKISLAINMSIDHYFSHMKDNLRVICEPGRYMVAASSTLAVKIIGKRRPTFQGIMLKELKDHYDPLNFAQQENKKQDETKINHNNDNNDNNDNNDNNINNNNNNQKGGQGNIMNDLIITSTNDSTSKKNDHSSSQVIQNVSCTIRDKEGDNIKINTHTINNPNINGKENTVDGDNINIAHKNIGNNFSSSNSKLGNITNIKKKVVNINDNRYNYFSYYVSDSIYGCFSGIIFDEYNRCPIYVIKNKNNPNQNFMNFNLYLANVFGQSCDGLDMINSITYLPECYINDWLLYEYAGAYTFVSSSNFNGFKKCKKVYIFPESKPSLKGQPNKHW

SEQ ID NO: 4286 - protein, 948 aa, Plasmodium falciparum
MFMINYVFCEESNNMSKMVPDDDNNNYSSGKSCVYYQDLNKKEKEEYYRLNKKLRNDLFINSKQFYELHTFTERTVGFMRVQYFVYKLRDVVKCVEKETLLARSSSCLFMFNNIKRNDVHDDYVTKSSNGGVIKQLTERDVDDMYEYALNFCKQNKIVVVDTNTFFFDASKRKENLIKLEKVQTNEKDEYEEKDEVYRRGNNELSSLDHLDSKNNLIHMYYEKNKCDIINKDDENSTIATNNNDNNNDSSSYDKSITISRSSSCNNSHLSYSSFDNNHGNEKMKDYISVDENNNNNNNNKNNNVLLTLQRNSDDENGKDKDNEKNDVSLENNMEKNYKEEIWNYYTKNKVEVKTLEKVLNENIDTSVVCINLQKILAQYVRFKKNLPHVTPFYSVKSNNDEVVIKFLYGLNCNFDCASIGEISKVIKLLPNLSRDRIIFANTIKSINSLIYARKENINLCTFDNLDELKKIYKYHPKCSLILRINVDFKNYKSYMSSKYGANEYEWEEMLLYAKKHNLNIVGVSFHVGSNTKNLFDFCLAIKLCRDVFDMSSNMGFNFYIINLGGGYPEELEYDNAKKHDKIHYCTLSLQEIKKDIQKFLNEETFLKTKYGYYSFEKISLAINMSIDHYFSHMKDNLRVICEPGRYMVAASSTLAVKIIGKRRPTFQGIMLKDLKAHYDPLNFAQQENKKQDEPKINHNNDNNDNNSNDNNNNNNNNNNNQKGGQGNIMNDLIITSTNDSTNKKNDHSSSQVIQNVSCTIRDKEGDNIKINTHTINNPNINGKENTVDGDNINIAHKNIGNNFSSSNSKLGNITNIKKKVVNINDNRYNYFSYYVSDSIYGCFSGIIFDEYNRCPIYVIKNKNNPNQNFMNFNLYLANVFGQSCDGLDMINSITYLPECYINDWLLYEYAGAYTFVSSSNFNGFKKCKKVYIFPESKPSLKGQPNKHW

SEQ ID NO: 4287 - protein, 947 aa, Plasmodium falciparum
MFMINYVFCEESNNMSKMVPDDDNNNYSSGKSCVYYQDLNKKEKEEYYRLNKKLRNDLFINSKQFYELHTFTERTVGFMRVQYFVYKLRDVVKCVEKETLLARSSSCLFMFNNIKRNDVHDDYVTKSSNGGVIKQLTERDVDDMYEYALNFCKQNKIVVVDTNTFFFDASKRKENLIKLEKVQTNEKDEYEEKDEVYRRGNNELSSLDHLDSKNNLIHMYYEKNKCDIINKDDENSTIATNNNDNNNDSSSYDKSITISRSSSCNNSHLSYSSFDNNHGNEKMKDYISVDENNNNNNNNKNNNVLLTLQRNSDDENGKDKDNEKNDVSLENNMEKNYKEEIWNYYTKNKVEVKTLEKVLNENIDTSVVCINLQKILAQYVRFKKNLPHVTPFYSVKSNNDEVVIKFLYGLNCNFDCASIGEISKVIKLLPNLSRDRIIFANTIKSINSLIYARKENINLCTFDNLDELKKIYKYHPKCSLILRINVDFKNYKSYMSSKYGANEYEWEEMLLYAKKHNLNIVGVSFHVGSNTKNLFDFCLAIKLCRDVFDMSSNMVFNFYIINLGGVYPEELEYDNVKKHDKIHYCTLSLQEIKKDIQKFLNEETFLKTKYGYYSFEKISLAINMSIDHYFSHMKDNLRVICEPGSYMVAASSTLAVKIIGKRRPTFQGIMLKDLKAHYGPLNFAQQENKKQDETKINHNNDNNDNNDNNDNNINNNNNNQKGGQGNIMNDLIITSTNDSTSKKYDHSSRKVIQNVSCTIRDKEVDNIKINTHTINNPNINGKENTVDGDNINIAHKNIGNNFSSSNSKLGNITNIKKKVVNINDNRYNYFSYYVSDSIYGCFSGIIFDEYNRCPIYVIKNKNNPNQNFMNFNLYLANVFGQSCDGLDMINSITYLPECYINDWLLYEYAGAYTFVSSSNFNGFKKCKKVYIFPESKPSLKGQPNKHW

SEQ ID NO: 4288 - protein, 1419 aa, Plasmodium falciparum
MNGIFEGIEKRVVIKLKESFFKGNRNVNSFLDIPKELWEEKLKYIGCSIVSEISEDKNERRGERCRVYLLSESSLYIFDDSLFIKTCGKTRVLFFIPFVVDLLIYHMDNVGIIEKNCVYDETFIENEKFHNIAEFIKEHFLYCFFTHMNYRNKTKDGYFEQEYPHKSLEDEKKFFEFFFKNVQMYNTHLPMEKMHYIFFYSSDDVHMTDIASTFKFCSEIHLFGINKYNEKNQFHDAYLNNKSLNLFTRVHEDNLKLYDSSDADKEVTTHIYSTRGTYEDTGMVNCVDVIYKNESTLLNRNNIENIPSIENKESNNNSRCCHNNNYSGSCHNIVSVVPSERNNDHVHHRHYEDTLNRSNISAEDNNRNAQPEKEKDEDVRRDDEENKVLIKMIDTNLYECINYNKESFLYNEFYFTPCGYSCNVSEKNNYFCVHYSPEDSVSYVSVEVSSNLSCDRFLDFIHKQLNFYNGKYMFMINYVFCEESNNMSKMVPDDDNNNYSSGKSCVYYQDLNKKEKEEYYRLNKKLRNDLFINSKQFYELHTFTERTVGFMRVQYFVYKLRDVVKCVEKETLLARSSSCLFMFNNIKRNDVHDDYVTKSSNGGVIKQLTERDVDDMYEYALNFCKQNKIVVVDTNTFFFDASKRKENLIKLEKVQTNEKDEYEEKDEVYRRGNNELSSLDHLDSKNNLIHMYYEKNKCDIINKDDENSTIATNNNDNNNDSSSYDKSITISRSSSCNNSHLSYSSFDNNHGNEKMKDYISVDENNNNNNNNKNNNVLLTLQRNSDDENGKDKDNEKNDVSLENNMEKNYKEEIWNYYTKNKVEVKTLEKVLNENIDTSVVCINLQKILAQYVRFKKNLPHVTPFYSVKSNNDEVVIKFLYGLNCNFDCASIGEISKVIKLLPNLSRDRIIFANTIKSINSLIYARKENINLCTFDNLDELKKIYKYHPKCSLILRINVDFKNYKSYMSSKYGANEYEWEEMLLYAKKHNLNIVGVSFHVGSNTKNLFDFCLAIKLCRDVFDMSSNMGFNFYIINLGGGYPEELEYDNAKKHDKIHYCTLSLQEIKKDIQKFLNEETFLKTKYGYYSFEKISLAINMSIDHYFSHMKDNLRVICEPGSNMVAASSTLAVKIIGKRRPTFQGIMLKDLKDHYDPLNFAPQENKKQDETKINHNNDNNDNNDNNDNNINNNNNNQKGGQGNIMNDLIITSTNDSTSKKNDHSSSQVIQNVSCTIRDKEGDNIKINTHTINNPNINGKENTVDGDNINIAHKNIGNNFSSSNSKLGNITNIKKKVVNINDNRYNYFSYYVSDSIYGCFSGIIFDEYNRCPIYVIKNKNNPNQNFMNFNLYLANVFGQSCDGLDMINSITYLPECYINDWLLYEYAGAYTFVSSSNFNGFKKCKKVYIFPESKPSLKGQPNKHW

SEQ ID NO: 4289 - protein, 253 aa, Plasmodium falciparum
GSVLCVKCNNDEVVIKFLHGLNCNFDCASIGEISKVIKLLPNLSRDRIIFANTIKSINSLIYARKENINLCTFDNLDVLKKIYKYHPKCSLILRINVDFKNYKSYMSSKYGANEYEWEEMLLYAKKHNLNIVGVSFHVGSNTKNLFDFCLAIKLCRDVFDMSSNMGFNFYIINLGGGYPEELEYDNAKKHDKIHYCTLSLQEIKKDIQKFLNEETFLKTKYGYYSFEKISLAINMSIDHYFTHMKDNLRVICE

SEQ ID NO: 4290 - protein, 435 aa, Panagrellus redivivus
MTLTGCVDYYEIIAGTKVAVCRNAIDNKTVATAIAATRTVNGNDDPFVVMNVSTIMAKVIQWQRTMPRVAPCYAVKCNDDKVLLRTLADLGMGFDCASKAEIEKVIGLVGPEKIVYANPCKTRGFIAHAEAAGVKRMTFDSVEELTKIKQNHADPSLILRISVSDPTAQCQLGIKFGCDPETVAPKLLRKAADMGMNVIGISFHVGSGCNEPATFRTALEYARGLFDLGISLGLSMTLLDIGGGFPGVDTAHISLDACAAVINPALEELFPLDSCPDVEVIAEPGRYFACAAVSVTTNVIASVKVPASRITEKADDVNRDGYMYYMNDGVYGSFNCKLFDHYQPRGMPLAEHDADEPRFPVCVWGPTCDGLDQVEESSVMPRLYEGDWLYYPDMGAYTSVAASTFNGFDKPKTYYFIDEATLGSIVRKADSAPRG

SEQ ID NO: 4291 - protein, 422 aa, Caenorhabditis elegans
MISQFEIIGDNKIGVLPKQVDQLQMCRDIAASKDLQENDSSFMLVDLDKIIERFQLWKRELPMIEPFYAVKCNTDLVLIRILASLGCGFDCASKDEIDIVMGTGVSAERIIYANPCKTRSFIAHAMDRDVKMMTFDNPEELLKIAKLHPNAEMILRIAVSDPTATCPLNLKFGADPIIAAPQLLKTASEEGINVVGISFHVGSGCNDASAYRNALQHAKNLCEIGEGLGFKMDIIDMGGGFPGAEHHNPFEKIAETIRDALDEFFPDTNKRLIAEPGRFFAAGPFSLVANIIHATEVPASKITKDPKDCADHGYMYYINDGVYGSFNCILFDHAHPIGSPLFDTDRNEKFMSTIWGPTCDSLDLVEDKKLMPKMNVGEWLYYPDMGAYTLAAATTFNGFSKPVPMYVMSEEMWESIRDSTHV

SEQ ID NO: 4292 - protein, 422 aa, Caenorhabditis elegans
MISQFEIIGDNKIGVLPKQVDQLQMCRDIAASKDLQENDSSFMLVDLDKIIERFQLWKRELPMIEPFYAVKCNTDLVLIRILASLGCGFDCASKDEIDIVMGTGVSAERIIYANPCKTRSFIAHAMDRDVKMMTFDNPEELLKIAKLHPNAEMILRIAVSDPTATCPLNLKFGADPIIAAPQLLKTASEEGINVVGISFHVGSGCNDASAYRNALQHAKNLCEIGEGLGFKMDIIDMGGGFPGAEHHNPFEKIAETIRDALDEFFPDTNKRLYREPGRFFAAGPFSLVANIIHATEVPASKITKDPKDCADHGYMYYINDGVYGSFNCILFDHAHPIGSPLFDTDRNEKFMSTIWGPTCDSLDLVEDKKLMPKMNVGEWLYYPDMGAYTLAAATTFNGFSKPVPMYVMSEEMWESIRDSTHV

SEQ ID NO: 4293 - protein, 477 aa, Caenorhabditis elegans
MVRHRLPSSTYYTPAGEPEWSREMFGEQSIAVLSGAYRNPIEMARHVAARCGSYQPFFVMDVAAIERRLEALRVMLPRVRPNYAVACNADPVLARVLSNNIDVNFEVSNTAELELVSMNVEPSRAVFCSQLMTRKAIKNAVLAGCSTFVVESEKQVTDVMNASPEAEIILAVCLPYSTGEVPFGCSVDEIEEILDMAHLLGANVTGIYLELGLRATLEDYITSVHDARSIFETADQKFLTLRRVCFGNLSVPTGADGAVNNEFMSFCNSLNNVIDDLFESNIDFSASIGRFLVTNAFTLCTNVIGKRAMDAKFITNDDFDDGVGFVYQTNDGVYGSFGCKQMDIKPLCKPLDVENDSEEQLHFGTILGPTLDGTDVAQRLMKSRQLRVGEWLVWEQMGAFTIPVDSEHSVPPVYYYSGKECWQKLIHKDEQRRSPSPSVSDNEDIGSDGEGGYASSCEDSEAEMALEPLIEDLNEFF

SEQ ID NO: 4294 - protein, 263 aa, Caenorhabditis elegans
MVRHRLPSSTYYTPAGEPEWSREMFGEQSIAVLSGAYRNPIEMARHVAARCGSYQPFFVMDVAAIERRLEALRVMLPRVRPNYAVACNADPVLARVLSNNIDVNFEVSNTAELELVSMNVEPSRAVFCSQLMTRKAIKNAVLAGCSTFVVESEKQVTDVMNASPEAEIILAVCLPYSTGEVPFGCSVDEIEEILDMAHLLGANVTGIYLELGLRATLEDYITSVHDARSIFETADQKFLTLRRVCFGNLSVPITILEKNAGKN

SEQ ID NO: 4295 - protein, 422 aa, Haemonchus contortus
MTMITQMELIGDSKVGIADGEVDALSMCRQIARNYDKDNIDEALCWSTDVVSTDSFVKRELPMIEPFYAVKCNTDRVLVRTLAALGTGFDCASREEIDIVMDLGVSAERIVYANPCKTRSFITHAKERNVSMMTFDSAEELAKVAQLHPQAKMILRIAVSDPTARCPLNLKFGADPVKMAPQLLVHAQELGVDVIGISFHVGSGCNDPTAYREALAHARHLIELGRGLGLDMTLVDLGGGYPGTPQQTSFEDIAAVIRSAVDEYLPPEFGVRLIAEPGRFFAAAPFTLVCNIIHATEVSAEKITKRPEDVEERGFMYYVNDGVYGSFNCILFDHVQPVGTPLFDEIAQEYPSTIWGPTCDSLDKIEDQKLMRMMSVGEWIVYRNMGAYTCSASTTFNGFQRPNAIYMINRKNWARISTSPNV

SEQ ID NO: 4296 - protein, 110 aa, Haemonchus contortus
FYAVKCNTDRVLVRTLAALGTGFDCASREEIDIVMDLGVSAERIVYANPCKTRSFITHAKERNVSMMTFDSAEELAKVAQLHPQAKMILRIAVSDPTARCPLNLKFGADP

SEQ ID NO: 4297 - protein, 415 aa, Haemophilus influenzae Rd
MNFFQYKHNKLYAEDMPVQQLAEQFGTPLYVYSRATLERHWHAFDSAFGNRPHLICFAVKSCSNIGVLNIMAKLGSGFDIVSQGELERVLAAGGDASKVVFSGVAKSREEIMRALEVRIRCFNVESVSELKHINQIAGEMGKIAPISLRVNPDVDAHTHPYISTGLKENKFGVSVNEAREVYKLASTLPNIKITGMDCHIGSQLTELQPFLDATDRLIVLMEQLKEDGITLKHLDLGGGLGVTYTDETPPHPSDYANALLEKLKNYPELEIILEPGRAISANAGILVAKVQYLKSNESRNFAITDTGMNDMIRPALYEAYMNIVEIDRTLEREKAIYDVVGPVCETSDFLGKQRELSIAEGDYIAQCSAGAYGASMSSNYNSRARTAEVLVDGDQSYLIRRRETLQELWALESTI

SEQ ID NO: 4298 - protein, 394 aa, Drosophila melanogaster
MAAATPEIQFYERELNIRRVIEECDLQRLDQALNICDLSSVERNVRLWQKLLPRIKPFYAVKCNDDPMVVRLLAQLGAGFDCASKNEVKLVLGFDVSPERIIFANPCRPVSHLEYAKEHQVSNGTVDNEFEVYKLHTHYPNSNLIVRFKSEAKEAQCPLGDKFGCDADVDAAALMLLAKSLELKVTGTSFHVGSGCSELQAYDRAIKKAKNLFKFGALLGYDMDFLDIGGGFPGSDDVKFEQIAESVNTSVQRHFPDERVHIIAEPGRFFVAAACTLVCKIHAKREIRNEAGKLDTVMYYLNDGVYGSFNCILYDHQVVIAEHYQDNAESLPHLKSLIWGPSCDALDQISEDLHLPNLNRGDLLGFRNMGAYTMPIASAFNGFEVPKTLYFQAI

SEQ ID NO: 4299 - protein, 394 aa, Drosophila melanogaster
MAAATPEIQFYERELNIRRVIEECDLQRLDQALNICDLSSVERKLRLWQKLLPRIKPFYAVKCNDDPMVVRLLAQLGAGFDCASKNEVKLVLGFDVSPERIIFANPCRPVSHLEYAKEHQVSNGTVDNEFEVYKLHTHYPNSNLIVRFKSEAKEAQCPLGDKFGCDADVDAAALMLLAKSLELKVTGTSFHVGSGCSELQAYDRAIKKAKNLFKFGALLGYDMDFLDIGGGFPGSDDVKFEKIAESVNTSVQRHFPDERVHIIAEPGRFFVAAACTLVCKIHAKREIRNEAGKLDTVMYYLNDGVYGSFNCILYDHQVVIAEHYLDNAESLPHLKSLIWGPSCDALDKISEDLHLPNLNRGDLLGFRNMGAYTMPIASAFNGFEVPKTLYFQAI

SEQ ID NO: 4300 - protein, 394 aa, Drosophila melanogaster
MAAATPEIQFYERELNIRRVIEECDLQRLDQALNICDLSSVERNVRLWQKLLPRIKPFYAVKCNDDPMVVRLLAQLGAGFDCASKNEVKLVLGFDVSPERIIFANPCRPVSHLEYAKEHQVSNGTVDNEFEVYKLHTHYPNSNLIVRFKSEAKEAQCPLGDKFGCDADVDAAALMLLAKSLELKVTGTSFHVGSGCSELQAYDRAIKKAKNLFKFGALLGYDMDFLDIGGGFPGSDDVKFEKIAESVNTSVQRHFPDERVHIIAEPGRFFVAAACTLVCKIHAKREIRNEAGKLDTVMYYLNDGVYGSFNCILYDHQVVIAEHYLDNAESLPHLKSLIWGPSCDALDKISEDLHLPNLNRGDLLGFRNMGAYTMPIASAFNGFEVPKTLYFQAI

SEQ ID NO: 4301 - protein, 393 aa, Drosophila melanogaster
MVNGDLRIQYYDEELNIRKVIEQADLEHLDQALNICDLSSLERKLRLWHKLMPRIEPHYAVKCNDDPVVVKFLADLGTGFDCASKNELKLVLGFGVSPERIIFAHPCRPASHLRYAKEQQVVNGTVDNEYEIYKLRKHYPDSSLIVRFKSEAKKALCPLGDKYGCDAEADAAALMLLAKALGLKVTGTSFHVGSGCSEVEAYDRAIEKAENIFKVGEMIGHKMELLDVGGGFPGIDDEMFKEIAQSVNTSVELRFPDKRIRIISEPGRFFVEAAYTLICKVHAKREVRSKDGKLDTMMYYLNDGIFGAFAGMFYYPEEVAPELYLDEAESLPKLKSVIWGPSCDALDKISDLLLPNLNPGDLLGFRNMGAYTMPIASPFNGFDVPETRFFKAK

SEQ ID NO: 4302 - protein, 393 aa, Drosophila melanogaster
MVNGDLRIQYYDEELNIRKVIEQADLEHLDQALNICDLSSLERKLRLWHKLMPRIEPHYAVKCNDDPVVVKFLADLGTGFDCASKNELKLVLGLGVSPERIIFAHPCRPASHLRYAKEQQVVNGTVDNEYEIYKLRKHYPDSNLIVRFKSEAKKALCPLGDKYGCDAEADAAALMLLAKALGLKVTGTSFHVGSGCSEVEAYDRAIEKAENIFKVGEMIGHKMELLDVGGGFPGIDDEMFEEIAQSVNTSVELRFPDKRIRIISEPGRFFVEAAYTLICKVHAKREVRSKDGKLDTMMYYLNDGIFGAFAGMFYYPEEVAPELYLDEAESLPKLKSVIWGPSCDAMDKISDLLLPNLNPGDLLGFRNMGAYTMPIASPFNGFDVPETRFFKAK

SEQ ID NO: 4303 - protein, 1404 aa, Plasmodium yoelii yoelii
MSNVFEGIEKRVVIKLRKNLFMNGNINSLLDISRDLWEEKLNLIGCNIVSEIKEDINAPLNERSRVYLLSESSLYIYNDMIYIKTCGKTKVLFFIPFLVDILIYKWKKYFVLEKSNLYNESFIQNDTKLEEILDFIQKYFEYSFFTHMNYKNVTKDGYYEQEYPHKSVEDEKVFFKFFLKSMEFVNTPLPMNRNHYIFFSQVNKDATIDTSALNVFPNFCSEMHLFGVKKYSMPNQFHSEYLTYDSLNVLSNHSLNIPKSEESEKIEVCSSSVYSFDSVENSSKYTNNTANTNVTVNVSKDIDNNSINTLYNTVDDQTVILTCSDDKNNNLNESDSKLLLAGENSKNMDKDNTQVFNDDNNNNYIFISNPKVQETYSNTNSVRSNEKSTCSSSSTYTSLLQNDLKEFHPKNNAMDTIEDDGRLLVEEEDISYISNEETIDAKVEQIDNLSNKSILDNNLDKNYDQNEPSLSSFTVACSDLINKNANDEKSEDNTSKNIRIKKIEENLYECINTQNNDKFIYNEFYFVPCGFSCNVANKNNYLCVHYSPEDCVSYVSVELSCVLKSENFMNFIKKQLNFYKAQYLYIINYLYDFNENTLAQKSGDNNKDSNNRFLSVLLSSQNNKNIKSINEVVEVNKKLDNNIIINNGQYYSLCAKKEQSVGFLKIQYCVYEQKNFIRNEEKIKSYNSICFEQSNKNAQNVNTLKSTTLSLQDVNSMYEYSYNFCKENNIHIIDIEDDLNSIDNSSNSNHNNYPISNSSDNVDDIHMKKDSNILKESYETEKRTDPISSFLLDEQKAQNEKSRSSSETNSNITDDDNNEFVLEKKYKKEMMNYYRNNRVEISTFNKMLNENIDTSVFCINLQKILLQYIRFKRNLPRVTPFYAVKSNDDEVVLKFLYGLNCSFDCASIGEINKLITLLPDISTDRIIYANTIKSPASLKYAKEKNINLCTFDNIDELKKICKYHPTCSLLLRINIDFKNYKSYMSSKYGANEFEWEKILKFGKENNMNIIGVSFHVGSNTKNIFDFCQAIKLSREVFDISHRLGFKFRILNMGGGYPEELEYDFAKKNEKKHYCTLNEEELKKYIMSFLNEKSVIKKNYNFYNFEKIALAINMSIDHYFKDMKDQLKIISEPGRYMVASSSTLAAKVIGKRCPTFSPIRLSNLKNAEDNNDDNEVKNEQVANNDNDQQNGDGNIQNKDQGNCTGTIPDVELRTEKESKHLPSEVCTNGEIQTSNVCNTNTDNENVSSFGTTTNGKTVIPGSAFNHEDNSKLGNITNIKKKVVNIHDNRYNYYSYYITDSIYGCFSGIIFDEYSRPPIYIINNNKMDSKKMILDSPLYLTNIFGQSCDGLDMITSSTYLPECNINDWIIYEYTGAYTFVSSSNFNGFQPCKKIYIFPRNKFPFSV

SEQ ID NO: 4304 - protein, 396 aa, Musca domestica
MFKENEINFYENEIDLKQVIAGQNLQSADEALFVCDLTRLKEKYDMWTKYMPRVKPYYAVKCNDDGHIVKTLAELGTNFDCASKGEIKQVLDLGVHPDRIIFAQPCKPISHLEYAKEMGVMTSTVDTEFEIHKLHKHFPESNLVIRFRCEAKEAQCPLGDKFGCDAENEATSLMLLAKSLNLKVIGTSFHVGSGCNDLPAYDRAITIAKNLFKFGALLGYEMNLLDIGGGFPGSDNKKFEKIAEIVNKSLMRHFPDDKVNIIAEPGRFFVASAYTLICKIHAKGEARLPNGKLLTKMYYLNDGVYGSFNCILYDHQHAEVQHFVDEENAEVPKFNSLIWGPTCDALDKIAEDLQLPDLKCGDFLAFPNMGAYTIPIASPFNGFMLPKILYFHKAKI

SEQ ID NO: 4305 - protein, 416 aa, Pasteurella multocida
MDYFQYQQAQLMAEQVPVKHIAQQYGTPLYIYSRATLERHWHAFNNALGDHPHLICFAVKSNPNIAILNIMARLGSGFDIVSQGELERVLAAGGEPSKIVFSGVAKTETEIARALEVGIRCFNVESVAELYRINQVAGEMGKTAPISLRVNPDVDARTHPYISTGLKENKFGISVAEARNVYQLANQLPHIQITGMDCHIGSQLTELQPFLDATDRLIVLMEQLKQDGIQLKHLDLGGGLGVPYTNENPPHPSEYASALLDKLKAYHELEIILEPGRAITANAGILVTKVEYLKHNEDRHFAIVDAGMNDMIRPALYQAYMNIIEVDRTLTRDKAVYDVVGPICETSDFLGKQRELAIAAGDYLAQRSAGAYGASMSSNYNSRSRTAEVMVDGDQVHLIRRRETLEELWALERLLP

SEQ ID NO: 4306 - protein, 461 aa, Danio rerio
MTACTGSDFDFAFLEEGFCARDIVEQKINESSLSDDKDAFYVADLGDVLKKHLRWLRVLPRITPFYAVKCNDSRAVVTTLASLGAGFDCASKTEIQIVQSVGVDPSRIIYANPCKQVSQIKYASAHGVQMMTFDSEVELMKVARSHENAKLVLRIATDDSKAVCRLSVKFGATLKSSRLLLERAKELGLDVIGVSFHVGSGCTDPETYSQAISDARYVFDIGAELGYNMSLLDIGGGFPGSEDTKLKFEEIAAVINPALDKYFPVDSGVRIIAEPGRYYVASAYTLAVNIIAKKVIMKEQSASDEEEDVSNDRTLMYYVNDGVYGSFNCILYDHAHVLPTLHKKPKPDERMYPCSIWGPTCDGLDRIVEQCSLPDMQVGDWLLFENMGAYTVAASSTFNGFQKPDIYYIMSRTAWQCMQQIRAQGIPALPLEEPSAGNVPSHCGRESSLDVPAKPCPTQVL

SEQ ID NO: 4307 - protein, 419 aa, Danio rerio
MKGFVDAPNYFIELLEGGTTLENVIDNHIYEQNLAEKNAFVVADLGALMRQHVAWKTTMPLVRPFYPVSCNSSPVVIELLSALGVGFVCANKAETTLVLSHDVPPENIILSGVCKQLSLIKHAAKTGINFLLCENEAELRKIARAHPEAKLLLQVSTEAQIEEASVTIGCSLKGCRHLLELAKELNVSVAGVTFQVPASCKDPQAYTHALSDARCIFDMGKELGFDMNILDIGGGFSGSEFQLKQVHSVIRPLLEAYFPSESGVSIIAEPGNFFVFSCFTLAVNVIGKKAAYRDLHTSTHDKLTSSEAPEFVYYMNDGVYGSFMGRLFGNIISTPSVHKMSLTLDEPVFSSSLWGPSCDPLDQVVERCLLPELAVGDWLVFINMGASGQEGPATFSDTDQPPVYYTISTDDWFEMQEAG

SEQ ID NO: 4308 - protein, 436 aa, Danio rerio
MKGFVDAPNYFIELLEGGTTLENVIDNHIYEQNLAEKNAFVVADLGALMRQHVVWKTTMPLVRPFYPVSCNSSPVVIELLSALGVGFVCANKAETTLVLSHDVPPENIILSGVCKQLSLIKHAAKTGINFLLCENEAELRKIARAHPEAKLLLQVSTEAQIEEASVTIGCSLKGCRHLLELAKELNVSVAGVTFQVPASCKDPQAYTHALSDARCIFDMGKELGFDMNILDIGGGFSGSEFQLKQVHSVIRPLLEAYFPSESGVSIIAEPGNFFVFSCFTLAVNVIGKKAAYRNLHTSTHDKLTSSDAPEFVYYMNDGVYGSFMGRLFGNIISTPSVHKMSLTLDEPVFSSSLWGPSCDPLDQVVERCLLPELAVGDWLVFSNMGASGQEGPATFSDTDQPPVYYTISTDDWFEMQEAGISLDDTMKNLSLVQFGL

SEQ ID NO: 4309 - protein, 116 aa, Platichthys flesus
ASAYTLVVNIIAKKVIMDEDSVSDDEDEGTNDRTLMYYVNDGVYGSFNCILYDHAHCLPVLHKKPKPDEIMYPCSIWGPTCDGLDRIVEQCYLPDMQVGDWLVFENMGAYTVAASS

SEQ ID NO: 4310 - protein, 460 aa, Xenopus laevis
MNSFSNDDFDFSFLEEGFSARDIVEQKINEVSLSDDKDAFYVADLGDIVKKHVRWFKALPRVTPFYAVKCNDGKAIVKTLSILGAGFDCASKTEIQLVQSIGVSPERIIYANPCKQVSQIKYAASCGVEKMTFDSEVELMKVARNHPNAKLVLRIATDDSKAVCRLSVKFGATLKTSRLLLERAKELNVDIIGVSFHVGSGCTDPQTYVQAVSDARCVFDMGAELGFNMHLLDIGGGFPGSEDVKLKFEEITSVINPALDKYFPADSGVKIIAEPGRYYVASSFTLAVNIIAKKVMVNEQSGSDDEEDAANDKTLMYYVNDGVYGSFNCILFDHAHVKPVLTKKPKPDEKFYSSSIWGPTCDGLDRIVERFELPELQVGDWMLFENMGAYTVAAASTFNGFQRPTLYYVMSRPHWQLMHDIKEHGILPEVPDLSALHVSCAQESGMELAPAVCTAASINV

SEQ ID NO: 4311 - protein, 456 aa, Xenopus laevis
MQGYIQESDFNLVEEGFLARDLMEEIINEVSQTEDRDAFFVADLGDVVRKHLRFLKALPRVKPFYAVKCNSSKGVVKILAELGAGFDCASKTEIELVQDVGVAPERIIYANPCKQISQIKYAAKNGVQMMTFDNEVELSKVSRSHPNARMVLRIATDDSKSSARLSVKFGAPLKSCRRLLEMAKNLSVDVIGVSFHVGSGCTDSKAYTQAISDARLVFEMASEFGYKMWLLDIGGGFPGTEDSKIRFEEIAGVINPALDMYFPESSDVQIIAEPGRYYVASAFSLAVNVIAKKEVEHSVSDDEENESSKSIMYYVNDGVYGSFNCLVFDHAHPKPILHKKPSPDQPLYTSSLWGPTCDGLDQIAERVQLPELHVGDWLLFENMGAYTIAASSNFNGFQQSPVHYAMPRAAWKAVQLLQRGLQQTEEKENVCTPMSCGWEISDSLCFTRTFAATSII

SEQ ID NO: 4312 - protein, 456 aa, Xenopus laevis
MQGYIQESDFTLVEEGFLARDLMEEIINEVSQTEDRDAFFVADLGDVVRKHLRFLKALPRVKPFYAVKCNSSKGVVKILAELGAGFDCASKTEIELVQDIGVAPERIIYANPCKQISQIKYAAKNGVQMMTFDNEVELSKVSRSHPNARMVLRIATDDSKSSARLSVKFGAPLKSCRRLLEMAKNLSVDVIGVSFHVGSGCTDSKAYTQAISDARLVFEMASEFGYKMWLLDIGGGFPGTEDSKIRFEEIAGVINPALDMYFPESSDVQIIAEPGRYYVASAFSLAVNVIAKKEVEHSVSDDEENESSKSIMYYVNDGVYGSFNCLVFDHAHPKPILHKKPSPDQPLYTSSLWGPTCDGLDQIAERVQLPELHVGDWLLFENMGAYTIAASSNFNGFQQSPVHYAMPRAAWKAVQLLQRGLQQTEEKENVCTPMSCGWEISDSLCFTRTFAATSII

SEQ ID NO: 4313 - protein, 460 aa, Xenopus laevis
MNSFSNDDFDFSFLEEGFSARDIVEQKINEVSLSDDKDAFYVADFGDIVKKHVRWFKALPRVTPFYAVKCNDGKAIVKTLSILGAGFDCASKTEIQLVQSIGVSPERIIYANPCKQVSQIKYAASCGVEKMTFDSEVELMKVARNHPNAKLVLRIATDDSKAVCRLSVKFGATLKTSRLLLERAKELNVDIIGVSFHVGSGCTDPQTYVQAVSDARCVFDMGAELGFNMHLLDIGGGFPGSEDVKLKFEEITSVINPALDKYFPADSGVKIIAEPGRYYVASSFTLAVNIIAKKVMVNEQSGSDDEEDAANDKTLMYYVNDGVYGSFNCILFDHAHVKPVLTKKPKPDEKFYSSSIWGPTCDGLDRIVERFELPELQVGDWMLFENMGAYTVAAASTFNGFQRPTLYYVMSRPHWQLMHDIKEHGILPEVPDLSALHVSCAQESGMELAPAVCTAASINV

SEQ ID NO: 4314 - protein, 405 aa, Helicobacter pylori 26695
MFNYEELFQTHKTPFYLYDFDKIKQAFLNYKEAFKGRKSLICYALKANSNLSILSLLAHLESGADCVSIGEIYRALKAGIKPYRIVFSGVGKSGFEIEQALKLNILFLNVESFMELTTIETIAQSLGIKARISIRINPNIDAKTHPYISTGLKENKFGVGEKEALEMFLWAKKSAFLEPVSVHFHIGSQLSDLEPIIEASQKVAKIAKSLIALGIDLRFFDVGGGIGVSYENEETIKLYDYAQGILNSLQGLDLTIICEPGRSIVAESGELITQVLYEKKAQNKRFVVVDAGMNDFLRPSLYHAKHAIRVITPSKGREISPCDVVGPVCESSDTFLKDAHLPELEPGDKLVIEKVGAYGSSMASQYNSRPKLLELALEDHKIRVIRKREALEDLWRLEEEGLKGV

SEQ ID NO: 4315 - protein, 405 aa, Helicobacter pylori J99
MFNYEELFQTYKTPFYLYDFDKIKQAFLNYKEAFKGRKSLICYALKANSNLSILSLLANLGSGADCVSIGEIQRALKAGIKPYKIVFSGVGKSAFEIEQALKLNILFLNVESFMELKTIETIAQSLGIKARISIRINPNIDAKTHPYISTGLKENKFGVEEKEALEMFLWAKKSAFLEPVSVHFHIGSQLLDLDPITEASQKVAKIAKSLIALGIDLRFFDVGGGIGVSYENEETIKLYDYAQGILNSLQGLDLTIICEPGRSIVAESGELITQVLYEKKAQNKRFVIVDAGMNDFLRPSLYHAKHAIRVITPCGGREISPCDVVGPVCESSDTFLKDANLPELEPGDKLAIEKVGAYGSSMASQYNSRPKLLELALEDHKIRVIRKREALEDLWRLEIEGLEGV

SEQ ID NO: 4316 - protein, 448 aa, Oculimacula yallundae
MSPSAITTLETQTSLTNIHSYYENPKSSFVEPEVNNHGVNNPKKLIGDALKERIENIDQDACEPGDEDAFFVADLGEVYRQHMRWKLNLPRVKPFYAVKCNPDNRVIQLLAALGTGFDCASKAEIEQVIKADVDPSRIIYAQPCKTNSYVRYAANHNVKQMTFDNADELHKVKKLFPGAELFLRISTDDSSSLCRLSLKFGAAMDTTDGLLALAKELDLNVVGVSFHVGSGASDPLAYMRAVQDARLVFDQAAAHGFSLHTLDIGGGFVSESFEAMASVLCEALDTYMPSHINIIGEPGRYYVSSAFSVACHIIARRTIVEPASSEKSYMIYLNDGLYGNFSSIMFDHQNPIAQVLRTGDRTYFNNIAAQDSVDGTEYSIWGPTCDGIDRISESIRFDHTLDVGDWLYFEEMGAYTKCSATRFNGFSDAHEVIYVASEPGARALLGMN

SEQ ID NO: 4317 - protein, 450 aa, Gallus gallus
FTFLDEGFTAKDILDQKINEVSSSDDKDAFYVADLGDIVKKHMRWHKALPRVTPFYAVKCNDSEAVVKTLAVLGAGFDCASKTEIQLVQSIGVPPERIIYANPCKQLSQIKHAANSGVRMMTFDSEVELMKIARPHPKAKLLLRITTDDSKAVCRLSVKFGATLKTSRLLLERAKELDLAIVGVSFHVGSGCTDPETFVQAISDARCVFDMGAELGFNMYLLDIGGGFPGSEDVKLKFEEITSVINPALDKYFPLDSEVTIIAEPGRYYVASAFTLAVNIIAKKIVSKEQTGSDDEDDVNDKTLMYYVNDGVYGSFNCILYDHAHVKPVLQKRPKPDDGCYSCSIWGPTCDGLDRIVERCNMPELQVGDWILFENMGAYTVAAASTFNGFQRPTIHYVMSRPAWQLMQQIKEQEFLAEVEEQDVASLPLSCACESGIEYPATCASASINV

SEQ ID NO: 4318 - protein, 391 aa, Nitrosomonas europaea
MKKSFAAVQQQTETSIVFDTHPEVSIDLSLVEARLKQGYQKPFLLIDSNIIRNKARRFKTSMPRVRPHYAAKANPDPRVLKTLIEEGVGFEIASIAELDLLMSLGVPAAEIFYSNPMKSRAYIEYAAAKGVEWYVLDSIEELRKIVSIKPDAKLYLRIDTPNIGSDWPLAGKFGTHLVDVSEIIDEAVRLKADLAGVTFHVGSQCRNPQNWRVGIERAQTVFASMREAGLKPRLLNLGGGYPVRHVKPIPSIEVIAEVINEAIADLPEDIHVMAEPGRYLVSDSACFVCRVVGTATRNGKRWMYWDAGIFGGIIEVSEGLRYEILTQRNGSLIPWSVAGPTCDSVDVLMHDEMLPEDIQENDFIFIPNAGAYTTSYASNFNGFPLPDVVVI

SEQ ID NO: 4319 - protein, 417 aa, Nitrosomonas europaea
MSSFSSFEYRDSQLFVESVPLAEIAAKFGTPCYVYSSAAIRTTYQIFDHAFGQRDHLICYAVKANSNLAILNLLARLGSGFDIVSGGELQRVLKAGGDPQKTVFSGVGKTPEEIRAALAANILCFNVESEMELMVLNEIAGQMGKIAPVSLRVNPDVDANTHPYISTGMKENKFGIPAAEAGRIYSLAHQLPHIQVSGLDCHIGSQLTEIAPFIEAADKMLDLLARLQTMGVTIKHLDLGGGLGIRYDRESPPSIEAYIKALCTIAENHPQQLLIEPGRSMVGNAGLLLTRVHYLKHTSHRNFAIVDAAMNDMLRPALYQAYHSILPVTKRTGETKTYQIVGPVCETGDFLGHDRNLALTKNDLLAVMSAGAYGMSMSSNYNTRPRAAEVMVDGSTVHLIRARETVEDLYALEKLPI

SEQ ID NO: 4320 - protein, 200 aa, Saguinus oedipus
ADLGDILKKHLRWLKALPRVTPFYAVKCNDSRAIVNTLAAIGTGFDCASKTEIQLVQSLGVPPERIIYANPCKQVSQIKYAANNGVQMMTFDSEVELMKVARAHPKAKLVLRIATDDSKAICRLSVKFGATLKTSRLLLERAKELNIDVIGVSFHVGSGCTDPETFVQAITDARCVFDMGAEVGFSMYLLDIGGGFPGSE

SEQ ID NO: 4321 - protein, 200 aa, Macaca sp.
ADLGDILKKHLRWLKALPRVTPFYAVKCNDSKAIVKTLAAVGTGFDCASKTEIQLVQNLGVPPERIIYANPCKQVSQIKYAANNGVQMMTFDSEVELMKVTRAHPKAKLVLRIATDDSKAVCRLSVKFGATLRNSRLLLERAKELNIDVVGVSFHVGSGCTDPETFVQAISDARCVFDMGAEVGFSMYLLDIGGGFPGSE

SEQ ID NO: 4322 - protein, 200 aa, Gorilla gorilla
ADLGDILKKHLRWLKALPRVTPFYAVKCNDSKAIVKTLAAIGTGFDCASKTEIQLVQSLGVPPVRIIYANPCKQVSQIKYAANNGVQMMTFDSEVELMKVARAHPKAKLVLRIATDDSKAVCRLSVKFGATLRTSRLLLERAKELNIDVVGVSFHVGSGCTDPETFVQAISDARCVFDMGAEVGFSMYLLDIGGGFPGSE

SEQ ID NO: 4323 - protein, 200 aa, Pan troglodytes
ADLGDILKKHLRWLKALPRVTPFYAVKCNDSKAIVKTLAAIGTGFDCASKTEIQLVQSLGVPPERIIYANPCKQVSQIKYAANNGVQMMTFDSEVELMKVARAHPKAKLVLRIATDDSKAVCRLSVKFGATLRTSRLLLERAKELNIDVVGVSFHVGSGCTDPETFVQAISDARCVFDMGAEVGFSMYLLDIGGGFPGSE

SEQ ID NO: 4324 - protein, 200 aa, Pongo pygmaeus
  unsure (1)..(200): unsure at all Xaa locations
ADLGDILKKHLRWLXAVPRVTPFYAVKCNDSKAIVKTLAAVGTGFDCASKTEIQLVQSLGVPPERIIYANPCKQVSQIKYAANNGVQMMTFDSEVELMKVARAHPKAKLVLRIATDDSKAVCRLSVKFGATLRTSRLLLERAKELNIDVVGVSFHVGSGCTDPETFVQAISDARCVFDMGAEVGFSMYLLDIGGGFPGSE

SEQ ID NO: 4325 - protein, 461 aa, Homo sapiens
MNNFGNEEFDCHFLDEGFTAKDILDQKINEVSSSDDKDAFYVADLGDILKKHLRWLKALPRVTPFYAVKCNDSKAIVKTLAATGTGFDCASKTEIQLVQSLGVPPERIIYANPCKQVSQIKYAANNGVQMMTFDSEVELMKVARAHPKAKLVLRIATDDSKAVCRLSVKFGATLRTSRLLLERAKELNIDVVGVSFHVGSGCTDPETFVQAISDARCVFDMGAEVGFSMYLLDIGGGFPGSEDVKLKFEEITGVINPALDKYFPSDSGVRIIAEPGRYYVASAFTLAVNIIAKKIVLKEQTGSDDEDESSEQTFMYYVNDGVYGSFNCILYDHAHVKPLLQKRPKPDEKYYSSSIWGPTCDGLDRIVERCDLPEMHVGDWMLFENMGAYTVAAASTFNGFQRPTIYYVMSGPAWQLMQQFQNPDFPPEVEEQDASTLPVSCAWESGMKRHRAACASASINV

SEQ ID NO: 4326 - protein, 421 aa, Homo sapiens
  unsure (1)..(421): unsure at all Xaa locations
EEFDCHFLDEGFTAKDILDQKINEVSSSDDKDAFYVADLGDILKKHLRWLKALPRVTPFYAVXCNDSKAIVKTLAATGTGFDCASKTEIQLVQSLGVPPERIIYANPCKQVSQIKYAANNGVQMMTFDSEVELMKVARAHPKAKLVLRIATDDSKAVCRLSVKFGATLRTSRLLLERAKELNIDVVGVSFHVGSGCTDPETFVQAISDARCVFDMGAEVGFSMYLLDIGGGFPGSEDVKLKFEEITGVINPALDKYFPSDSGVRIIAEPGRYYVASAFTLAVNIIAKKIVLKEQTGSDDEDESSEQTFMYYVNDGVYGSFNCILYDHAHVKPLLQKRPKPDERYYSSSIWGPTCDGLDRIVERCDLPEMHVGDWMLFENMGAYTVAAASTFNGFQRPTIYYVMSGPAWQLMQQFQNPDFPP

SEQ ID NO: 4327 - protein, 460 aa, Homo sapiens
MAGYLSESDFVMVEEGFSTRDLLKELTLGASQATTDEVAAFFVADLGAIVRKHFCFLKCLPRVRPFYAVKCNSSPGVLKVLAQLGLGFSCANKAEMELVQHIGIPASKIICANPCKQIAQIKYAAKHGIQLLSFDNEMELAKVVKSHPSAKMVLCIATDDSHSLSCLSLKFGVSLKSCRHLLENAKKHHVEVVGVSFHIGSGCPDPQAYAQSIADARLVFEMGTELGHKMHVLDLGGGFPGTEGAKVRFEEIASVINSALDLYFPEGCGVDIFAELGRYYVTSAFTVAVSIIAKKEVLLDQPGREEENGSTSKTIVYHLDEGVYGIFNSVLFDNICPTPILQKKPSTEQPLYSSSLWGPAVDGCDCVAEGLWLPQLHVGDWLVFDNMGAYTVGMGSPFWGTQACHITYAMSRVAWEALRRQLMAAEQEDDVEGVCKPLSCGWEITDTLCVGPVFTPASIM

SEQ ID NO: 4328 - protein, 420 aa, Homo sapiens
QQGSSVASTEPGSGTWKDHGWHAQGASWMGSHIHPLLVIQDEVAAFFVADLGAIVRKHFCFLKCLPRVRPFYAVKCNSSPGVLKVLAQLGLGFSCANKAEMELVQHIGIPASKIICANPCKQIAQIKYAAKHGIQLLSFDNEMELAKVVKSHPSAKMVLCIATDDSHSLSCLSLKFGVSLKSCRHLLENAKKHHVEVVGVSFHIGSGCPDPQAYAQSIADARLVFEMGTELGHKMHVLDLGGGFPGTEGAKVRFEEIASVINSALDLYFPEGCGVDIFAELGRYYVTSAFTVAVSIIAKKEVLLDQPGREEENGSTSKTIVYHLDEGVYGIFNSVLFDNICPTPILQKKPSTEQPLYSSSLWGPAVDGCDCVAEGLWLPQLHVGDWLVFDNMGAYTVGMGSPFWGTQACHITYAMSRVAW

SEQ ID NO: 4329 - protein, 480 aa, Homo sapiens
MAGYLSESDFVMVEEGFSTRDLLKELTLGASQATTDEVAAFFVADLGAIVRKHFCFLKCLPRVRPFYAVKCNSSPGVLKVLAQLGLGFSCANKAEMELVQHIGIPASKIICANPCKQIAQIKYAAKHGIQLLSFDNEMELAKVVKSHPSAKMVLCIATDDSHSLSCLSLKFGVSLKSCRHLLENAKKHHVEVVGVSFHIGSGCPDPQAYAQSIADARLVFEMGTELGHKMHVLDLGGGFPGTEGAKVRFEEIASVINSALDLYFPEGCGVDIFAELGRYYVTSAFTVAVSIIAKKEVLLDQPGREAPLPPPHIATCAASEPSPPAEENGSTSKTIVYHLDEGVYGIFNSVLFDNICPTPILQKKPSTEQPLYSSSLWGPAVDGCDCVAEGLWLPQLHVGDWLVFDNMGAYTVGMGSPFWGTQACHITYAMSRVAWEALRRQLMAAEQEDDVEGVCKPLSCGWEITDTLCVGPVFTPASIM

SEQ ID NO: 4330 - protein, 350 aa, Homo sapiens
NPCKQVSQIKYAANNGVQMMTFDSEVELMKVARAHPKAKLVLRIATDDSKAVCRLSVKFGATLRTSRLLLERAKELNIDVVGVSFHVGSGCTDPETFVQAISDARCVFDMGAEVGFSMYLLDIGGGFPGSEDVKLKFEEITGVINPALDKYFPSDSGVRIIAEPGRYYVASAFTLAVNIIAKKIVLKEQTGSDDEDESSEQTFMYYVNDGVYGSFNCILYDHAHVKPLLQKRPKPDEKYYSSSIWGPTCDGLDRIVERCDLPEMHVGDWMLFENMGAYTVAAASTFNGFQRPTIYYVMSGPAWQLMQQFQNPDFPPEVEEQDASTLPVSCAWESGMKRHRAACASASINV

SEQ ID NO: 4331 - protein, 448 aa, Homo sapiens
MKGFIDDANYSVGLLDEGTDLGNVIDNYVYEHTLTGKNAFFVGDLGKIVKKHSQWQNVVAQIKPFYTVKCNSAPAVLEILAALGTGFACSSKNEMALVQELGVPPENIIYISPCKQVSQIKYAAKVGVNILTCDNEIELKKIARNHPNAKVLLHIATEDNIGGEEGNMKFGTTLKNCRHLLECAKELDVQIIGVKFHVSSACKESQVYVHALSDARCVFDMAGEIGFTMNMLDIGGGFTGTEFQLEEVNHVISPLLDIYFPEGSGVKIISEPGSYYVSSAFTLAVNIIAKKVVENDKFPSGVEKTGSDEPAFMYYMNDGVYGSFASKLSEDLNTIPEVHKKYKEDEPLFTSSLWGPSCDELDQIVESCLLPELNVGDWLIFDNMGADSFHEPSAFNDFQRPAIYYMMSFSDWYEMQDAGITSDSMMKNFFFVPSCIQLSQEDSFSAEA

SEQ ID NO: 4332 - protein, 448 aa, Homo sapiens
MKGFIDDANYSVGLLDEGTNLGNVIDNYVYEHTLTGKNAFFVGDLGKIVKKHSQWQNVVAQIKPFYTVKCNSAPAVLEILAALGTGFACSSKNEMALVQELGVPPENIIYISPCKQVSQIKYAAKVGVNILTCDNEIELKKIARNHPNAKVLLHIATEDNIGGEEGNMKFGTTLKNCRHLLECAKELDVQIIGVKFHVSSACKESQVYVHALSDARCVFDMAGEIGFTMNMLDIGGGFTGTEFQLEEVNHVISPLLDIYFPEGSGVKIISEPGSYYVSSAFTLAVNIIAKKVVENDKFPSGVEKTGSDEPAFMYYMNDGVYGSFASKLSEDLNTIPEVHKKYKEDEPLFTSSLWGPSCDELDQIVESCLLPELNVGDWLIFDNMGADSFHEPSAFNDFQRPAIYYMMSFSDWYEMQDAGITSDSMMKNFFFVPSCIQLSQEDSFSAEA

SEQ ID NO: 4333 - protein, 362 aa, Homo sapiens
MAGYLSESDFVMVEEGFSTRDLLKELTLGASQATTDEVAAFFVADLGAIVRKHFCFLKCLPRVRPFYAVKCNSSPGVLKVLAQLGLGFSCANKAEMELVQHIGIPASKIICANPCKQIAQIKYAAKHGIQLLSFDNEMELAKVVKSHPSAKMVLCIATDDSHSLSCLSLKFGVSLKSCRHLLENAKKHHVEVVGVSFHIGSGCPDPQAYAQSIADARLVFEMGTELGHKMHVLDLGGGFPGTEGAKVRFEEIASVINSALDLYFPEGCGVDIFAELGRYYVTSAFTVAVSIIAKKEVLLDQPGREEENGSTSKTIVYHLDEGVYGIFNSVLFDNICPTPILQKSKNHSPCYMSLESIHFIAV

SEQ ID NO: 4334 - protein, 374 aa, Homo sapiens
MAGYLSESDFVMVEEGFSTRDLLKELTLGASQATTDEVAAFFVADLGAIVRKHFCFLKCLPRVRPFYAVKCNSSPGVLKVLAQLGLGFSCANKAEMELVQHIGIPASKIICANPCKQIAQIKYAAKHGIQLLSFDNEMELAKVVKSHPSAKFVQQRGTACLIRMVLCIATDDSHSLSCLSLKFGVSLKSCRHLLENAKKHHVEVVGVSFHIGSGCPDPQAYAQSIADARLVFEMGTELGHKMHVLDLGGGFPGTEGAKVRFEEIASVINSALDLYFPEGCGVDIFAELGRYYVTSAFTVAVSIIAKKEVLLDQPGREEENGSTSKTIVYHLDEGVYGIFNSVLFDNICPTPILQKSKNHSPCYMSLESIHFIAV

SEQ ID NO: 4335 - protein, 365 aa, Homo sapiens
MELVQHIGIPASKIICANPCKQIAQIKYAAKHGIQLLSFDNEMELAKVVKSHPSAKMVLCIATDDSHSLSCLSLKFGVSLKSCRHLLENAKKHHVEVVGVSFHIGSGCPDPQAYAQSIADARLVFEMGTELGHKMHVLDLGGGFPGTEGAKVRFEEIASVINSALDLYFPEGCGVDIFAELGRYYVTSAFTVAVSIIAKKEVLLDQPGREEENGSTSKTIVYHLDEGVYGIFNSVLFDNICPTPILQKKPSTEQPLYSSSLWGPAVDGCDCVAEGLWLPQLHVGDWLVFDNMGAYTVGMGSPFWGTQACHITYAMSRVAWEALRRQLMAAEQEDDVEGVCKPLSCGWEITDTLCVGPVFTPASIM

SEQ ID NO: 4336 - protein, 204 aa, Homo sapiens
MAGYLSESDFVMVEEGFSTRDLLKELTLGASQATTDEVAAFFVADLGAIVRKHFCFLKCLPRVRPFYAVKCNSSPGVLKVLAQLGLGFSCANKIASVINSALDLYFPEGCGVDIFAELGRYYVTSAFTVAVSIIAKKEVLLDQPGREEENGSTSKTIVYHLDEGVYGIFNSVLFDNICPTPILQKSKNHSPCYMSLESIHFIAV

SEQ ID NO: 4337 - protein, 393 aa, Selenomonas ruminantium
MKNFRLSEKEVKTLAKRIPTPFLVASLDKVEENYQFMRRHLPRAGVFYAMKANPTPEILSLLAGLGSHFDVASAGEMEILHELGVDGSQMIYANPVKDARGLKAAADYNVRRFTFDDPSEIDKMAKAVPGADVLVRIAVRNNKALVDLNTKFGAPVEEALDLLKAAQDAGLHAMGICFHVGSQSLSTAAYEEALLVARRLFDEAEEMGMHLTDLDIGGGFPVPDAKGLNVDLAAMMEAINKQIDRLFPDTAVWTEPGRYMCGTAVNLVTSVIGTKTRGEQPWYILDEGIYGCFSGIMYDHWTYPLHCFGKGNKKPSTFGGPSCDGIDVLYRDFMAPELKIGDKVLVTEMGSYTSVSATRFNGFYLAPTIIFEDQPEYAARLTEDDDVKKKAAV

SEQ ID NO: 4338 - protein, 461 aa, Bos taurus
MNSFSNEEFDCHFLDEGFTAKDILDQKINEVSYSDDKDAFYVADLGDILKKHLRWLKALPRVTPFYAVKCNDSRTIVKTLAAIGTGFDCASKTEIQLVQSLGVPPERIIYANPCKQVSQIKYAANNGVQMMTFDSEVELMKVARAHPKAKLVLRIATDDSKAVCRLSVKFGATLKTSRLLLERAKELDIDVIGVSFHVGSGCTDPETFVQAISDARCVFDMGAEVGFNMYLLDIGGGFPGSEDVKLKFEEITSVINPALDKYFPSDSGVRIIAEPGRYYVASAFTLAVNIIAKKLVLKEQTGSDDEEESTDRTFMYYVNDGVYGSFNCILYDHAHVKPLLQKRPKPDEKYYSSSIWGPTCDGLDRIVERCNLPEMHVGDWMLFENMGAYTVAAASTFNGFQRPTIYYVMSGPTWQLMQQIRTQDFPPGVEEPDVGPLPVSCAWESGMKRHSAACASTRINV

SEQ ID NO: 4339 - protein, 1035 aa, Mus musculus
RGSSSYSQLLAATCLTKLVSRTNNPLPLEQRIDIRNYVLNYLATRPKLATFVTQALIQLYARITKLGWFDCQKDDYVFRNAITDVTRFLQDSVEYCIIGVTILSQLTNEINQADTTHPLTKHRKIASSFRDSSLFDIFTLSCNLLKQASGKNLNLNDESQHGLLMQLLKLTHNCLNFDFIGTSTDESSDDLCTVQIPTSWRSAFLDSSTLQLFFDLYHSIPPSFSPLVLSCLVQIASVRRSLFNNAERAKFLSHLVDGVKRILENPQSLSDPNNYHEFCRLLARLKSNYQLGELVKVENYPDVIRLIANFTVTSLQHWEFAPNSVHYLLSLWQRLAASVPYVKATEPHMLETYTPEVTKAYITSRLESVHIILRDGLEDPLEDTGLVQQQLDQLSTIGRCEYEKTCALLVQLFDQSAQSYQELLQSASASPMDIAVQEGRLTWLVYIIGAVIGGRVSFASTDEQDAMDGELVCRVLQLMNLTDSRLAQAGNEKLELAMLSFFEQFRKIYIGDQVQKSSKLYRRLSEVLGLNDETMVLSVFIGKVITNLKYWGRCEPITSKTLQLLNDLSIGYSSVRKLVKLSAVQFMLNNHTSEHFSFLGINNQSNLTDMRCRTTFYTALGRLLMVDLGEDEDQYEQFMLPLTAAFEAVAQMFSTNSFNEQEAKRTLVGLVRDLRGIAFAFNAKTSFMMLFEWIYPSYMPILQRAIELWYHDPACTTPVLKLMAELVHNRSQRLQFDVSSPNGILLFRETSKMITMYGNRILTLGEVPKDQVYALKLKGISICFSMLKAALSGSYVNFGVFRLYGDDALENALQTFIKLLLSIPHSDLLDYPKLSQSYYSLLEVLTQDHMNFIASLEPHVIMYILSSISEGLTALDTMVCTGCCSCLDHIVTYLFKQLSRSTKKRTTPLNRESDCFLHIMQQHPAMIQQMLSTVLNIIIFEDCRNQWSMSRPLLGLILLNEKYFSDLRNSIVNSQPPEKQQAMHLCFENLMEGIERNLLTKNRDRFTQNLSAFRREVNDSMKNSTYGVNSNDMMS

SEQ ID NO: 4340 - protein, 1035 aa, Mus musculus
RGSSSYSQLLAATCLTKLVSRTNNTLPLEQRIDIRNYVLNYLATRPKLATFVTQALIQLYARITKLGWFDCQKDDYVFRNAITDVTRFLQDSVEYCIIGVTILSQLTNEINQADTTHPLTKHRKIASSFRDSSLFDIFTLSCNLLKQASGKNLNLNDESQHGLLMQLLKLTHNCLNFDFIGTSTDESSDDLCTVQIPTSWRSAFLDSSTLQLFFDLYHSIPPSFSPLVLSCLVQIASVRRSLFNNAERAKFLSHLVDGVKRILENPQSLSDPNNYHEFCRLLARLKSNYQLGELVKVENYPDVIRLIANFTVTSLQHWEFAPNSVHYLLSLWQRLAASVPYVKATEPHMLETYTPEVTKAYITSRLESVHIILRDGLEDPLEDTGLVQQQLDQLSTIGRCEYEKTCALLVQLFDQSAQSYQELLQSASASPMDIAVQEGRLTWLVYIIGAVIGGRVSFASTDEQDAMDGELVCRVLQLMNLTDSRLAQAGNEKLELAMLSFFEQFRKIYIGDQVQKSSKLYRRLSEVLGLNDETMVLSVFIGKVITNLKYWGRCEPITSKTLQLLNDLSIGYSSVRKLVKLSAVQFMLNNHTSEHFSFLGINNQSNLTDMRCRTTFYTALGRLLMVDLGEDEDQYEQFMLPLTAAFEAVAQMFSTNSFNEQEAKRTLVGLVRDLRGIAFAFNAKTSFMMLFEWIYPSYMPILQRAIELWYHDPACTTPVLKLMAELVHNRSQRLQFDVSSPNGILLFRETSKMITMYGNRILTLGEVPKDQVYALKLKGISICFSMLKAALSGSYVNFGVFRLYGDDALENALQTFIKLLLSIPHSDLLDYPKLSQSYYSLLEVLTQDHMNFIASLEPHVIMYILSSISEGLTALDTMVCTGCCSCLDHIVTYLFKQLSRSTKKRTTPLNRESDCFLHIMQQHPAMIQQMLSTVLNIIIFEDCRNQWSMSRPLLGLILLNEKYFSDLRNSIVNSQPPEKQQAMHLCFENLMEGIERNLLTKNRDRFTQNLSAFRREVNDSMKNSTYGVNSNDMMS

SEQ ID NO: 4341 - protein, 1087 aa, Mus musculus
MADHVQSLAQLENLCKQLYETTDTTTRLQAEKALVEFTNSPDCLSKCQLLLERGSSSYSQLLAATCLTKLVSRTNNPLPLEQRIDIRNYVLNYLATRPKLATFVTQALIQLYARITKLGWFDCQKDDYVFRNAITDVTRFLQDSVEYCIIGVTILSQLTNEINQADTTHPLTKHRKIASSFRDSSLFDIFTLSCNLLKQASGKNLNLNDESQHGLLMQLLKLTHNCLNFDFIGTSTDESSDDLCTVQIPTSWRSAFLDSSTLQLFFDLYHSIPPSFSPLVLSCLVQIASVRRSLFNNAERAKFLSHLVDGVKRILENPQSLSDPNNYHEFCRLLARLKSNYQLGELVKVENYPDVIRLIANFTVTSLQHWEFAPNSVHYLLSLWQRLAASVPYVKATEPHMLETYTPEVTKAYITSRLESVHIILRDGLEDPLEDTGLVQQQLDQLSTIGRCEYEKTCALLVQLFDQSAQSYQELLQSASASPMDIAVQEGRLTWLVYIIGAVIGGRVSFASTDEQDAMDGELVCRVLQLMNLTDSRLAQAGNEKLELAMLSFFEQFRKIYIGDQVQKSSKLYRRLSEVLGLNDETMVLSVFIGKVITNLKYWGRCEPITSKTLQLLNDLSIGYSSVRKLVKLSAVQFMLNNHTSEHFSFLGINNQSNLTDMRCRTTFYTALGRLLMVDLGEDEDQYEQFMLPLTAAFEAVAQMFSTNSFNEQEAKRTLVGLVRDLRGIAFAFNAKTSFMMLFEWIYPSYMPILQRAIELWYHDPACTTPVLKLMAELVHNRSQRLQFDVSSPNGILLFRETSKMITMYGNRILTLGEVPKDQVYALKLKGISICFSMLKAALSGSYVNFGVFRLYGDDALENALQTFIKLLLSIPHSDLLDYPKLSQSYYSLLEVLTQDHMNFIASLEPHVIMYILSSISEGLTALDTMVCTGCCSCLDHIVTYLFKQLSRSTKKRTTPLNRESDCFLHIMQQHPAMIQQMLSTVLNIIIFEDCRNQWSMSRPLLGLILLNEKYFSDLRNSIVNSQPPEKQQAMHLCFENLMEGIERNLLTKNRDRFTQNLSAFRREVNDSMKNSTYGVNSNDMMS

SEQ ID NO: 4342 - protein, 1078 aa, Mus musculus
SLAQLENLCKQLYETTDTTTRLQAEKALVEFTNSPDCLSKCQLLLERGSSSYSQLLAATCLTKLVSRTNNPLPLEQRIDIRNYVLNYLATRPKLATFVTQALIQLYARITKLGWFDCQKDDYVFRNAITDVTRFLQDSVEYCIIGVTILSQLTNEINQADTTHPLTKHRKIASSFRDSSLFDIFTLSCNLLKQASGKNLNLNDESQHGLLMQLLKLTHNCLNFDFIGTSTDESSDDLCTVQIPTNWRSAFLDSSTLQLFFDLYHSIPPSFSPLVLSCLVQIASVRRSLFNNAERAKFLSHLVDGVKRILENPQSLSDPNNYHEFCRLLARLKSNYQLGELVKVENYPDVIRLIANFTVTSLQHWEFAPNSVHYLLSLWQRLAASVPYVKATEPHMLETYTPEVTKAYITSRLESVHIILRDGLEDPLEDTGLVQQQLDQLSTIGRCEYEKTCALLVQLFDQSAQSYQELLQSASASPMDIAVQEGRLTWLVYIIGAVIGGRVSFASTDEQDAMDGELVCRVLQLMNLTDSRLAQAGNEKLELAMLSFFEQFRKIYIGDQVQKSSKLYRRLSEVLGLNDETMVLSVFIGKVITNLKYWGRCEPITSKTLQLLNDLSIGYSSVRKLVKLSAVQFMLNNHTSEHFSFLGINNQSNLTDMRCRTTFYTALGRLLMVDLEDQYEQFMLPLTAAFEAVAQMFSTNSFNEQEAKRTLVGLVRDLRGIAFAFNAKTSFMMLFEWIYPSYMPILQRAIELWYHDPACTTPVLKLMAELVHNRSQRLQFDVSSPNGILLFRETSKMITMYGNRILTLGEVPKDQVYALKLKGISICFSMLKAALSGSYVNFGVFRLYGDDALENALQTFIKLLLSIPHSDLLDYPKLSQSYYSLLEVLTQDHMNFIASLEPHVIMYILSSISEGLTALDTMVCTGCCSCLDHIVTYLFKQLSRSTKKRTTPLNRESDCFLHIMQQHPAMIQQMLSTVLNIIIFEDCRNQWSMSRPLLGLILLNEKYFSDLRNSIVNSQPPEKQQAMHLCFENLMEGIERNLLTKNRDRFTQNLSAFRREVNDSMKNSTYGVNSNDMMS

SEQ ID NO: 4343 - protein, 411 aa, Mus musculus
MVDLGEDEDQYEQFMLPLTAAFEAVAQMFSTNSFNEQEAKRTLVGLVRDLRGIAFAFNAKTSFMMLFEWIYPSYMPILQRAIELWYHDPACTTPVLKLMAELVHNRSQRLQFDVSSPNGILLFRETSKMITMYGNRILTLGEVPKDQVYALKLKGISICFSMLKAALSGSYVNFGVFRLYGDDALENALQTFIKLLLSIPHSDLLDYPKLSQSYYSLLEVLTQDHMNFIASLEPHVIMYILSSISEGLTALDTMVCTGCCSCLDHIVTYLFKQLSRSTKKRTTPLNRESDCFLHIMQQHPAMIQQMLSTVLNIIIFEDCRNQWSMSRPLLGLILLNEKYFSDLRNSIVNSQPPEKQQAMHLCFENLMEGIERNLLTKNRDRFTQNLSAFRREVNDSMKNSTYGVNSNDMMS

SEQ ID NO: 4344 - protein, 1088 aa, Mus musculus
MALHFQSLAELEVLCTHLYVGTDLTERIEAEKALLELIDSPECLSKCQLLLEQGTTSYAQLLAATCLSKLVTRINPLPIEQRIDIRNYILNYVASQPKLAPFVIQALIQVIAKLTKLGWFEVQKDEFIFREIIADVKKFLQGTVEHCIIGVIILCELTQEMNLVDYSRPSAKHRKIATSFRDTSLKDILVLACSLLKQVLAKPLNLQDQDQQSLVMQVLKLVLSCLNFDFLGSSADESADDLCTVQIPTTWRTIFLEPETLDLFFNLYHSLPPLLSQLALSCLVQFASTRRSLFSSPERAKYLGNLIKGVKRILENPQGLSDPGNYHEFCRFLARLKTNYQLGELVLVKEYAEVIGLIANFTITSLQHWEFAPNSVHYLLTLWQRMVASVPFVKSAEPHLLDTYAPEITKAFITSRLESVAIVVRDNLEDPLDDTATVFQQLEQLCTVSRCEYEKTCTLLVQLFDQNAKNYQKLLHAAPGLAVDMAIQEGRLAWLIYLVGTVVGGRLTYTSTDEHDAMDGELSCRVFQLISLMDTRLPHCTNEKIELAVLWFLDQFRKTYVGDQLQRTSKVYARMSEVLGITDDNHVLETFMTKIVTNLKYWGRCEPVISRTLQFLSDLSVGYILLKKLVKIDAVKFMLKNHTSEHFPFLGISETYNVGDFRCRTTFYTALTRLLMVDLGEDEDEFENFMLPLTVSFETVLQIFNNNFKQEEVKRMLIGLARDLRGIAFALNTKTSYTMLFDWIYPAYLPVLQRAIERWYGEPACTTPILKLLAELMQNRSQRLNFDVSSPNGILLFREASKMICTYGNQILSLGSLSKDKIYPMKLKGISICYSALKSALCGNYVSFGVFKLYGDNHFDNVLQAFVKMLLSVSHSDLLQYRKLSQSYYPLLECLTQDHMSFITNLEPPVLLYVLTSLSEGLTTLDTVVSSSCCTSLDYMVTYLFKHIAKEGKKPLRSREAMQAGQRLLHFMQQNPDVLQQMMSVLMNTIVFEDCRNQWSVSRPLLGLILLNEKYFSELRASLINSQPLPKQEVLGQCFRNLMEGVEQNLSVKNRDRFTQNLSVFRRDVAEALRSDGHTDLSSLDMMS

SEQ ID NO: 4345 - protein, 947 aa, Mus musculus
GTVEHCIIGVIILCELTQEMNLVDYSRPSAKHRKIATSFRDTSLKDILVLACSLLKQVLAKPLNLQDQDQQSLVMQVLKLVLSCLNFDFLGSSADESADDLCTVQIPTTWRTIFLEPETLDLFFNLYHSLPPLLSQLALSCLVQFASTRRSLFSSPERAKYLGNLIKGVKRILENPQGLSDPGNYHEFCRFLARLKTNYQLGELVLVKEYAEVIGLIANFTITSLQHWEFAPNSVHYLLTLWQRMVASVPFVKSAEPHLLDTYAPEITKAFITSRLESVAIVVRDNLEDPLDDTATVFQQLEQLCTVSRCEYEKTCTLLVQLFDQNAQNYQKLLHAAPGLAVDMAIQEGRLAWLIYLVGTVVGGRLTYTSTDEHDAMDGELSCRVFQLISLMDTRLPHCTNEKIELAVLWFLDQFRKTYVGDQLQRTSKVYARMSEVLGITDDNHVLETFMTKIVTNLKYWGRCEPVISRTLQFLSDLSVGYILLKKLVKIDAVKFMLKNHTSEHFPFLGISETYNVGDFRCRTTFYTALTRLLMVDLGEDEDEFENFMLPLTVSFETVLQIFNNNFKQEEVKRMLIGLARDLRGIAFALNTKTSYTMLFDWIYPAYLPVLQRAIERWYGEPACTTPILKLLAELMQNRSQRLNFDVSSPNGILLFREASKMICTYGNQILSLGSLSKDKIYPMKLKGISICYSALKSALCGNYVSFGVFKLYGDNHFDNVLQAFVKMLLSVSHSDLLQYRKLSQSYYPLLECLTQDHMSFITNLEPPVLLYVLTSLSEGLTTLDTVVSSSCCTSLDYMVTYLFKHIAKEGKKPLRSREAMQAGQRLLHFMQQNPDVLQQMMSVLMNTIVFEDCRNQWSVSRPLLGLILLNEKYFSELRASLINSQPLPKQEVLGQCFRNLMEGVEQNLSVKNRDRFTQNLSVFRRDVAEALRSDGHTDLSSLDMMS

SEQ ID NO: 4346 - protein, 1088 aa, Mus musculus
MALHFQSLAELEVLCTHLYVGTDLTERIEAEKALLELIDSPECLSKCQLLLEQGTTSYAQLLAATCLSKLVTRINPLPIEQRIDIRNYILNYVASQPKLAPFVIQALIQVIAKLTKLGWFEVQKDEFVFREIIADVKKFLQGTVEHCIIGVIILCELTQEMNLVDYSRPSAKHRKIATSFRDTSLKDILVLACSLLKQVLAKPLNLQDQDQQSLVMQVLKLVLSCLNFDFLGSSADESADDLCTVQIPTTWRTIFLEPETLDLFFNLYHSLPPLLSQLALSCLVQFASTRRSLFSSPERAKYLGNLIKGVKRILENPQGLSDPGNYHEFCRFLARLKTNYQLGELVLVKEYAEVIGLIANFTITSLQHWEFAPNSVHYLLTLWQRMVASVPFVKSAEPHLLDTYAPEITKAFITSRLESVAIVVRDNLEDPLDDTATVFQQLEQLCTVSRCEYEKTCTLLVQLFDQNAQNYQKLLHAAPGLAVDMAIQEGRLAWLIYLVGTVVGGRLTYTSTDEHDAMDGELSCRVFQLISLMDTRLPHCTNEKIELAVLWFLDQFRKTYVGDQLQRTSKVYARMSEVLGITDDNHVLETFMTKIVTNLKYWGRCEPVISRTLQFLSDLSVGYILLKKLVKIDAVKFMLKNHTSEHFPFLGISETYNVGDFRCRTTFYTALTRLLMVDLGEDEDEFENFMLPLTVSFETVLQIFNNNFKQEEVKRMLIGLARDLRGIAFALNTKTSYTMLFDWIYPAYLPVLQRAIERWYGEPACTTPILKLLAELMQNRSQRLNFDVSSPNGILLFREASKMICTYGNQILSLGSLSKDKIYPMKLKGISICYSALKSALCGNYVSFGVFKLYGDNHFDNVLQAFVKMLLSVSHSDLLQYRKLSQSYYPLLECLTQDHMSFITNLEPPVLLYVLTSLSEGLTTLDTVVSSSCCTSLDYMVTYLFKHIAKEGKKPLRSREAMQAGQRLLHFMQQNPDVLQQMMSVLMNTIVFEDCRNQWSVSRPLLGLILLNEKYFSELRASLINSQPLPKQEVLGQCFRNLMEGVEQNLSVKNRDRFTQNLSVFRRDVAEALRSDGHTDLSSLDMMS

SEQ ID NO: 4347 - protein, 1057 aa, Mus musculus
MADHVQSLAQLENLCKQLYETTDTTTRLQAEKALVEFTNSPDCLSKCQLLLERGSSSYSQLLAATCLTKLVSRTNNPLPLEQRIDIRNYVLNYLATRPKLATFVTQALIQLYARITKLGWFDCQKDDYVFRNAITDVTRFLQDSVEYCIIGVTILSQLTNGINQADTTHPLTKHRKIASSFRDSSLFDIFTLSCNLLKQASGKNLNLNDESQHGLLMQLLKLTHNCLNFDFIGTSTDESSDDLCTVQIPTSWRSAFLDSSTLQLFFDLYHSIPPSFSPLVLSCLVQIASVRRSLFNNAERAKFLSHLVDGVKRILENPQSLSDPNNYHEFCRLLARLKSNYQLGELVKVENYPDVIRLIANFTVTSLQHWEFAPNSVHYLLSLWQRLAASVPYVKATEPHMLETYTPEVTKAYITSRLESVHIILRDGLEDPLEDTGLVQQQLDQLSTIGRCEYEKTCALLVQLFDQSAQSYQELLQSASASPMDIAVQEGRLTWLVYIIGAVIGGRVSFASTDEQDAMDGELVCRVLQLMNLTDSRLAQAGNEKLELAMLSFFEQFRKIYIGDQVQKSSKLYRRLSEVLGLNDETMVLSVFIGKVITNLKYWGRCEPITSKTLQLLNDLSIGYSSVRKLVKLSAVQFMLNNHTSEHFSFLGINNQSNLTDMRCRTTFYTALGRLLMVDLGEDEDQYEQFMLPLTAAFEAVAQMFSTNSFNEQEAKRTLVGLVRDLRGIAFAFNAKTSFMMLFEWIYPSYMPILQRAIELWYHDPACTTPVLKLMAELVHNRSQRLQFDVSSPNGILLFRETSKMITMYGNRILTLGEVPKDQVYALKLKGISICFSMLKAALSGSYVNFGVFRLYGDDALENALQTFIKLLLSIPHSDLLDYPKLSQSYYSLLEVLTQDHMNFIASLEPHVIMYILSSISEGLTALDTMVCTGCCSCLDHIVTYLFKQLSRSTKKRTTPLNRESDCFLHIMQQHPAMIQQMLSTVLNIIIFEDCRNQWSMSRPLLGLILLNEKYFSDLRNSIVNSQPPEKQQAMHLCFENLMEGIERNLLTKNRDR

SEQ ID NO: 4348 - protein, 172 aa, Mus musculus
MADHVQSLAQLENLCKQLYETTDTTTRLQAEKALVEFTNSPDCLSKCQLLLERGSSSYSQLLAATCLTKLVSRTNNPLPLEQRIDIRNYVLNYLATRPKLATFVTQALIQLYARITKLGWFDCQKDDYVFRNAITDVTRFLQDSVEYCIIGVTILSQLTNEINQADTTHPLT

SEQ ID NO: 4349 - protein, 640 aa, Rattus norvegicus
MLKVEGDDYSQLKERKTQGCEDVKAPDAILEYETFFFLSSSELNEKNVVRPKNDVSRVPEKAWKIVKVYARMSEVLGITDDNHVLETFMTKISKQHHWLHSSFLMPPDFLSSPKLDADKGFVSFTREHFPFLGISDTYSVSDFRCRTTFYTALTRLLMVDLGEDEDEFENFMLPLTVSFETVLQIFNNNFKQEEVKRMLIGLARDLRGIAFALNTKTSYTMLFDWMYPYYTVTIPALCTEGCQALSFVHRFTAANTELCLVLSLYTEDPSVCTGRAWNGERNSVVKLAQSYTGLPQPRYPAYLPVLQRAIERWYGEPACTTPILKLLAELMQNRSRVNFAVFLRSQRLNFDVSSPNGILLFREASKMICTYGNQILSLGSLSKDQIYPMKLKGISICYSALKSALCGNYVSFGVFKLYGDNHFDNVLQAFVKMLLSVSHSDLLQYRKLSQSYYPLLECLTQDHMSFITNLEPPVLLYVLTSLSEGLTTLGAGANTRDQCGKASCWNRPKDHQGQRVLVGIVELLSCCTSLDYMVTYLFKHIAKEGKKPLRCREAMQAGQRLLHFMQQNPDVLQQVSWTMESTWLNLGLPTHKDPSAVRFTVELRKGNSFDAKKEEKAQKAQTSYLDLGQSCCSCSLQTSC

SEQ ID NO: 4350 - protein, 828 aa, Rattus norvegicus
MLDRRVRPRWSGCSGVLAECAVIAAHVKTVMVELVTGYRRSTERGQSIPVRRGASTCYLVPTDVHKPLSKLAALYSQGPGTLAGIAGTVDIQSLAELEALCTHLYVGTDLNERIEAEKALLELIDSPECLSKCQLLLEQGTTSYAQLLAATCLSKLVTRINPLPVEQRIDIKHAIAPFTRFAFRFSEVGVVTDVFFIGNYILNYVASQPKLAPFVIQALIQVIAKLTKLGWFEVQKDEFVFREIIADVKKFLQGTVEHCIIGVIILSELTQEMNLVLAKPLNLQDQDQQSLVMQVLKLVLSCLSFDFLGSSADESADDLCTVQIPTTWRTIFLEPETLDLFFNSYHSLPPLLSQLALSCLVQFASTRRSLFSSPERAKYLGNLIKGVKRILENPQGLSDPGNYHEFCRFLARLKTNYQLGELVLVKEYAEVIGLIANFTITSLQHWEFAPNSVHYLLTLWQRMVASVPFVKSAEPHLLDTYAPEITKAFITSRLESVAIVVRDNLEDPLDDTATVFQQLEQLCTVSRCEYEKTCTLLVQLFDQNAQNYQKLLHSASGLAIDMAIQEGQSVLHSCEQCAISPEVRAQHNSTLTSCDMQTAVTKYPGRLAWLIYLVGTVVGGRLTYTSTDEHDAMDGELSCRVLAGELEKLELCCPGLVELPEDAVSCDFYFPVVCALYLSVVHLSCDLLGATLDPVLLALSGAPVELSSRTTLSLLEPLTQCVFQLISLMDTRLPRRTNEKIELAVLWFLDQFRKTYVGDQLQRTSKESCFSACVFERFGSLVLYSPAFPAVEYTGGAADGILSLQLSGLRNLVLLTVTVKLSRKVLVR

SEQ ID NO: 4351 - protein, 147 aa, Rattus norvegicus
MRDSGRKSLAQLENLCKQLYETTDTTTRLQAEKALVEFTNSPDCLSKCQLLLERGSSSYSQLLAATCLTKLVSRTNNPLPLEQRIDIRNYVLNYLATRPKLATFVTQALIQLYARITKLGWFDCQKDDYVFRNAITDVTRFLITRST

SEQ ID NO: 4352 - protein, 1114 aa, Anopheles gambiae str. PEST
SCARTYRKHLNLITMEPELLEILCKQFYESQDAQLRVEAEKALYHFQDDPEALSKCQTLLDRANSSFSQLFATTILTKLVTKNIQVLRMQQRVDIRNYVLNYLATRPNLQPFVIQALISLLVKITKLCWIDMYEQEYVFQNILQDVKEFLGGSVDHCVIGVQILSQLTVEMNQQSESACNLTFPKHLRITSLYRDKMLYEIFILACTLLSQAKDSVCKNLNCLDEAQQGLFTHLLELARNCLSYDFVGATADESSDDIATVQIPTNWRPAFLDSESDSLKLFFDLYHMLPTRLSSLALSCLAQITSIRRSIFSNSERIKFLTKLVKGATDILKTSHGLSDPDNYHEFCRLLARLKSNYQLSELVIVENYPEAIQLIAKFTVQSLQMWQSAPNSIHYLLSLWQRLIASLPYVKSPEPHYLETYTPEVTKAFITSKLDAVPVIVREGLEDPVDDTDMVQQQLEQFATIGRCEYDKTCALLVQLFDQTANRYQEILSSPSTANHIDLQICEGQLTWLVYIIGASIGGRIATPSFDDHDVLECDIIIRVLQLMTLTDSRLPQCGCEKLELAFMYFLAHVRKIYITEHMQKLKMFPRLSEILGVSDDDMTMLTVTSRKMYAEATQRISLCITNLKYLGNSEMVLRKTLALLNDLTLICSSVRKLIKLDEIQFMLNNRTREHFSFLGSGTVAATRCRSMFYTCLGRLLMMDLGEDVERFNTFMMPLTKTIENIIMMNFPSEEAKKELIGLSRDLRGLALAFNAKMPYMMLFDWIYPDYSPILIRAVQMWAHDPTVTTPVLKLFTELVYNRSQRLLFDVSSPNGILLFRETSKLICCYGESMLSLNVPKEQMYPMKLKGISVCFQMLKQILSGNYVNFGVFKLYGDNALDNVLNMTAKLILTIPHDDILVYPKLSLSYYTLIQCLAQDHISYLSTLEPPLFLYILESISQGLNALESVVCSCCCQTLDHIVTYIFKQLQLNVSTFPNKKHRQAVPPENNMFLKVMELHPEILQGLLSTMMNIVMFEDCKHHWSMSRPLLVLILLYEDCFRRIRETVIQSQPVAKQQNMARLFEMLMDGIERNLLIQNRDKFTQNLLQFRRDINASLKITPQPNSTANEMDD

SEQ ID NO: 4353 - protein, 1195 aa, Plasmodium falciparum 3D7
MSESELQQLQVLCEAMYCGNKEEQNQAHTILLPLVNNVMNVSKLKNILGSTNHVHTLIFTTSGLLQLITNEWNKIDQKEKDELKEFVISYLYNKGNFVRLYVRIVKLSWLENTNYSLITKQVEYFLNSVTSHWIIGLYIYAALIEDMHPQCGVNSAKSRRCAISFRDYVLKDIFKVGIETLEEFVKGSIRIELRIEENRLLIKVLELIYNSLSFDFMGTMINDESSDENISLMIPQSWDIFNEKNIPKLFFDMYELCMSEEDDIRNCCGKYCLRSLILLGSLRKTFFTNEKQKVHYMNEFLGGINKIIEKKIGLNDEDCFHEMCRLIGKIDTSVRLQELSTYSNFLSWCHNIYLFTMDGMKNWKYLCNSKHYLLGIWSNMLNIIPPKVIKEINNRTDEKDLLKDVLSNKNIFAKKNSISDNFNSHDIDNKYLIICDYIYDITIIFINTRLELANYICEKGDNCEIENPLYNDVLRSEQLELISNLSKLQYNFIGAKLLSIFYELKSNHENNLISKTVFIEQTTWLVFIIASIISSSAISNMKNSSFNNFKINSELCFLVFSLMDQTNKSPEVFEYLEFAYLNCLELFKKVYISGKKNNQFLKEMRSVALKIIPDGGSNMYPNNNNNNNNNNNNNNNSNNIINNNNSSNSCGINNTLGFTTGSTNNPNTLLNNNMNNFATPSLITNENDDDNNDPLIDLIISKILFNLNNRVEYEQIIKRSLDLFHDLVSGMNIVCLEDKTPKLIVFARLLLKNEKILNLLHNRSTKFLEISKYYKYRTNYYLILTKLLFMEQNLVSSTFEKYIAPINNILECIKREININGKDIILKNNEIKLTFIGALRDLRGICMACNNVETYNMFFNFFINSHPLEDNQMNILTSLVDVIWNSYDICIPFLKFMCEFVYNKSQRITFPKSSPNGILLFKVVSNILIIISNNLLQKDKFIDIYKEKYKIISLLLNMFNNCLNGDFVNFAIFDLYNDDILNNSLNLALNMCLVIPTNDLLSYIKHLKPYFSFLDLVTKNFFQRILNLEFQLIADIIHNVKEGLCSFDYTVSMTCCSILDNIVTYIFTNRKNSTEQGQVINKNKHHMIIKNFLESQPQALKEVLNLMFHLILGGDFGSTWSMSQPLLGLILLDAQGYFKIQEQLISQQSEEKKQKLRHSFCKLMDHIESNLAPNNRENFTRNLYTFAQEIRNILI

SEQ ID NO: 4354 - protein, 1059 aa, Arabidopsis thaliana
MESLAQLEAMCERLYNSQDSAERAHAENSLRCFSVNTDYISQCQYILDNSSKPYSLMLASSSLLKQVTDHTLPLNLRLDIRAYIVNYLATRGPKMQSFVIASLIQLLCRLTKFGWLDDDRFRDVVKESTNFLEQGSSDHYAIGLRILDQLVQEMNQPNPGLPSTHHRRVACNFRDQSLFQVFRIALTSLSYLKNDAAGRLQELALSLALRCVSFDFVGTSIDESTEEFGTVQIPTSWRSVLEDSSTLQIFFDYYGSTESPLSKEALECLVRLASVRRSLFTNDATRSNFLAHLMTGTKEILQTGKGLADHDNYHVFCRLLGRFRLNYQLSELVKMEGYGEWIQLVAEFTLKSLQSWQWASSSVYYLLGMWSRLVASVPYLKGDSPSLLDEFVPKITEGFIISRFNSVQASVPDDPTDHPLDKVEVLQDELDCFPYLCRFQYERTGMYIINTMEPLLQSYTERGQLQFADNSELALIEAKLSWIVHIVAAIVKIKQCSGCSVETQEVLDAELSARVLRLVNVMDSGLHRQRYGEISKQRLDRAILTFFQNFRKSYVGDQAMHSSKQLYARLKELLGLHDHLVLLNVIVGKIATNLKCYTESEEVINHTLSLFLELASGYMTGKLLLKLDTVTFIISNHTREQFPFLEEYRCSRSRTTFYYTIGWLIFMEDSLIKFKTSMEPLLQVFRTLESTPDSMFRTDAVKFALIGLMRDLRGIAMATSSRRSYGFLFDWLYPAHMPLLLRGVSHWFDTPEVTTPLLKFMAEFVHNKTQRLTFDSSSPNGILLFREVSKLIVAYGSRILALPNVADIYAFKYKGIWVSLTILSRALSGNYCNFGVFELYGDRALADALDIALKMTLAIPLADILAYRKLTKAYFGFVEVLCASHITFILKLDTATFMHLVGSLESGLKGLDTSISSQCAIAVDNLASYYFNNITMGEAPTTPAAIRFAQHIADCPSLFPEILKTLFEIVLFEDCGNQWSLSRPMLSLILISEQIFSDLKAKILSSQSIILMVQPADQHQRLSACFDSLMTDISRGLDSKNRDKFTQNLTLFRHEFRVK

SEQ ID NO: 4355 - protein, 265 aa, Glycine max
  unsure (1)..(265): unsure at all Xaa locations
XSKLXVAYGSRVLSLPSAADIYTYKYKGIWICLTILSRALSGNYVNFGVFELYGDRALSDALDAALKMTLSIPMSDILAYRKLTRAYFAFLEVXFNSHITFVLNLDTNTFMHMVGSLESGLKGLDTSISSPTRPAVDNLAAFYFNNITMGEAPNLPASVNLARHIGECPNLFPEILKTLFEIILFEDCGNQWSLSRPMLSLILINEQIFSDLKAQILSSQPMDQHQRLSSCFDKLMADVTLSIDSKNRDKFTQNLTIFRHEFRAK

SEQ ID NO: 4356 - protein, 228 aa, Glycine max
  unsure (1)..(228): unsure at all Xaa locations
XYVNFGVFELYGDRALSDALDAALKMTLSIPMSDILAYRKLTRAYFAFLEVLFNSHITFVLNLDTNTFMHMVGSLESGLKGLDTSISSQVICASAVDNLAAFYFNNITMGEAPNLPASVNLARHIAECPNLFPEILKTLFEIILFEDCGNQWSLSRPMLSLILINEQIFSDLKAQIXFSQPXXDQHQHQRLSSCFDKLMADVALSIDSKNRDKFTQNLTIFRHEFRAK

SEQ ID NO: 4357 - protein, 181 aa, Glycine max
  unsure (1)..(181): unsure at all Xaa locations
XAYFAFLEVLFNSHITFVLNLDTNTFMHMVGSLESGLKGLDTSISSQCASAVDNLAAFYFNNITMGEAPNLPASVNLARHIGECPNLFPEILKTLFEIILFEDCGNQWSLSRPMLSLILINEQIFSDLKAQILSSQPMDQHQRLSSCFDKLMADVTLSIDSKNRDKFTQNLTIFRHEFRAK

SEQ ID NO: 4358 - protein, 149 aa, Glycine max
  unsure (1)..(149): unsure at all Xaa locations
NLRFAMELAQLEALCERLYNSQDSVERAHAENTLKCFSMNTEYISQCQYILDHALTPYALMLASSSLLKQVTEHSLAMKLRLDIWAYLINYLATRGPELQPFVAASLIHFLGRVTKXFGWFDXDDRFRDLGKESMNFLSQATPGHYAIX

SEQ ID NO: 4359 - protein, 235 aa, Glycine max
  unsure (1)..(235): unsure at all Xaa locations
XPSLLDEFVPKITESFITSRFNSVQAGLPDDLSENPLDNAELLQDQLDCFPYLCRFQYESSSLFIINIMEPVLQIYTERARLHVPDNSDLIVIEDKLAWIVHIIAAILKIKQCTGCSVESQEVLDAELSARVLQWINVTDSGIHSQRYGEISQQRLDRAIITFFQHFRKSYVGDQAIHSSKLYSRLSELLGLHDHLLLVNVIIGEIVTNLKCYTESEEVIDHALSLFFELASGYX

SEQ ID NO: 4360 - protein, 188 aa, Glycine max
  unsure (1)..(188): unsure at all Xaa locations
FVNFGIFELYGDRALVDALDITVKIILSIPLADIFAFRKVAAAYFAFLESLFSCHLSFVLSLDKTTFMLVVGSLESGLKDSXXKISSQCASAIDNLATFYFTHVTVGESVTSPAALNLAGLLSDCAELFSPAPETISYLXAFLFIIFRFLYIVYHDSFCSFGKGIGFFSFISGGDFFYERSAGIYWHT

SEQ ID NO: 4361 - protein, 141 aa, Glycine max
  unsure (1)..(141): unsure at all Xaa locations
XKEHFPCLEANRCTRSRTTFYYTIGWLIFMEDSPVKFKSSMDPLQQVFLSLESTPDAVFRTDAVRYALVGLMRDLRGIAMATNSRRTYGFLFDWXYPAHMPLLLKSISHWTDTPGVTTPVVKLMAELVLNKAHRLTFDSSX

SEQ ID NO: 4362 - protein, 158 aa, Glycine max
  unsure (1)..(158): unsure at all Xaa locations
XQYLFQIFQISLTSLGQLKNDVVNQLQELXLALSLKCLSFDFVGTSVDESSDEFGXVQIPXPWKPVLEDSSTLQIFFDYYAITKPPLSKEALECLVRLASVRRXLFTNDAARXKFLAHLMTGTKVILQTGQGVVGLLLLHLFCIIMSRIKXKRYLSXX

SEQ ID NO: 4363 - protein, 117 aa, Glycine max
  unsure (1)..(117): unsure at all Xaa locations
XMRICYNIYHHELHYLGXXXSYSXNYVLDXFSVSLPNTLRXESHLXXAFMQLTRAYFAFLEVLFNSHITFVLNLDTNTFMHMVGSLESGLKGLDTSISSQVIVTNLISVFLFSDXIK

SEQ ID NO: 4364 - protein, 799 aa, Oryza sativa (japonica cultivar-group); identical to SEQ ID NO: 405

SEQ ID NO: 4365 - protein, 387 aa, Triticum aestivum
  unsure (1)..(387): unsure at all Xaa locations
XASADAAFRTDVVKYAFTGLMRDLRGIAMATNXTYGLLFDWLYPSRMPLLLRXAISLLTDEPEVTTPLLKFMSEFVLNKAQRLTFDSSSPNGILLFREISKLIVAYGSRILLLPNGTNIYRSKYKGIWXISLTVLSRAXLCGNYVNFGVFELYGDRALADALDISLKMTLSIPLADILTFKQLSKAYYGYMEVLFNNHITINSVLNLDTSTFVHIVTSLESGLKGLDTGISTQCASAIDSLAAFYFNNITAGDNPPSPXAALNLARHIGELPSLFPQILKSLFEIIIFEDAGNQWSLSRPILSLIMISEQMFSDLRSQVLASQPLDQQQRLSQCFDKLMTDVTRSLEPKNRDRFTQNLTTFRHDFRAKXQSFRITCKFEGGGASALL

SEQ ID NO: 4366 - protein, 370 aa, Triticum aestivum
  unsure (1)..(370): unsure at all Xaa locations
XVRQTGQGLADHGNYHEFCRLLGRFKVNYQLSELLNVEFYGEWLGLVAEFTTKSLLSWQWASNSVYYLLSLWSRLVTSVPYLKGDTPSLLDETVPKITEGFITSRINSVQASFADNSPDHPLENAESLQDQLESLPYLCRFKYESCSLFIINIMEPLLQAYTARSRLPASGDAAELSVIEGQIAWMVHIIAAILKIRQTVGCSQDSQELFDAELAARVLQLINITDTGVHAQRYQEISKQRLDRAILIFVQNFRRSYVGDQAMHASKLYARLSELLGLTDHLVLLNVIVGKIATNLKCYAECEDVIDHTLSLFLELASGYMTGKLLLKLESTKFIIANHSRENFPFLEEYRCVRSRTNFYYILGCLVFMX

SEQ ID NO: 4367 - protein, 1055 aa, Zea mays
  unsure (1)..(1055): unsure at all Xaa locations
MQSMESLAQLEVLCEKLYNSRDSAQRAHAESTLKCFSENSEYISQCQYILDNASTPYALMLASSSLLKQVSDRSLSLMLRLDIRNYVINYLGTRGPKLQNFVIVSLIQLVCRITKFGWFDDDRFRETVKEATDFLGLASQDHYFIGLKILNNLVTEMNQPNPAMPLTLHRKIAGSFKDQFLLQIFQISLTSLNQLKSEAPDDFGHIPLDLALKCLSFDFVGSPVDESSEEFGTVQLPASWRPLLQDPSTLQIFFDYYKVNDIRVSKEALECLVRLASVRRSIFVEDPARSQFLSHLMLGTKEILLTGQGLADHDNYHEFCRXLGRFKVNYQLAELLNVEFYGEWIGLVAEFTTRSLLSWQWASNSVYYLLSLWSRLVTSVPYLKGETPSLLDETVPKITEGFITSRINSVQAILADNSLENPLDSVEVLQDQLEFLPFLCRFQYQSSSLYIINIMEPLLQAYTERSRLPAPGDADELSVIEGQIAWMVHIIAAIVKVRQVTGVSQETQELIDAELSARVLQLISVTDTGAHTQRYQELSKQRLDRAILIFVQSFRRSYVGDQAMHSSKLYGRLSELLGLNDHLILLNVIVGKIATNMKCYAESEDVIDHTLSLFLDLATGYMTGKLLLKLESVKFIIANHSPENFPFLAEYKCSRSRTTFYYILGSLVFMEDSPVKFRTFMEPLQQVALNLEATPDAAFRTDVAKRAFVGWMRDLRGIAMATNSRKTYGLLFDWLYPSRMPLLLRAISLCTDEPEVTTPLLKFTYEFVLNKAQRLTFDSSSPNGILLFREVSKIIVAYGSRILLLPNGTDIYGSKYKGIWISLTVLSRALCGNYVNFGVFELYGDRALADALDISLKMTLSVPLSDILAFKKLSKAYFGYMEVLFNNHIKFVLNLDTNTFIHIVSSLESGLKGLDAGISSQCASAIDNLAAFYFNNITSGDSPPSPASVNLARHIGECPNLFPQILKTLFEIMLFEDAGNQWSLSRPILSLIMTSEQMFSELRAHILASQTVDQQQRLSQCFDKLMTDVNRNLEPKNRDRFTQNLTAFRRDFRLK

SEQ ID NO: 4368 - protein, 197 aa, Zea mays
  unsure (1)..(197): unsure at all Xaa locations
RXRIAAVQALTTIAIRSGEPYRLQIYEFLHALALGGVQSNLNCSXVMGKIKVPVVLFAFNLEATSDSAFRTDVVXHAFIGWMRDLCGIAMATNRTYGLLFVWXYPSRMSLLLRAISLYTDKPELITLNIMNMYEFVLNKAQRLTFDSSSPNGILMFREVSKIIVAYRSRIILLPNGTYIYGSKYKGIWISPTVLSRX

SEQ ID NO: 4369 - protein, 92 aa, Zea mays
  unsure (1)..(92): unsure at all Xaa locations
XPDDFGHIPLDLALKCLSFDFVGSPVDESSEEFGTVQLPASWRPLLQDPSTLQIFFDYYKVNDIRVSKEVYCGDLSKFINNSREFCFDPRLK

SEQ ID NO: 4370 - protein, 61 aa, Zea mays
  unsure (1)..(61): unsure at all Xaa locations
XSLQRYQELSKQRLDRAILIFVQSFRRSYVGDQAMHSSKSLYIILLIFGRVWQMYLLVNSX

SEQ ID NO: 4371 - protein, 1078 aa, Caenorhabditis elegans
MDELPVLNSLCKDLYESVDPQARHRAESNLAELSESPECLQRCMLLFARGDYPYGPMVASTTLMKLLGGKTSITSVQKLELAKYLLEMLGQGAPQFPPYLVTSLCQLFARLTKQEWTYQNPTENQTEDTKIEYPFRDPVDSLVKTINMDNIEESMLAVQLLTLLVADMNSASGMDSVNKHRKNLSQFRDDFLYEIFSVSLNVLNDNVDRNLNDRQLGLLHAVLNLNLQCLLFDYIGSLTDETSEDNCNVQIPTAWRASFTDGKIVQLMFKLLNVLPQESSEKVMTIIAQLASIRRTLFNGTERQAYVQKLVEGVVSVIMNPGKLSDQAAFHEFCRLIARLKTNYQLCELIAVPCYSHMLRLLAEFTVQSLRMMEFSANSTYFLMTFWQRMVTSVPYVRNNDEHLLNVYCPEIMTAFVESRLQHVESIVREGAENPLDDQGATLQVMEHLAIICRCEYENTCKLLTQHFDQNANIWMNGSENDANTAIAEGRLVWLITLIGTAVFGKTTATSSDVHDKMDGELIARFPLKGNLRLEVSFIHMLEQFRRAYIMDQITRASAVYDTLEAELRITEESDMLGVIVQKILTNLKFWPSNSDLLDLSLSLFKDLSLGYSAVRKLFRLPEVQLLLNNHTADHFMFLGPNIDYQTMKQRTTFYEALTRLLTTDYSDDEEMLQRFLRPLTDTVEGICTVIQNNCQGVEEEQLKKIITGLCRDLRGVAIASTTKTIFQILFEWMYPEVFNIMQFSVEKWPGCADVVTPILRLLSEMVQNRQQRLKFEMSSCSAVLLFKETSKIVSIYGERLLQLPEVSKDRVYKERYKNIGVIFLILKNALIGAYVPFGVFRLYGDSCLQDALTTFVKLFTSIPQDDFHSYTKIAQNHYNLLEHVVQDNMPFVTNLSVDVFCALLRSIHSGLSSVDAIVITSACSSLDTILNYLYRRLTRSTPPTNKVGMDPEGDNILIAIKQHPDILAKMLQAVITLMMFGEVKCQWSLSRPLLGLILIQEDVYSDMKRELTSQQTYDRQADFDMLFTQLMSNVEMNLTVKNKDTFTQNLTRFRRDIALVLKGQALPSSSSVNQEMQ

SEQ ID NO: 4372 - protein, 1098 aa, Drosophila melanogaster
MDIQQLEVLCKQLYEATDIRIRSEAEKALVTFVSSQDALPKCQLLLQRADSSYAQLLAASTLTKLIQGLSLQERIDIRSYALNYLATVPNLQHFVVQALVSLLAKLTKYGWFDSYKEEMVFQNLLEDVKKFLQGSVEHCTIGVQILSQLVCEMNSVVEMDVQVSFSKMRKIATSFRDQQLLETFLLSCSLLVSARDNSKNISFMDESQQALISHVLRLTKNCLSFDFIGSSTDESADDMNNVQIPTAWRPAFLDSNTLKLFFDLYQILPNGLASYSISCLVQITSVRRSLFNNSERTKFLTHLVEGVKDILTTLHGLSDPDNYHEFCRLLARLKSNYQLGELIAVPCYPEAIQLIAKFTVESLHLWLFAPNSVHYLLTLWQRMVASVPYVKSPDPHLLGTYTPEVIKAYIESRLDAVPVIIRDNLDDPLDDFCMVQQQLEQLSVIERCEYNKTCNLLVQHFDQKAREYENLLQTPNANSIDITIHELQLTWLVYIIGSAIVGRLTVATSDEHDTMDAELVIRVLQLMTLTDARLPQAGCEKLELAILSFLDQVRKMHSSEQAQKANLNKRLSEVFGLTDEQMLLSFINRKIITNLKFWGRSESIITKTLMLLSELSVHFNSVRKLARLEEVQFMLTHHTSEHFPFLGTNSSLSEMRCRTMFYTSLGRLLMFDLGEDEERFYNFLEPLTNQFESLGSVMMDNNIFSNEEAKKVIIGLARDLRGLALPLNARIQYTMLFEWLYYADYLPILLRAMDLWAHDPAVTTPILKLFAELVHCRTQRLAGNVSSPMGILLFREASKLICIYGNRILHQEVPRERLYPMRLKGIAICFLILKNSLGGNYVNCGVFKLYGDDTLDSVLNIIAKLILTIEQRDLIEYPKLSTAYYNLLNCLSQDHVSYLAALEPAAFVYILKSLTKGLAALDSATYISCCTILDSIVSYIFKQLQMKVSTFPNKKLRSLNQENVQFLKVVEMNSELLQSMMSSLLNNVLQEDCRNQWSMSRPLLVLILLYEDYYRSLKDRIICAQPIEKQQTMAQWFDDLMVGIERNVSSKNKEKFTQNMSTFRRDVVNLPKSTAAFSCDRPMCDGGFEPSEPESSPH

SEQ ID NO: 4373 - protein, 980 aa, Drosophila melanogaster
MVFQNLLEDVKKFLQGSVEHCTIGVQILSQLVCEMNSVVEMDVQVSFSKMRKIATSFRDQQLLETFLLSCSLLVSARDNSKNISFMDESQQALISHVLRLTKNCLSFDFIGSSTDESADDMNNVQIPTAWRPAFLDSNTLKLFFDLYQILPNGLASYSISCLVQITSVRRSLFNNSERTKFLTHLVEGVKDILTTLHGLSDPDNYHEFCRLLARLKSNYQLGELIAVPCYPEAIQLIAKFTVESLHLWLFAPNSVHYLLTLWQRMVASVPYVKSPDPHLLGTYTPEVIKAYIESRLDAVPVIIRDNLDDPLDDFCMVQQQLEQLSVIERCEYNKTCNLLVQHFDQKAREYENLLQTPNANSIDITIHELQLTWLVYIIGSAIVGRLTVATSDEHDTMDAELVIRVLQLMTLTDARLPQAGCEKLELAILSFLDQVRKMHSSEQAQKANLNKRLSEVFGLTDEQMLLSFINRKIITNLKFWGRSESIITKTLMLLSELSVHFNSVRKLARLEEVQFMLTHHTSEHFPFLGTNSSLSEMRCRTMFYTSLGRLLMFDLGEDEERFYNFLEPLTNQFESLGSVMMDNNIFSNEEAKKVIIGLARDLRGLALPLNARIQYTMLFEWLYYADYLPILLRAMDLWAHDPAVTTPILKLFAELVHCRTQRLAGNVSSPMGILLFREASKLICIYGNRILHQEVPRERLYPMRLKGIAICFLILKNSLGGNYVNCGVFKLYGDDTLDSVLNIIAKLILTIEQRDLIEYPKLSTAYYNLLNCLSQDHVSYLAALEPAAFVYILKSLTKGLAALDSATYISCCTILDSIVSYIFKQLQMKVSTFPNKKLRSLNQENVQFLKVVEMNSELLQSMMSSLLNNVLQEDCRNQWSMSRPLLVLILLYEDYYRSLKDRIICAQPIEKQQTMAQWFDDLMVGIERNVSSKNKEKFTQNMSTFRRDVVNLPKSTAAFSCDRPMCDGGFEPSEPESSPH

SEQ ID NO: 4374 - protein, 238 aa, Plasmodium yoelii yoelii
MFNNCLNGDFVNFAIFDLYNDDILNNSLNLALNMCLVIPTNDLLSYIKHLKPYFSFLDLVTKNFFQRILNLEFRLIADIIHNVKEGLCSFDYTVSMTCCSILDNIVTYIFTNRKSSSEQGQIIKNFLENQPQALKEVLNLMFHLILGGNFGSTWSMSQPLLGLILLDAQGYFKIQEQLISQQSEEKKQKLRHSFCKLMDHIDSNLASNNRENFTRNLIAIIILFILSYFFFFFNFITP

SEQ ID NO: 4375 - protein, 516 aa, Plasmodium yoelii yoelii
MSEAELQQLQVLCEAMYCGNKEEQNQAHTILLPLVSNVGNVSKLKNILGSTTHVHTLIFTTSGLLQLITNEWNKIENNEKEELKEFVISYLYNKGVELLNLSSNILGNFVRLYVRIVKLSWLENTNYALITKQVEYFLNSVTSHWIIGLYIYAALIEDMHPQCGVNSAKSRRCAISFRDYVLKDIFKVGIETLEEFVKGSIRIELRVEENRLLMKVLELIYNSLSFDFMGTMINDESSDENISLMIPQSWDIFNEKNIPKLFFDMYEICMSEVDDIRNCCGKYCIRSLILLGSLRKTFFSNEKQKIRYMNEFLGGINKIIEKKIGLHDEDCFHELCRLIGKIDTSIRLQELSTYSNFLSWCNNIYLFTMDGMKNWKYLCNSKHYLLGIWSNMLNIIPPKIIKEINSKTDEKELLNDVMNNKNFFIKKNNSISNSFNTNNDIDNKYLIICDYIYNITIVFINSRLELAKYICETGDSCEMENPLYNDVLRSEQLELISNLCKLQYNFIGGKILFYIL

SEQ ID NO: 4376 - protein, 1087 aa, Homo sapiens
MADHVQSLAQLENLCKQLYETTDTTTRLQAEKALVEFTNSPDCLSKCQLLLERGSSSYSQLLAATCLTKLVSRTNNPLPLEQRIDIRNYVLNYLATRPKLATFVTQALIQLYARITKLGWFDCQKDDYVFRNAITDVTRFLQDSVEYCIIGVTILSQLTNEINQADTTHPLTKHRKIASSFRDSSLFDIFTLSCNLLKQASGKNLNLNDESQHGLLMQLLKLTHNCLNFDFIGTSTDESSDDLCTVQIPTSWRSAFLDSSTLQLFFDLYHSIPPSFSPLVLSCLVQIASVRRSLFNNAERAKFLSHLVDGVKRILENPQSLSDPNNYHEFCRLLARLKSNYQLGELVKVENYPEVIRLIANFTVTSLQHWEFAPNSVHYLLSLWQRLAASVPYVKATEPHMLETYTPEVTKAYITSRLESVHIILRDGLEDPLEDTGLVQQQLDQLSTIGRCEYEKTCALLVQLFDQSAQSYQELLQSASASPMDIAVQEGRLTWLVYIIGAVIGGRVSFASTDEQDAMDGELVCRVLQLMNLTDSRLAQAGNEKLELAMLSFFEQFRKIYIGDQVQKSSKLYRRLSEVLGLNDETMVLSVFIGKIITNLKYWGRCEPITSKTLQLLNDLSIGYSSVRKLVKLSAVQFMLNNHTSEHFSFLGINNQSNLTDMRCRTTFYTALGRLLMVDLGEDEDQYEQFMLPLTAAFEAVAQMFSTNSFNEQEAKRTLVGLVRDLRGIAFAFNAKTSFMMLFEWIYPSYMPILQRAIELWYHDPACTTPVLKLMAELVHNRSQRLQFDVSSPNGILLFRETSKMITMYGNRILTLGEVPKDQVYALKLKGISICFSMLKAALSGSYVNFGVFRLYGDDALDNALQTFIKLLLSIPHSDLLDYPKLSQSYYSLLEVLTQDHMNFIASLEPHVIMYILSSISEGLTALDTMVCTGCCSCLDHIVTYLFKQLSRSTKKRTTPLNQESDRFLHIMQQHPEMIQQMLSTVLNIIIFEDCRNQWSMSRPLLGLILLNEKYFSDLRNSIVNSQPPEKQQAMHLCFENLMEGIERNLLTKNRDRFTQNLSAFRREVNDSMKNSTYGVNSNDMMS

SEQ ID NO: 4377 - protein, 909 aa, Homo sapiens
EWSKMADHVQSLAQLENLCKQLYETTDTTTRLQAEKALVEFTNSPDCLSKCQLLLERGSSSYSQLLAATCLTKLVSRTNNPLPLEQRIDIRNYVLNYLATRPKLATFVTQALIQLYARITKLGWFDCQKDDYVFRNAITDVTRFLQDSVEYCIIGVTILSQLTNEINQADTTHPLTKHRKIASSFRDSSLFDIFTLSCNLLKQASGKNLNLNDESQHGLLMQLLKLTHNCLNFDFIGTSTDESSDDLCTVQIPTSWRSAFLDSSTLQLSTIGRCEYEKTCALLVQLFDQSAQSYQELLQSASASPMDIAVQEGRLTWLVYIIGAVIGGRVSFASTDEQDAMDGELVCRVLQLMNLTDSRLAQAGNEKLELAMLSFFEQFRKIYIGDQVQKSSKLYRRLSEVLGLNDETMVLSVFIGKIITNLKYWGRCEPITSKTLQLLNDLSIGYSSVRKLVKLSAVQFMLNNHTSEHFSFLGINNQSNLTDMRCRTTFYTALGRLLMVDLGEDEDQYEQFMLPLTAAFEAVAQMFSTNSFNEQEAKRTLVGLVRDLRGIAFAFNAKTSFMMLFEWIYPSYMPILQRAIELWYHDPACTTPVLKLMAELVHNRSQRLQFDVSSPNGILLFRETSKMITMYGNRILTLGEVPKDQVYALKLKGISICFSMLKAALSGSYVNFGVFRLYGDDALDNALQTFIKLLLSIPHSDLLDYPKLSQSYYSLLEVLTQDHMNFIASLEPHVIMYILSSISEGLTALDTMVCTGCCSCLDHIVTYLFKQLSRSTKKRTTPLNQESDRFLHIMQQHPEMIQQMLSTVLNIIIFEDCRNQWSMSRPLLGLILLNEKYFSDLRNSIVNSQPPEKQQAMHLCFENLMEGIERNLLTKNRDRFTQNLSAFRREVNDSMKNSTYGVNSNDMMS

SEQ ID NO: 4378 - protein, 1087 aa, Homo sapiens
MADHVQSLAQLENLCKQLYETTDTTTRLQAEKALVEFTNSPDCLSKCQLLLERGSSSYSQLLAATCLTKLVSRTNNPLPLEQRIDIRNYVLNYLATRPKLATFVTQALIQLYARITKLGWFDCQKDDYVFRNAITDVTRFLQDSVEYCIIGVTILSQLTNEINQADTTHPLTKHRKIASSFRDSSLFDIFTLSCNLLKQASGKNLNLNDESQHGLLMQLLKLTHNCLNFDFIGTSTDESSDDLCTVQIPTSWRSAFLDSSTLQLFFDLYHSIPPSFSPLVLSCLVQIASVRRSLFNNAERAKFLSHLVDGVKRILENPQSLSDPNNYHEFCRLLARLKSNYQLGELVKVENYPEVIRLIANFTVTSLQHWEFAPNSVHYLLSLWQRLAASVPYVKATDPHMLETYTPEVTKAYITSRLESVHIILRDGLEDPLEDTGLVQQQLDQLSTIGRCEYEKTCALLVQLFDQSAQSYQELLQSASASPMDIAVQEGRLTWLVYIIGAVIGGRVSFASTDEQDAMDGELVCRVLQLMNLTDSRLAQAGNEKLELAMLSFFEQFRKIYIGDQVQKSSKLYRRLSEVLGLNDETMVLSVFIGKIITNLKYWGRCEPITSKTLQLLNDLSIGYSSVRKLVKLSAVQFMLNNHTSEHFSFLGINNQSNLTDMRCRTTFYTALGRLLMVDLGEDEDQYEQFMLPLTAAFEAVAQMFSTNSFNEQEAKRTLVGLVRDLRGIAFAFNAKTSFMMLFEWIYPSYMPILQRAIELWYHDPACTTPVLKLMAELVHNRSQRLQFDVSSPNGILLFRETSKMITMYGNRILTLGEVPKDQVYALKLKGISIYFSMLKAALSGSYVNFGVFRLYGDDALDNALQTFIKLLLSIPHSDLLDYPKLSQSYYSLLEVLTQDHMNFIASLEPHVIMYILSSISEGLTALDTMVCTGCCSCLDHIVTYLFKQLSRSTKKRTTPLNQESDRFLHIMQQHPEMIQQMLSTVLNIIIFEDCRNQWSMSRPLLGLILLNEKYFSDLRNSIVNSQPPEKQQAMHLCFENLMEGIERNLLTKNRDRFTQNLSAFRREVNDSMKNSTYGVNSNDMMS

SEQ ID NO: 4379 - protein, 1006 aa, Homo sapiens [sequence omitted]

SEQ ID NO: 4380 - protein, 1088 aa, Homo sapiens
MALHFQSLAELEVLCTHLYIGTDLTQRIEAEKALLELIDSPECLSKCQLLLEQGTTSYAQLLAATCLSKLVSRVSPLPVEQRMDIRNYILNYVASQPKLAPFVIQALIQVIAKITKLGWFEVQKDQFVFREIIADVKKFLQGTVEHCIIGVIILSELTQEMNLVDYSRPSAKHRKIATSFRDTSLKDVLVLACSLLKEVFAKPLNLQDQCQQNLVMQVLKLVLNCLNFDFIGSSADESADDLCTVQIPTTWRTIFLEPETLDLFFNLYHSLPPLLSQLALSCLVQFASTRRSLFNSPERAKYLGNLIKGVKRILENPQGLSDPGNYHEFCRFLARLKTNYQLGELVMVKEYPEVIRLIANFTITSLQHWEFAPNSVHYLLTLWQRMVASVPFVKSTEPHLLDTYAPEITKAFITSRLDSVAIVVRDHLDDPLDDTATVFQQLEQLCTVSRCEYEKTCALLVQLFDQNAQNYQKLLHPYSGVTVDITIQEGRLAWLVYLVGTVVGGRLTYTSTDEHDAMDGELSCRVFQLISLMDTGLPRCCNEKIELAILWFLDQFRKTYVGDQLQRTSKVYARMSEVLGITDDNHVLETFMTKIVTNLKYWGRYEPVISRTLQFLNDLSVGYILLKKLVKIDAVKFMLKNHTSEHFPFLGISDNHSLSDFRCRTTFYTALTRLLMVDLGEDEDEFENFMLPLTVAFETVLQIFNNNFKQEDVKRMLIGLARDLRGIAFALNTKTSYTMLFDWMYPTYLPLLQNAVERWYGEPTCTTPILKLMAELMQNRSQRLNFDVSSPNGILLFREASKMVCTYGNQILSLGSLSKDQIYPMKLKGISICYSALKSALCGNYVSFGVFKLYGDNHFDNVLQAFVKMLLSVSHSDLLQYRKLSQSYYPLLECLTQDHMSFIINLEPPVLMYVLTSISEGLTTLDTVVSSSCCTSLDYIVTYLFKHIAKEGKKPLRCREATQAGQRLLHFMQQNPDVLQQMMSVLMNTIVFEDCRNQWSVSRPLLGLILLNEKYFSELRASLINSQPLPKQEVLAQCFRNLMEGVEQNLSVKNRDRFTQNLSVFRRDVAEALRSDGNTEPCSLDMMS

SEQ ID NO: 4381 - protein, 413 aa, Homo sapiens [sequence omitted]

SEQ ID NO: 4382 - protein, 576 aa, Homo sapiens
MALHFQSLAELEVLCTHLYIGTDLTQRIEAEKALLELIDSPECLSKCQLLLEQGTTSYAQLLAATCLSKLVSRVSPLPVEQRMDIRNYILNYVASQPKLAPFVIQALIQVIAKITKLGWFEVQKDQFVFREIIADVKKFLQGTVEHCIIGVIILSELTQEMNLVDYSRPSAKHRKIATSFRDTSLKDVLVLACSLLKEVFAKPLNLQDQCQQNLVMQVLKLVLNCLNFDFIGSSADESADDLCTVQIPTTWRTIFLEPETLDLFFNLYHSLPPLLSQLALSCLVQFASTRRSLFNSPERAKYLGNLIKGVKRILENPQGLSDPGNYHEFCRFLARLKTNYQLGELVMVKEYPEVIRLIANFTITSLQHWEFAPNSVHYLLTLWQRMVASVPFVKSTEPHLLDTYAPEITKAFITSRLDSVAIVVRDHLDDPLDDTATVFQQLEQLCTVSRCEYEKTCALLVQLFDQNAQNYQKLLHPYSGVTVDITIQEGRLAWLVYLVGTVVGGRLTYTSTDEHDAMDGELSCRVFQLISLMDTGLPRCCNEKIELAILWFLDQFRKTYVGDQLQRTSKKTDIFL

SEQ ID NO: 4383 - protein, 580 aa, Homo sapiens
MALHFQSLAELEVLCTHLYIGTDLTQRIEAEKALLELIDSPECLSKCQLLLEQGTTSYAQLLAATCLSKLVSRVSPLPVEQRMDIRNYILNYVASQPKLAPFVIQALIQVIAKITKLGWFEVQKDQFVFREIIADVKKFLQGTVEHCIIGVIILSELTQEMNLVDYSRPSAKHRKIATSFRDTSLKDVLVLACSLLKEVFAKPLNLQDQCQQNLVMQVLKLVLNCLNFDFIGSSADESADDLCTVQIPTTWRTIFLEPETLDLFFNLYHSLPPLLSQLALSCLVQFASTRRSLFNSPERAKYLGNLIKGVKRILENPQGLSDPGNYHEFCRFLARLKTNYQLGELVMVKEYPEVIRLIANFTITSLQHWEFAPNSVHYLLTLWQRMVASVPFVKSTEPHLLDTYAPEITKAFITSRLDSVAIVVRDHLDDPLDDTATVFQQLEQLCTVSRCEYEKTCALLVQLFDQNAQNYQKLLHPYSGVTVDITIQEGRLAWLVYLVGTVVGGRLTYTSTDEHDAMDGELSCRVFQLISLMDTGLPRCCNEKIELAILWFLDQFRKTYVGDQLQRTSKEVAGDCILLN

SEQ ID NO: 4384 - protein, 334 aa, Mesocricetus auratus
MEAAHFFEGTEKLLEVWFSRQQSDASQGSGDLRTIPRSEWDVLLKDVQCSIISVTKTDKQEAYVLSESSMFVSKRRFILKTCGTTLLLKALVPLLKLARDYSGFDSIQSFFYSRKNFMKPSHQGYPHRNFQEEIEFLNAIFPNGAAYCMGRMNSDCWYLYTLDFPESRVINQPDQTLEILMSELDPAVMDQFYMKDGVTAKDVTRESGIRDLIPGSVIDATLFNPCGYSMNGMKSDGTYWTIHITPEPEFSYVSFETNLSQTSYDDLIRKVVEVFKPGKFVTTLFVNQSSKCRTVLSSPQKIEGFKRLDCQSAMFNDYNFVFTSFAKKQQQQQS

SEQ ID NO: 4385 - protein, 334 aa, Mus musculus
MEAAHFFEGTEKLLEVWFSRQQSDASQGSGDLRTIPRSEWDVLLKDVQCSIISVTKTDKQEAYVLSESSMFVSKRRFILKTCGTTLLLKALVPLLKLARDYSGFDSIQSFFYSRKNFMKPSHQGYPHRNFQEEIEFLNAIFPNGAAYCMGRMNSDCWYLYTLDFPESRVISQPDQTLEILMSELDPAVMDQFYMKDGVTAKDVTRESGIRDLIPGSVIDATLFNPCGYSMNGMKSDGTYWTIHITPEPEFSYVSFETNLSQTSYDDLIRKVVEVFKPGKFVTTLFVNQSSKCRTVLSSPQKIDGFKRLDCQSAMFNDYNFVFTSFAKKQQQQQS

SEQ ID NO: 4386 - protein, 334 aa, Mus musculus
MEAAHFFEGTEKLLEVWFSRQQSDASQGSGDLRTIPRSEWDVLLKDVQCSIISVTKTDKQEAYVLSESSIFVSKRRFILKTCGTTLLLKALVPLLKLARDYSGFDSIQSFFYSRKNFMKPSHQGYPHRNFQEEIEFLNVIFPNGAAYCMGRMNSDCWYLYTLDFPESRVISQPDQTLEILMSELDPAVMDQFYMKDGVTAKDVTRESGIRDLIPGSVIDATLFNPCGYSMNGMKSDGTYWTIHITPEPEFSYVSFETNLSQTSYDDLIRKVVEVFKPGKFVTTLFVNQSSKCRTVLSSPQKIDGFKRLDCQSAMFNDYNFVFTSFAKKQQQQQS

SEQ ID NO: 4387 - protein, 334 aa, Mus musculus
MEAAHFFEGTEKLLEVWFSRQQSDASQGSGDLRTIPRSEWDVLLKDVQCSIISVTKTDKQEAYVLSESSMFVSKRRFILKTCGTTLLLKALVPLLKLARDYSGFDSIQSFFYSRKNFMKPSHQGYPHRNFQEEIEFLNAIFPNGAAYCMGRMNSDCWYLYTLDFPESRVISQPDQTLEILMSELDPAVMDQFYMKDGVTAKDVTRESGIRDLIPGSVIDATLFNPCGYSMNGMKSDGTYWTIHITPEPEFSYVSFETNLSQTSYDHLIRKVVEVFKPGKFVTTLFVNQSSKCRTVLSSPQKIDGFKRLDCQSAMFNDYNFVFTSFAKKQQQQQS

SEQ ID NO: 4388 - protein, 265 aa, Mus musculus
MFVSKRRFILKTCGTTLLLKALVPLLKLARDYSGFDSTESFFYSRKNFMKSSHQGYPHQNFQEEIKFLNAIFPNGAAYCMGRMNSDCWYLYTLDFPESRVISQPDQTLEILMSELDPAVMDQFYMKDGVTAKDVTRESGICDLIPGSAIDATLFNPCGYSMNGMKSDGTYWTVHITPEPEFSYVSVETNLSQTSYDDLIRKVVEVFKPRKFVTTLFVNQSSKFCTVFSSPQKINSFNRLDCQSSMFNDYNFVFTSFAKKQQQQQS

SEQ ID NO: 4389 - protein, 182 aa, Mus musculus
MEAAHFFEGTEKLLEVWFSRQQSDASQGSGDLRTIPRSEWDVLLKDVQCSIISVTKTDKQEAYVLSESSMFVSKRRFILKTCGTTLLLKALVPLLKLARDYSGFDSIQSFFYSRKNFMKPSHQGYPHRNFQEEIEFLNAIFPNGAAYCMGRMNSDCWYLYTLDFPREPSNQSARSNTGNSDE

SEQ ID NO: 4390 - protein, 217 aa, Mus musculus
MKPSHQGYPHRNFQEEIEFLNAIFPNGAAYCMGRMNSDCWYLYTLDFPESRVISQPDQTLEILMSELDPAVMDQFYMKDGVTAKDVTRESGIRDLIPGSVIDATLFNPCGYSMNGMKSDGTYWTIHITPEPEFSYVSFETNLSQTSYDNLIRKVVEVFKPGKFVTTLFVNQSSKCRTVLSSPQKIDGFKRLDCQSAKFNDYNFVFTSFAKKQQQQQS

SEQ ID NO: 4391 - protein, 291 aa, Mus musculus
MGIEKVLEVLFSRQQSDARQGSGDLRTIPRSEWDVLLKDVQCSIISVTKTDKQEVYVLSESGMFFSKERFILKTSEFHEALPHENFEKEIEFLNTIFQNKAAYCMGCMNSDCWRLYALDFPESRVINQPDQTLEILMNELDPAVMDQFYMKDGVTAKDVTRESGIHDLIPGSVIDATLFNSCGYSIYGMKSDGTYWTIHITPEPEFSYVSFETNLSQTCYDDLIRKVVEVFKPGKFVTTLFVNQSSKCHKCFLRPRRLTTLKVLIARVLCSMITILFLPVFLRNSNNSRVD

SEQ ID NO: 4392 - protein, 139 aa, Mus musculus
MNSDCWHLYALDFPESRVIIQPDQTLEILMNELDPAVMDQFYMKDGVTAKDVTRESGIHDLIPGSVIDATLFNSCGYSIYGMKSDGTYWTIHITPEPEFSYVSFETNLSQTCYDDLIRKVVEVFKPGKFVTTLFVNQMF

SEQ ID NO: 4393 - protein, 334 aa, Mus spretus
MEAAHFFEGTEKLLEVWFSRQQSDASQGSGDLRTIPRSEWDVLLKDVQCSIISVTKTDKQEAYVLSESSMFVSKRRFILKTCGTTLLLKALVPLLKLARDYSGFDSIQSFFYSRKNFMKPSHQGYPHRNFQEEIEFLNVIFPNGAAYCMGRMNSDCWYLYTLDFPESRVISQPDQTLEILMSELDPAVMDQFYMKDGVTAKDVTRESGIRDLIPGSVIDATLFNPCGYSMNGMKSDGTYWTIHITPEPEFSYVSFETNLSQTSYDDLIRKVVEVFKPGKFVTTLFVNQSSKCRTVLSSPQKIDGFKRLDCQSAMFNDYNFVFTSFAKKQQQQQS

SEQ ID NO: 4394 - protein, 333 aa, Rattus norvegicus
MEAAHFFEGTEKLLEVWFSRQQSDASQGSGDLRTIPRSEWDVLLKDVQCSIISVTKTDKQEAYVLSESSMFVSKRRFILKTCGTTLLLKALVPLLKLARDYSGFDSIQSFFYSRKNFMKPSHQGYPHRNFQEEIEFLNAIFPNGAAYCMGRMNSDCWYLYTLDLPESRVINQPDQTLEILMSELDPAVMDQFYMKDGVTAKDVTRESGIRDLIPGSVIDATLFNPCGYSMNGMKSDGTYWTIHITPEPEFSYVSFETNLSQTSYDDLIRKVVEVFKPGKFVTTLFVNQSSKCRTVLSSPQKIDGFKRLDCQSAMFNDYNFVFTSFAKKQQQQS

SEQ ID NO: 4395 - protein, 333 aa, Rattus norvegicus
MEAAHFFEGTEKLLEVWFSRQQSDASQGSGDLRTIPRSEWDVLLKDVQCSIISVTKTDKQEAYVLSESSMFVSKRRFILKTCGTTLLLKALVPLLKLARDYSGFDSIQSFFYSRKNFMKPSHQGYPHRNFQEEIEFLNAIFPNGAGYCMGRMNSDCWYLYTLDLPESRVINQPDQTLEILMSELDPAVMDQFYMKDGVTAKDVTRESGIRDLIPGSVIDATLFNPCGYSMNGMKSDGTYWTIHITPEPEFSYVSFETNLSQTSYDDLIRKVVEVFKPGKFVTTLFVNQSSKCRTVLSSPQKIDGFKRLDCQSAMFNDYNFVFTSFAKKQQQQS

SEQ ID NO: 4396 - protein, 279 aa, Rattus norvegicus
MQTKTKSHLPEGTEKHLKVRFSRQQFDTNQGSRDLHTAPRSEWDALLNNNMSTITVTKTDKQEAYVLRGTHTGISRKKQSEFLNAISPNGAYCMKHINSDCWYLYTLDLPESRVINQPNQTLEILKSEFDPAVMDQFYMKDGVTAKDVTHESRIHDLIPGSVVDATLFNPCGYSMNGMKPDRTYWTIHITPEPEFSYVSFETNLSQTSYHDLIRKVMEIFKPGNFVITLFVNQSSKCRTMFSSPQKISSFKHLDCQSAISNDYNFVFTSFAKKQQQQHS

SEQ ID NO: 4397 - protein, 393 aa, Hordeum chilense
MAAPVSAIGFEGYEKRLEITFSEASIFADPHGRGLRALSRAQIDSVLDLARCTIVSELSNKDFDSYVLSESSLFIYSQKIVIKTCGTTMLLLTIPRILELAEELCMPLAAVKYSRGMFIFPGAQPAPHRSFSEEVDVLNRYFGHLNSGGNAYVIGDPAKPGQKWHIYYATEQPEQPMVTLEMCMTGLDKTKASVFFKTHADGHVSCAKEMTKLSGISDIIPEMEVCDFDFEPCGYSMNAINGSAFSTIHVTPEDGFSYASYEVQGMDASALAYGDIVKRVLRCFGPSEFSVAVTIFGGRGHAATWGKKLDAEAYDCNNVVEQELPCGGVLIYQSFAANEELAVSAGSPRSVFHCFENVESGHPLVKEGKLANLLAWRAEEESLEEGTGALLCE

SEQ ID NO: 4398 - protein, 306 aa, Emericella nidulans
GKMNGEHWYLYLTEPYTSLTPPATPTADSDDEVTQTKFIQLPDRSDLGMGPQDEASDETLEVLMTDLDEESAKQFYLDHATSVAEKRYSNFEKDDHVDVFSNGSDLEVDDVSSSQGSGILPAELTTEGHALGTVVSESCGLSDVYPKGKFPDSRIDAYLFTPCGFSANGVIPSPDGGKGTHYFTVHVTPEPHCSYASFETNVPHSRNGQTSAGIIQQVVNIFKPGRFTVTVFEAKPGVDGEWDADKEARYIERQAARRVSKGENVEGYKRVDRIVHDLHGYDLVFRYYERLDWKGGAPRLGEEVIA

SEQ ID NO: 4399 - protein, 361 aa, x Citrofortunella mitis
MALPVSAIGFEGYEKRLEVSFFEPGVFADPGGRGLRSLSKHQLDEILKPAECTIVSSLSNEYLDSYVLSESSLFVYPYKVIIKTCGTTKLLLSIPAILKLAESLSLSVRSVRFTRGSFIFAGAQPFPHRSFSEEVAVLDGHFGKFGMDSTAFVMGSPDNTKRWHVYSASAEAGSHVNLVYTLEMCMTGLDRKRASVFYKTNESSAAMMTEDSGIRKILPKSEICDFEFDPCGYSMNSIEGDAVSTIHVTPEDGFSYASFEAVGYDFEVVKLTSLLERVLACFKPAEFSVALHSDIVGDEHGDTFTLDFKGYSCGEKIYEELGNNGSLIYYSFSRTDCSTSPRSILKCCWSEDEKDEEVEGK

SEQ ID NO: 4400 - protein, 338 aa, Anopheles gambiae str. PEST
NKASCTPDRMAESEDLSNSSSNSSSREDMHFFEGVEKLLEIWFEPSTACKNADLRKIPRPMWDALLKTVRCEIISFTRNDQIDAYVLSESSMFVSKRRWILKTCGTTTPLQCFEPLLRLAAEIAGYTEIEDLFYSRKNYKRPELQVSPHRGFDEEVAFLDSFFDDGRAYSLASMQPDPDQTIEILMTDLDPSVMAIFTKDVCTTAKEATQKSGIHRLLPGMVIDDYLFDPCGYSMNGISKNGCYMTIHITPEREFSYVSFESNVASSDYGELIKRVTRTFQPGKFIVTVFANKTSIAANANREIEHLGTIDQWKRRDIQYSRFASYDLTYAQYCKYPS

SEQ ID NO: 4401 - protein, 228 aa, Vitis vinifera
MALPVSAIGFEGYEKRLEISFFEPGIFADPVGMGLRSLSKTQLDEILEPAECTIVSSLSNDEVDSYVLSESSLFVYHYKIIIKTCGTTKLLLSIPPILKLANSLDLSVRSVKYTRGSFIFPGAQSFPHRNFSEEVVELDGHFGELGAGSKAYMMGSHDKPQKWHVYTAAAEFTGRSDPVYTLEMCMTGLDRKKASVFYKTDTSSAAVMTENSGIRKILPNSEICDFDF

SEQ ID NO: 4402 - protein, 363 aa, Spinacia oleracea
MAISAIGFEGFEKRLEITFFEPSIFVDPEGKGLRALCKAQLDEILGPAECTIVDSLANESVDSYVLSESSLFIYAYKIIIKTCGTTKLLRAIPPILRLAGKLSLDVKSVRYTRGSFIFPGAQSYAHRSFSEEVAVLDGYFGKLAAGSKAFVMGDPAKPQKWHVYSASAETISFEEPVYTLEMCMTGLKKEKASVFFKSQSPNAAVMTESSGIRKILPDSKICDFDFEPCGYSMNAIEGPAISTIHITPEDGFSYASFEAVGYDLKKTDLNQLVERVLACFEPSEFSIAIHAEIAANSMEHNCYVNVNGYSREEGGIEELGFGAASVFYQKFCKASTGFGATNKPKPALKCCWKEDKFEEEKDY

SEQ ID NO: 4403 - protein, 381 aa, Dianthus caryophyllus
MMVPTLGNSNYNTVSPMNGDDNNTMALSAIGFEGFEKRLEISFFEPGIFVDPEGKGLRALSKAQLDEILGPAECTIVDSLANESVDSYVLSESSLFVYSYKIIIKTCGTTKLLHSILPILTLADGLCLDVKSVRYTRGSFIFPGAQSYPHRSFSEEVAVLDKYFGNLGTGSKAFVMGSPAKPQKWHVYSATAEPSYDDPVYTLEMCMTGLDKGKASVFFKSESASAAVMTETSGIRKILPDSAICDFDFEPCGYSMNAIEGPAVSTIHITPEDGFSYASFEAVGYDLKIVDVNQLVERVLNCFQPREFSIAVSVDTADKVLEQYCAVNVAGYCREEGGVEGLGVGGSVLYQKFGKVATVSGLNKSPKCCRKEEENDEKREC

SEQ ID NO: 4404 - protein, 377 aa, Dianthus caryophyllus
MTIPMMGNTTDDNNNMTISAIGFEGFEKRLEISFFEPGIFVDPEGKGLRALSKAHLDEILGPAECTIVDSLANESVDSYVLSESSLFVYSYKIIIKTCGTTKLLNSIPPILRLAETLFLDVKSVRYTRGSFIFPGAQSFPHRSFSEEVAVLDNYFAKLGAGSKAIVMGSPGKPQKWHVYSATAETNYDDPVYTLEMCMTGLDKEKASVFFKSQSASAAVMTESSGIRKILPDSVICDFDFEPCGYSMNAIEGPAVSTIHITPEDGFSYASFEAVGYDLQVVDLNLLVERVLACFEPKEFSIAVHADTDTADKVLARNCSVNVIGYSREEGGIEELGLGGSVFYQKFCKGTAPVCPPAPKKTLKCCWKEEEIDEEMEF

SEQ ID NO: 4405 - protein, 362 aa, Ipomoea nil
MALSTSAIGFEGYEKRLEISFFEAGIFSDPEGRGLRALSKEQLDKVLKPAECTIVSSLSNNEVDSYVLSESSLFVYPYKIIIKTCGTTKLLLSIPPILELADGLSLKVKSVKYTRGSFNFPEVQPYPHRNFSEEVAILDGYFGKLGTGSKAYVMGGAGKQQQWHVYSASAESAENTFPIYTLEMCMTGLDKKSASVFFKTQSSSAAVMTDASGIRKILPGSDICDFDFEPCGYSMNAVEGGTISTIHVTPEDGFSYASFEAMGYDFKDVNLDALIQRVLSCFQPAEFSVALHCDSIGEKLDSVFELDVKGYACGERSYEALGKGGSIMYCGFTSTGSCGSPRSTLLCCWSENEDQEGEKKHF

SEQ ID NO: 4406 - protein, 362 aa, Arabidopsis thaliana
MAMSAIGFEGYEKRLEVTFFEPGLFLDTQGKGLRALAKSQIDEILQPAECTIVSSLSNDQLDSYVLSESSLFIFPYKIVIKTCGTTKLLLSIEPLLRLAGELSLDVKAVRYTRGSFLCPGGQPFPHRNFSEEVSVLDGHFAKLGLSSVAYLMGNDDETKKWHVYSASSANSNNKNNVYTLEMCMTGLDKDKASVFYKNESSSAGSMTDNSGIRKILPQSQICDFEFEPCGYSMNSIEGDAISTIHVTPEDGFSYASFEAVGYDFTTMDLSHLVSKVLTCFKPKQFSVAVHSTVAQKSYDSGLSVDLDDYGCKESTMESLGEERGTVMYQRFEKLGRYCGSPRSTLKCEWSSNSSCNSEDEKE

SEQ ID NO: 4407 - protein, 347 aa, Arabidopsis thaliana
MAVSGFEGFEKRLELRFFDDDKPITKNPMGLRLIDFESLDQVLNEVQCTVVSAVANRSFDAYVLSESSLFVYPTKIIIKTCGTTQLLKSIRPLIHLARNLGLTLRACRYSRGSFIFPKAQPFPYTSFKDEVIVVEESLPKSLCYRKASVMTPSNNPSRAWHVFTASADVESDEHVVVVEVCMTELDRVNARSFFKRKGDEKNNSDSAGKEMTRLSGIDNINANAYICDFAFDPCGYSMNGVDGDRYSTIHVTPEDGFSYASFECGLSLYDNGHEDISEVLSRAIDVFRPSDVSIATTYGGEDYNHEVTKRVERVLAKKLDLKCRSRLMDEFPGSGTVVYQSFTPRRK

SEQ ID NO: 4408 - protein, 366 aa, Arabidopsis thaliana
MALSAIGFEGYEKRLEVTFFEPSIFQDSKGLGLRALTKSQLDEILTPAACTIVSSLSNDQLDSYVLSESSFFVYPYKVIIKTCGTTKLLLSIPPLLKLAGELSLSVKSVKYTRGSFLCPGGQPFPHRSFSEEVSVLDGHFTQLGLNSVAYLMGNDDETKKWHVYAASAQDSSNCNNNVYTLEMCMTGLDREKAAVFYKDEADKTGSMTDNSGIRKILPKSEICDFEFEPCGYSMNSIEGDAISTIHVTPEDGFSYASFEAVGYDFNTLDLSQLVTRVLSCFEPKQFSVAVHSSVGANSYKPEITVDLEDYGCRERTFESLGEESGTVMYQTFEKLGKYCGSPRSTLKCEWSSNNSCSSEDEKDEGI

SEQ ID NO: 4409 - protein, 366 aa, Arabidopsis thaliana
MALSAIGFEGYEKRLEVTFFEPSIFQDSKGLGLRALTKSQLDEILTPAACTIVSSLSNDQLDSYVLSESSFFVYPYKVIIKTCGTTKLLLSIPPLLKLAGELSLSVKSVKYTRGSFLCPGGQPFPHRSFSEEVSVLDGHFTQLGLNSVAYLMGNDDETKKWHVYAASAQDSSNCNNNVYTLEMCMTGLDREKAAVFYKDEADKTGSMTDNSGIRKILPKSEICDFEFEPCGYSMNSIEGDAISTIHVTPEDGFSYASFEAVGYDFNTLDLSQLVTRVLSCFEPKQFSVAVHSSVGANSYKPEITVDLEDYGCRERTFESLGEESGTVMYHTFEKLGKYCGSPRSTLKCEWSSNNSCSSEDEKDEGI

SEQ ID NO: 4410 - protein, 366 aa, Arabidopsis thaliana
MALSAIGFEGYEKRLEVTFFEPSIFQDSKGLGLRALTKSQLDEILTPAACTIVSSLSNDQLDSYVLSESSFFVYPYKVIIKTCGTTKLLLSIPPLLKLAGELSLSVKSVKYTRGSFLCPGGQLFPHRSFSEEVSVLDGHFTQLGLNSVAYLMGNDDETKKWHVYAASAQDSSNCNNNVYTLEMCMTGLDREKAAVFYKDEADKTGSMTDNSGIRKILPKSEICDFEFEPCGYSMNSIEGDAISTIHVTPEDGFSYASFEAVGYDFNTLDLSQLVTRVLSCFEPKQFSVAVHSSVGANSYKPEITVDLEDYGCRERTFESLGEESGTVMYQTFEKLGKYCGSPRSTLKCEWSSNNSCSSEDEKDEGI

SEQ ID NO: 4411 - protein, 366 aa, Arabidopsis thaliana
MALSAIGFEGYEKRLEVTFFEPSIFQDSKGLGLRALTKSQLDEILTPAACTIVSSLSNDQLDSYVLSESSFFVYPYKVIIKTCGTTKLLLSIPPLLKLAGELSLSVKSVKYTRGSFLCPGGQPFPHRSFSEEVSVLDGHFTQLGLNSVATLMGNDDETKKWHVYAASAQDSSNCNNNVYTLEMCMTGLDREKAAVFYKDEADKTGSMTDNSGIRKNLPKSEICDFEFEPCGYSMNSIEGDAISTNHVTPEDGFSYASFEAVGYDFNTLDLSQLVTRVLSCFEPKQFSVAVHSSVGANSYKPEITVDLEDYGCRERTFESLGEESGTVMYQTFEKLGKYCGSPRSTLKCEWSSNNSCSSEDEKDEGI

SEQ ID NO: 4412 - protein, 349 aa, Arabidopsis thaliana
MAVSATGFEGFEKRLEISFFETTDFLDPQGKSLRSLTKSQLDEILTPAECTIVSSLTNSFVDSYVLSESSLFVYPYKIIIKTCGTTKLLLSIPHILRLADSLCLTVKSVRYTRGSFIFPGAQSYPHRSFSEEVALLDDYFGKLNAGSKAFVMGGSDNNPQRWHVYSASSTEESAVCDKPVYTLEMCMTGLDNIKASVFFKTNSVSASEMTISSGIRNILPGSEICDFNFEPCGYSMNSIEGDAVSTIHVTPEDGFSYASFETVGYDLKALNFKELVDRVLVCFGPEEFSVAVHANLGTEVLASDCVADVNGYFSQERELEELGLGGSVLYQRFVKTVECCSPKSTLGFC

SEQ ID NO: 4413 - protein, 369 aa, Brassica juncea
MSVSAIGFEGYEKRLEVSFFEPSLFVDTHGKGLRALPKSQIDEILAPAECTIVSSLSNDELDSYVLSESSLFIFPYKIIIKTCGTTKLLPSIEPLLRLAGELSLEVKSVRYTRGSFLCPGGQPFPHRNFSEEVSVLDGHFAKMGLSSVAYLMGDDDETKKWHVYSASAPARNGNGNNNNNVYTLEMCMTGLDKEKASVFYKNESSSAGSMTDNSGIRKILPQSQICDFEFEPCGYSMNSVEGDAISTIHVTPEDGFSYASFEAVGYDFTTMDLSHLVSKVLTCFEPKQFSVAVHSSVAQKSYDSGLSVDLEDYGCRETTIELLGEERGTVMYQSFEKLGRYCGSPRSTLKCEWSSSSSCTSEDEKEEGI

SEQ ID NO: 4414 - protein, 367 aa, Brassica juncea
MALSAIGFEGYEKRLEVSFFEPSFFQDSKGLGLRALTRSQLDEILTPAACEIVSSLSNDHLDSYVLSESSFFVYPYKVIIKTCGTTKLLLSIPPLLKLAGELSLSVKSVKYTRGSFLCPGGQPFPHRSFSEEVSVLDGHFTKLGLNSVAYLMGNDDENKKWHVYAASAQTSSDCNNNVYTLEMCMTGLDKEKASVFYKNETGGENGSMTDNSGIRKILPKSQICDFEFEPCGYSMNSVEGDAISTIHVTPEDGFSYASFEAVGYDFNTLDLSQLVTRVLSCFEPKQFSVAVHSSVGSNAYKPEISVDLEDYGCRERTFESLGEESGTVMYQTFEKLGKYCGSPRSTLKCEWSSNNSCSSEDEKDEGI

SEQ ID NO: 4415 - protein, 368 aa, Brassica juncea
MSLSAIGFEGLRERLEVSFFEPSLFLDTHGKGLRALSKSQIDEILAPAECTIVSSLSNDELDSYVLSESSLFIFPYKIIIKTCGTTKLLLSIEPLLRLAGGVSLEVKSVRYTRGSFLCPGGQPFPQRNLSEEVSVLDGHFAKMGLSSVAYLMGDDDETKKWHVYSASAPAKNSNGDNNVYTLEMCMSGLDKDKASVFFKNESSSAGSMTDNSGIRKILPQSQICDFEFEPCGYSMNSVEGDASSTIHVTPEDGFSYASFEAVGYDFTTMDLSQLVSRVLTCFEPKQFSVAVHSSVAQKSYDHSGLSVDLEDYGCRETTVGVSRRRERNSDVSEVREAGNVLWFSEIDLKCEWSSNSSCTSEDEKEEGI

SEQ ID NO: 4416 - protein, 358 aa, Malus x domestica
MAMEGSAIGFEGYEKRLEIAFFEPSIFLDPEGRGLRSLSKAQIDEFLDQAECTIVSSLSNDDVDSYVLSESSLFIHPYKMIIKTCGTTKLLRVIPTVLQLAETISLAVRSVKYTRGSFIFPGAQTYPHRSFSEEVSVLDSYFGKLGSGSRAYVMGRSDGPQKWHVYSATAESASFVEPVYTLEMCMTGLDRGKASVFYKSESSSATTMTNESGIRKILPDSDICDFEFDPCGYSMNSIEGAAISTIHVTPEDGFSYASFETAGYDLKDVNLNQLVERVLVCFQPKEFSIAVHANVVSKSLQQHSLVDLKGYCREESSHEELGLGGAIVYQRFLKTERCGSPRSTLKGCWREEEEEEDY

SEQ ID NO: 4417 - protein, 374 aa, Malus x domestica
MAVPVSAIGFEGYEKRLEVSFFEPGLFADPKGMGLRSLSKAQIDEILTPAECTIVSSLSNDDLDSYVLSESSLFVYPYKVIIKTCGTTKLLRSIPAILKLADSLSLAVKSVRYSRGSFIFPGAHPSPHRSFSEEVAVLDGHFGKLGLASKAYVMGSPDKTQKWHIYSASAELASLLWGSRQSGPTYTLEMCMTGLDRKRASVFYKSDASSAAGMTVESGIRNILPQSDICDFEFEPCGYSMNSIEGNAVSTIHVTPEDGFSYASFETVGYDFKDVNLTQLLYRVLDCFKPAEFSIALHTTSTAGEDLDAKCPLDLKGYCCGGSSYEGLGLGGAVMYHSFVKDDSGSQSPRSILKCCWSEDEKDEEVEEIGMAKI

SEQ ID NO: 4418 - protein, 356 aa, Glycine max
  unsure (1)..(356): unsure at all Xaa locations
MAMAVSAIGFEGFEKRLEISFFQPGLFADPEGRGLRALTKSQLGEILTPAACTIVSSLKNDNVDSYVLSESSLFVYAYKIIIKTCGTTKLLLAIPPILKFAEMLSLNVKSVNYTRGSFIFPSAQPYPHRNFSEEVAILDGYFGKLGAGSNAYILGGQDKAQNWHVYSASADSVTQCDNVYTLEMCMTGLDREKAQVFYKEQSASAAMMTVNSGIRKILPDSEICDFDFEPCGYSMNSVEGXAAVSTIHVTPEDGFSYASFETVGYDFKAVNLNEMVQRVLACFLPTEFSVAVHVDGASKSFEQTCFLDVKGYCREERSHEGLGMGGSVVYQKFGKTSDCGSPRSTLKCWNEEDEEE

SEQ ID NO: 4419 - protein, 356 aa, Glycine max
  unsure (1)..(356): unsure at all Xaa locations
MAMAVSAIGFEGFEKRLEISFFQPGLFADPEGMGLRALAKSQLDEILTPAACTIVSSLRNDHVDSYVLSESSLFVYAYKIIIKTCGTTKLLLAIPPILKFAEMLSLNVRSVNYTRGSFIFPGAQPYPHRNFSEEVAILDGYFGKLSAXGSNAYILGGQDKSQNWHVYSASADSVTPCDNVYTLEMCMTGLDREKAQVFYKEQSASAAIMTVNSGIRKILPDSEICDFDFEPCGYSMNSVEGAAVSTIHVTPEDGFSYASFETVGYDFKVVNLNEMVKRVLACFLPTEFSVAVHVDGASKLFDQTCFLDVKGYCREERSHEGLGMGGSLVYQKFAKTCDCGSPRSTLKCWKEEDEEE

SEQ ID NO: 4420 - protein, 372 aa, Glycine max
  unsure (1)..(372): unsure at all Xaa locations
LCSVLLPTAIVSLLKHGPWAVSAIGFEGFEKRLEISFFQPGLFADPXEGMGLRALAKSQLDEILTPAACTIVSSLRNDHVDSYVLSESSLFVYAYKIIIKTCGTTKLLLAIPPILKFAEMLSLNVRSVNYTRGSFIFPGAQPYPHRNFSEEVAILDGYFGKLSAGSNAYILGGQDKSQNWHVYSASADSVTPCDNVYTLEMCMTGLDREKAQVFYKEQSASAAIMTVNSGIRKILPDSEICDFDFEPCGYSMNSVEGAAVSTIHVTPEDGFSYASFETVGYDFKVVNLNEMVKRVLACFLPTEFSVAVHVDGASKLFDQTCFLDVKGYCREERSHEGLGMGGSLVYQKFAKTCDCGSPRSTLKCWKEEDEEE

SEQ ID NO: 4421 - protein, 360 aa, Glycine max
VKMAGSAIGFEGYEKRLEISFFEHGVFADPEGIGLRALSKDQLDEILKPAECSIVASLSNDYVDSLALSESSLFIYPYKIIIKTCGTTKLLLSIPVILKLADALDIAVKSVRYTRGSFIFPGAQSFPHRSFSEEVSVLDSYFSNLGSGSKAYVMGDPSKSQIWHIYSASAQTKGSSEVVYGLEMCMTGLEKESASVFFKENTSSAALMTENSGIRKILPQSDISDFEFDPCGYSMNGIEGGAISTIHVTPEDGFSYASFEAVGYDFDEMALGELVERVLACFRPAEFSVALHIDMHGEKLNKFPLDIKGYYCGERSYEELGVGGAVVYQSFVRCDGSTSPRSILKCCWSEDENEDEVREI

SEQ ID NO: 4422 - protein, 355 aa, Glycine max
MAMAVSAIGFEGFEKRLEISFFQPGLFADPEGRGLRALTKSQLGEILTPAACTIVSSLKNDNVDSYVLSESSLFVYAYKIIIKTCGTTKLLLAIPPILKFAEMLSLNVKSVNYTRGSFIFPSAQPYPHRNFSEEVAILDGYFGKLGAGSNAYILGGQDKAQNWHVYSASADSVTQCDNVYTLEMCMTGLDREKAQVFYKEQSASAAMMTVNSGIRKILPDSEICDFDFEPCGYSMNSVEGAAVSTIHVTPEDGFSYASFETVGYDFKAVNLNEMVQRVLACFLPTEFSVAVHVDGASKSFEQTCFLDVKGYCREERSHEGLGMGGSVVYQKFGKTSDCGSPRSTLKCWNEEDEEE

SEQ ID NO: 4423 - protein, 360 aa, Glycine max
VKMAGSAIGFEGYEKRLEISFFENGVFADPGGLGLRALSKDQLDEILKPAECTIVASLSNDYVDSYVLSESSLFVYPYKIIIKTCGTTKLLLSIPVILKLADALDIAVKSVRYTRGSFIFPGAQSFPHRSFSEEVSVLDSYFSNLGSGSKAYVMGDPSKSQIWHIYSASAQTKGSSEAVYGLEMCMTGLDKESASVFFKENTSSAALMTENSGIRKILPQSDISDFEFDPCGYSMNGIEGGAISTIHVTPEDGFSYASFEAVGYDFDEMALGELVERVLACFRPAEFSVALHIDMHGEKLNKFPLDIKGYYCGERSYEELGVGGAVVYQSFVRCDGSTSPRSILKCCWSEDENEDEVREI

SEQ ID NO: 4424 - protein, 335 aa, Glycine max
  unsure (1)..(335): unsure at all Xaa locations
XSARAGGLGLRALSKDQLDEILKPAECTIVASLSNDYVDSYVLSESSLFVYPYKIIIKTCGTTKLLLSIPVILKLADALDIAVKSVRYTRGSFIFPGAQSFPHRSFSEEVSVLDSYFSNLGSGSKAYVMGDPSKSQIWHIYSASAQTKGSSEAVYGLEMCMTGLDKESASVFFKENTSSAASMTENSGIRKILPQSDISDFEFDPCGYSMNGIEGSAISTIHVTPEDGFSYASFEAVGYDFNDMALGELVERILACFCPAEFSVALHIDMHGEKLNKFPLDIKGYYCGERSTEELGVGGAVVYQTFVRCDGSASPRSILKCCWSEDENEDEVREI

SEQ ID NO: 4425 - protein, 137 aa, Glycine max
  unsure (1)..(137): unsure at all Xaa locations
AKMAGSGIVFEGYEKRPQISFFEHGVFADPEGIGLRALSKDQLDEILKPAECSIVASLSNDYVDSYVLSESSLFIYPYKIIIKTCGTTKLLLSIPVILKMADALDIAVKSVRYTRGSFIFPGAQSFSHRNFXEEVFX

SEQ ID NO: 4426 - protein, 163 aa, Glycine max
  unsure (1)..(163): unsure at all Xaa locations
XAVSGFEGFEKRLELHFFGDDPAXXFPLGIRKLEFESLEQVLEAVQCTVVSAVGNSYFDAYVLSESSLFVYPTKIIIKTCGTTQLLKSILPLIHYAHHLGLTLSSCRYTRGSFIFPKAQPFPHTSFKDEVTYLQDTIPSSLCFRKASIMPSKSSSHSWHVFTX

SEQ ID NO: 4427 - protein, 166 aa, Glycine max
  unsure (1)..(166): unsure at all Xaa locations
MESKVGKKKSSSSKSFLYEAPLDYIIEDVRPHGGIKKFRSAAYSNCIRKPSXDSLGRVRTXPPYSAIGFEGYEKRLEISFFENGVFADPEGLGLRALSKDQLDEILKPAECTIVASLSNDYVDSYVLSESSLFIYPYKIIIKTCGTTKLLLSIPVXLKXADALDIA

SEQ ID NO: 4428 - protein, 354 aa, Phaseolus lunatus
MAVSAIGFEGYEKRLEICFSQPGIFADPEGRGLRVLTKSQLDEILTPAACTIVSSLSNEDVDSYVLSESSLFVYAYKIIIKTCGTTKLLLSIPPILKFADMLSLTVRSVTYTRGSFIFPGAQPHPHCSFTEEVAILNDYFGKLGSGSMAYIMGSPDKKQKWHIYSASADPLISSDTNVCTLEMCMTGLDREKAQIFYKEQSASAAIMTVNSGIRKILPKSDICDFDFEPCGYSMNSVEGDAVSTIHITPEDGFSYASFETVGYDFKVLNLNAMVDRVLSCFLPNEFSVAVRVDGASKPSEHMCFVDVKGYCREEWCHEELGMGGFVVYQKFVKISDCVSPRSTLKCWKDEVEEE

SEQ ID NO: 4429 - protein, 353 aa, Pisum sativum
MAVSAIGFEGFEKRLEISFSDPGLFSDPQGRGLRSLTKSQLDEILAPAECTIVSSLANEDVDSYVLSESSLFVYAYKLIIKTCGTTKLLLSIPPILKLADSISLNVRSVRYTRGSFIFPGAQSFPHRHFSEEVAVLDGFFGKLGSGSMAYILGGSDEAQNWHIYCASSDSVSPEGSVYTLEMCMTGLDREKASVFFKEQTGSAAEMTVNSGIRKILRNSEICDFDFEPCGYSMNSVEGSAVSTIHITPEDGFSYASFETAGYDLKAINLNEMVMRVLACFQPTEFSVAVHVDNASKSFEQGCLLDVKGYCCEEKSHQGLGMSGSVVYQKFLKTSYCGSPRSTLKCWKDEDEEE

SEQ ID NO: 4430 - protein, 353 aa, Vicia faba
MAVSAIGFEGFEKRLEISFSDPGLFSDPQGRGLRSLTKSQLDEILAPAECTIVSSLANEDVDSYVLSESSLFVYAYKIIIKTCGTTKLLLAIPPILKLAESISLDVRAVRYTRGSFIFPGAQSFPHRHFSEEVAVLDGFFGKLGSGSKAYIMGGSDEAQNWHVYCASADSVSPADSVYTLEMCMTGLDREKASVFFKQQTGSAAEMTVNSGIRKILPNSEICDFDFEPCGYSMNSVEGPAVSTIHITPEDGFSYASFETAGYDLKAMNLNEMVMRVLACFQPTEFSVAVHVDNASKSFEQGCLLDVKGYCCDEKSHQGLGMSGSVVYQKFVKASDCGSPRSTLKCWKDEDEEE

SEQ ID NO: 4431 - protein, 370 aa, Narcissus pseudonarcissus
MTIMNTSPIGFEGFEKRLEITFSEASAFVDPHGRGLRALSRSQIDSILDLARCTIVDHLSNKDFDSYVLSESSLFIYPHRLILKTCGTTKLLLSIPKILDLASELSLPIQSVKYSRGSFIFPEAQPTPHRNFSEEVSALDHFFGNLASGGNAYVIGDPSSPNRNWHIYYATQKPELPTVTLEMCMTGLDSEKASIFFNSPGNANNAQSKKMTKLSGISNIIPEMEICDFEFEPCGYSMNAICGSAHSTIHVTPEDGSSYASYEAMGFNPAELDFGGLVERVLECFGPADFSVAVTIFGGRGQAGSWGREVDSYGFRCVDLVEQELAGGGLLMYQSFTAGVGRMGSPRSTLHCWDGEEIEEKKAEDKKRRF

SEQ ID NO: 4432 - protein, 319 aa, Oryza sativa (indica cultivar-group)
MYEAPLGYSIEDVRPAGGVKKFQSAAYSNCSDQPAPMGVLSAADPPPVSAIGFEGYEKRLEITFSEAPVFADPDGRGLRALSRAQIDSVLDLARCTIVSELSNKDFDSYVLSESSLFIYSDKIVIKTCGTTKLLLTIPRILELAEGLSMPLAAVKYSRGMFIFPSAQPAPHRSFSEEVAVLNRYFGHLKSGGNAYVIGDPAKPGQKWHIYYATQHPEQPMVTLEMCMTGLDKEKASVFFKTSADGHTSCAKEMTKLSGISDIIPEMEICDFDFEPCGYSMNAIHGLAFSTIHVTPEDGFSYASYEVVGFDALLLLMATW

SEQ ID NO: 4433 - protein, 169 aa, Oryza sativa (indica cultivar-group)
MGVLSAADPPPVSAIGFEGYEKRLEITFSEAPVFADPDGRGLRALSRAQIDSVLDLARCTIVSELSNKDFDSYVLSESSLFIYSDKIVIKTCGTTRLLLTIPRILELAEGLSMPLAAVKYSRGMFIFPSAQPAPHRSFSEEVAVLNRYFGHLKSGGNAYVIGDPAKPGQ

SEQ ID NO: 4434 - protein, 450 aa, Oryza sativa (japonica cultivar-group)
MESKGGKKKSSSSRSLMYEAPLGYSIEDVRPAGGVKKFQSAAYSNCSDQPAPMGVLSAADPPPVSAIGFEGYEKRLEITFSEAPVFADPDGRGLRALSRAQIDSVLDLARCTIVSELSNKDFDSYVLSESSLFIYSDKIVIKTCGTTKLLLTIPRILELAEGLSMPLAAVKYSRGMFIFPSAQPAPHRSFSEEVAVLNRYFGHLKSGGNAYVIGDPAKPGQKWHIYYATQHPEQPMVTLEMCMTGLDKEKASVFFKTSADGHTSCAKEMTKLSGISDIIPEMEICDFDFEPCGYSMNAIHGSAFSTIHVTPEDGFSYASYEVVGFDASTLAYGDLVKRVLRCFGPSEFSVAVTIFGGHGHAGTWAKELNADAYKCNNMVEQELPCGGLLIYQSFDATEDVPVAVGSPKSVLHCFEAENMVNPAPVKEGKLGNLLPWGEDALEENDGVFDE

SEQ ID NO: 4435 - protein, 395 aa, Oryza sativa (japonica cultivar-group)
MAVLSVADSPPVSAIGFEGYEKRLEITFSEAPVFADPNGRGLRALSRAQIDSVLDLARCTIVSELSNEVFDSYVLSESSLFVYPYKIVIKTCGTTKLLLAIPRILELAEELSLPLEAVKYSRGTFIFPEAQPSPHKNFSEEVAVLNRYFGGLKSGGNAYVIGDPAKPGQKWHVYYATQHPEQPVVTLEMCMTGLDKKKASVFFKTSADGHTTYAKEMTKLSGISDIIPEMEVCDFDFEPCGYSMNAIHGPAFSTIHVTPEDGFSYASYEVMGFNPASLAYGDLVKRVLRCFGPLEFSVAVTIFGGRNHAGTWAKGLDVGAYSCSNMVEQELPSGGLLIYQSFTATAEIATGSPRSVLHCFADENTEKAGKMEALYWEDDAVEEIDGTEGKKMRSC

SEQ ID NO: 4436 - protein, 361 aa, Daucus carota
MSSEVSAIGFEGFEKRLEISFFEPSFFADPEGKGLRVLSKNQLDEFLGPAECTIVASLSNEHVDSYVLSESSLFVYAYKIIIKTCGTTKLLKSIPPILKLADSLSLTVRSVRYTRGCFIFPGAQSYPHRSFSEEVSVLDNYFGKLGSGSKAYIMGGSDKQQKWHVYSACAASTRTLDPVYTMEMCMTSLNRDKASVFYKTNSSSATSVTDNSGLRDILPNSRICDFEFDPCGYSMNAVEGPAVSTIHITPEDGFSYSSFEAVGYDPKSVNLSDLVARVLNCFQPGEFSIALQADIASELLEKTSSVHVKGYRVEEKTCEELGMDGSIVYQKFVKTTERCESPRSVLKCCWKEEEKEEKEYQ

SEQ ID NO: 4437 - protein, 357 aa, Catharanthus roseus
MALPASAIGFEGYEKRLEISFFESSFFADPDGKGLRALNKSQIDEILEPAECTIVDSLSNQYLDSYVLSESSLFVYPYKIIIKTCGTTKLLLSIPAILKLAESLSLSVRNVKYTRGSFIFPGAQSFPHRSFSEEVELLDNYFGKLGLESNAFIMGNPDQPQKWHVYSASVGSEQSSDPTYTLEMCMTGLDREKASVFYKSESSSAALMTTRSGIRKILPDSEICDFEFDPCGYSMNSIEEAAISTIHVTPEDGFSYASFEAAGYDLKAQNLGMMIERVLACFQPSEFSVAVHCDVTCKSLEQICSLELKEYSLDEKINEELGLGGSIIYKKFLRIDACGSPRSILKCCWKEDESEEE

SEQ ID NO: 4438 - protein, 362 aa, Datura stramonium
MEMDLPVSAIGFEGFEKRLEISFVEPGLFSDPNGKGLRSLSKAQLDEILGPAECTIVDNLSNDYVDSYVLSESSLFVYSYKIIIKTCGTTKLLLAIPPILRLAETLSLKVQDVRYTRGSFIFPGAQSFPHRHFSEEVAVLDGYFGKLAAGSKAVIMGNPDKTQKWHVYSASAGPVQSNDPVYTLEMCMTGLDREKASVFYKTEGSSAAHMTVRSGIRKILPNSEICDFEFEPCGYSMNSIEGAAVSTIHITPEDGFSYASFESVGYDLKTMELGPLVERVLACFEPAEFSIALHADVATKLLERVCCVDVKGYSLAEWSPEEFGKGGSIVYQKFTKTPYCASPKSVLKGCWKEEEEEKEEKE

SEQ ID NO: 4439 - protein, 361 aa, Nicotiana sylvestris
MDMALPVSAIGFEGFEKRLEISFFEPGLFADPNGKGLRSLSKAQLDEILGPAECTIVDSLSNDDVDSYVLSESSLFVYSYKIIIKTCGTTKLLLAIPPILKLAETLSLKVQDVRYTRGSFIFPGAQSFPHRHFSEEVAVLDGYFGKLAAGSKAVIMGSPDKAQKWHVYSASAGPIQSNDPVYTLEMCMTGLDREKASVFYKTEGSSAAHMTVRSGIRKILPNSEICDFEFEPCGYSMNSIEGAALSTIHITPEDGFSYASFEAVGYDMKTMKLGPLVERVLACFEPDEFSIALHADVATKLLERVCSVDVKGYSLAEWSPEEFGKGGSIVYQKFTRTPFCGSPKSVLKGCWKEDEEKEEKE

SEQ ID NO: 4440 - protein, 361 aa, Nicotiana tabacum
MDSALPVSAIGFEGFEKRLEISFFEPGLFADPNGKGLRSLSKAQLDEILGPAECTIVDSLSNDDVDSYVLSESSLFVYSYKIIIKTCGTTKLLLAIPPILKLAETLSLKVQDVRYTRGSFIFPGAQSFPHRHFSEEVAVLDGYFGKLAAGSKAVIMGSPDKAQKWHVYSASAGPIQSNDPVYTLEMCMTGLDREKASVFYKTEGSSAAHMTVRSGIRKILPNSEICDFEFEPCGYSMNSIEGAALSTIHITPEDGFSYASFEAVGYDMKTMKLGPLVERVLACFQPDEFSIALHADVATKLLERVCSLDVKGYSLAEWSPEEFGKGGSIVYQKFTRTPFCGSPKSVLKGCWKEDEEKEEKE

SEQ ID NO: 4441 - protein, 361 aa, Nicotiana tabacum
MDSALPVSAIGFEGFEKRLEISFFEPGLFADPNGKGLRSLSKAQLDEILGPAECTIVDSLSNDDVDSYVLSESSLFVYSYKIIIKTCGTTKLLLAIPPILKLAETLSLKVQDVRYTRGSFIFPGAQSFPHRHFSEEVAVLDGYFGKLAAGSKAVIMGSPDKAQKWHVYSASAGPIQSNDPVYTLEMCMTGLDREKASVFYKTEGSSAAHMTVRSGIRKILPNSEICDFEFEPCGYSMNSIEGAALSTIHITPEDGFSYASFEAVGYDMKTMKLGPLVERVLACFEPDEFSIALHADVATKLLERVCSVDVKGYSLAEWSPEEFGKGGSIVYQKFTRTPFCGSPKSVLKGCWKEDEEKEEKE

SEQ ID NO: 4442 - protein, 360 aa, Solanum tuberosum
MEMDLPVSAIGFEGFEKRLEISFVEPGLFADPNGKGLRSLSKAQLDEILGPAECTIVDNLSNDYVDSYVLSESSLFVYSYKIIIKTCGTTKLLLAIPPILRLAETLSLKVQDVRYTRGSFIFPGAQSFPHRHFSEEVAVLDGYFGKLAAGSKAVIMGSPDKTQKWHVYSASAGPVQSNDPVYTLEMCMTGLDREKASVFYKTEESSAAHMTVRSGIRKILPKSEICDFEFEPCGYSMNSIEGAAVSTIHITPEDGFSYASFESVGYNPKTMELGPLVERVLACFEPAEFSIALHADVATKLLERTCSVDVKGYSLAEWSPEEFGEGGSIVYQKFTRTPYCESPKSVLKGCWKEEEKEGKE

SEQ ID NO: 4443 - protein, 360 aa, Solanum tuberosum
MEMDLPVSAIGFEGFEKRLEISFVEPGLFADPNGKGLRSLSKAQLDEILGPAECTIVDNLSNDYVDSYVLSESSLFVYSYKIIIKTCGTTKLLLAIPPILRLAETLSLKVQDVRYTRGSFIFPGAQSFPHRHFSEEVAVLDGYFGKLAAGSKAVIMGSPDKTQKWHVYSASAGSVQSNDPVYTLEMCMTGLDREKASVFYKTEESSAAHMTVRSGIRKILPKSEICDFEFEPCGYSMNSIEGAAVSTIHITPEDGFTYASFESVGYNPKTMELGPLVERVLACFEPAEFSVALHADVATKLLERICSVDVKGYSLAEWSPEEFGEGGSIVYQKFTRTPYCESPKSVLKGCWKEEEKEGKE

SEQ ID NO: 4444 - protein, 288 aa, Solanum tuberosum
  unsure (1)..(288): unsure at all Xaa locations
XSLFVYSYKIIIKTCGTTKLLLAIPPILRLAETLSLKVQDVRYTRGSFIFPGAQSFPHRHFSEEVAVLDGYFGKLAAGSKAVIMGSPDKTQKWHVYSASAGSVQSNDPVYTLEMCMTGLDREKASVFYKTEESSAAHMTVRSGIRKILPKSEICDFEFEPCGYSMNSIEGAAVSTIHITPEDGFTYASFESVGYNPKTMELGPLVERVLACFEPAEFSVALHADVATKLLERICSVDVKGYSLAEWSPEEFGEGGSIVYQKFTRTPYCESPKSVLKGCWKEEEKEGKE

SEQ ID NO: 4445 - protein, 362 aa, Ipomoea batatas
MALSTSAIGFEGYENRLEISFFEAGIFSDPEGRGLRALSKEQLDKVLKPAECTIVSSLSNNEVDSYVLSESSLFVYPYKIIIKTCGTTKLLLSIPPILELADGLSLKVKSVKYTRGSFNFPEVQPYPHRNFSEEVAILDSYFGKLSTGSKAYVMGGAGKQQQWHVYSASAESAENTFPIYTLEMCMTGLDKKSASVFFKTQSSSAAVMTDASGIRKILPGSEICDFDFEPCGYSMNAVEGGAISPIHVTPEDGFSYASFEAMGYDFKDVNLDALIQRVLSCFQPAEFSVALHCDSIGEKLDSVFKLDVKGYACGERSYEGLNKGGSIMYCGFTSTGSCGSPRSTLLCCWSENEDEEGEKKHF

SEQ ID NO: 4446 - protein, 361 aa, Helianthus annuus
MTSAIGFEGFEKRLEISFFNPGPSVDPVARGLRSLTKNQLDKFLAPAECTIVSSLSNDLLDSYVLSESSLFVYPYKIIIKTCGTTKLLLSIPHILELSGELSLTVQSVRYTRGSFIFPGAQTFPHRSFTEEVMVLDSHFGKLGMCSNAYVMGGAEKDQKWHVYSASAESANLVTQTAPVYTLEMSMTGLSKRNASVFFKSESSSAAVMTEDSGIRKILPESQICDFDFDPCGYSMNAIEGDAISTIHVTPEDGFSYASFEAVGYDFKSMGLTVLIERVLACFEPSEFSVALHGNENVVKDLNLENNDVNVKGYNVEETKFEVLGGEGGSMVYYGFARGGSSCGSPRSTLHRCWSETENEEE

SEQ ID NO: 4447 - protein, 385 aa, Dictyostelium discoideum
MENNNDYKNRSTEIFNEADAGFVYQSNSNDYSDGFEGPEKKLDIRFGPISKGSVKSIAGSPSKVGLRTIDKEKWQTVLDSARCTIISQTSNDHMDSYVLSESSLFVYPRRAMIKTCGTTTLLHLIAKMVQVGKECGLEVEMVVFSRKNLNQPSKQVFPHCSFSDEVNFLNKIFDGQAYVMGDVNKDHWNLYIADFRKNPTLQRTEQTFEVMMHDLDETVMKQFFKREGVSAWDTTVNSGIADLLPGSMIDDFQFDPCGYSMNGLLNEFYWTIHITPESHCSYVSFDTNVALADYNQLLAKVLNVFKPGRFTAALYAEDGAPCGDPYTAFDVNVPSYAIQNKTVHGFDGGYDVVVSNYQQLDKKVNFSNDDLIQSIESTNIDLIQV

SEQ ID NO: 4448 - protein, 453 aa, Oryza sativa
  unsure (1)..(453): unsure at all Xaa locations
MESKGGKKKSSSSRSLMYEAPLGYSIEDVRPAGGVKKFQSAAYSNCSDQPAPMGVLSAADPPPVSAIGFEGYEKRLEITFSEAPVFADPDGRGLRALSRAQIDSVLDLARCTIVSELSNKDFDSYVLSESSLFIYSDKIVIKTCGTTKLLLTIPRILELAEGLSMPLAAVKYSRGMFIFPSAQPAPHRSFSEEVAVLNRYFGHLKSGGNAYVIGDPAKPGQKWHIYYATQHPEQPMVTLEMCMTGLDKEKASVFFKTSADGHTSCAKEMTKLSGISDIIPEMEICDFDFEPCGYSMNAIHGSAFSTIHVTPEDGFSYASYEVVGFDASTLAYGDLVKRVLRCFGPSEFSVAVTIFGGHGHAGTWAKELNADAYKCNNMVEQELPCGGLLIYQSFDATEDVPVAVGSPKSVLHCFEAENMVNPAPVKEAWMRCLAAMXYAHMPRLEGDQEXDVA

SEQ ID NO: 4449 - protein, 398 aa, Oryza sativa
MGVLSAADPPPVSAIGFEGYEKRLEITFSEAPVFADPDGRGLRALSRAQIDSVLDLARCTIVSELSNKDFDSYVLSESSLFIYSDKIVIKTCGTTKLLLTIPRILELAEGLSMPLAAVKYSRGMFIFPSAQPAPHRSFSEEVAVLNRYFGHLKSGGNAYVIGDPAKPGQKWHIYYATQHPEQPMVTLEMCMTGLDKEKASVFFKTSADGHTSCAKEMTKLSGISDIIPEMEICDFDFEPCGYSMNAIHGSAFSTIHVTPEDGFSYASYEVVGFDASTLAYGDLVKRVLRCFGPSEFSVAVTIFGGHGHAGTWAKELNADAYKCNNMVEQELPCGGLLIYQSFDATEDVPVAVGSPKSVLHCFEAENMVNPAPVKEGKLGNLLPWGEDALEENDGVFDE

SEQ ID NO: 4450 - protein, 398 aa, Oryza sativa; identical to SEQ ID NO: 4449

SEQ ID NO: 4451 - protein, 398 aa, Oryza sativa
MGVLSAADPPPVSAIGFEGYEKRLEITFSEAPVFADPDGRGLRALSRAQIDSVLDLARCTIVSELSNKDFDSYVLSESSLFIYSDKIVIKTCGTTKLLLTIPRILELAEGLSMPLAAVKYSRGMFIFPSAQPAPHRSFSEEVAVLNRYFGHLKSGGNAYVIGDPAKPGQKWHIYYATQHPEQPMVTLEMCMTGLDKEKASVFFKTSADGHTSCAKEMTKLSGISDIIPEMEICDFDFEPCGYSMNAIHGLAFSTIHVTPEDGFSYASYEVVGFDASTLAYGDLVKRVLRCFGPSEFSVAVTIFGGHGHAGTWAKELNADAYKCNNMVEQELPCGGLLIYQSFDATEDVPVAVGSPKSVLHCFEAENMVNPAPVKEGKLGNLLPWGEDALEENDGVFDE

SEQ ID NO: 4452 - protein, 398 aa, Oryza sativa; identical to SEQ ID NO: 4451

SEQ ID NO: 4453 - protein, 549 aa, Oryza sativa
MKSSYFRYECQQIDALMESKGGKKKSSSSRSSLMYEAPLGYSIEDLRPAGGIKKFRSAAYSNLLPSDREGHQSCFLSSSSLASSFETMAVLSVADSPPVSAIGFEGYEKRLEITFSEAPVFADPNGRGLRALSRAQIDSVLDLARCTIVSELSNEVFDSYVLSESSLFVYPYKIVIKTCGTTKLLLAIPRILELAEELSLPLEAVKYSRGTFIFPEAQPSPHKNFSEEVAVLNRYFGGLKSGGNAYVIGDPAKPGQKWHVYYATQHPEQPVVTLEMCMTGLDKKKASVFFKTSADGHTTYAKEMTKLSGISDIIPEMEVCDFDFEPCGYSMNAIHGPAFSTIHVTPEDGFSYASYEVMGFNPASLAYGDLVKRVLRCFGPLEFSVAVTIFGGRNHAGTWAKGLDVGAYSCSNMVEQELPSGGLLIYQSFTATAEIATGSPRSVLHCFADENTEKAGKMEALYWEDDAVEEIDGTEGNELSTLYADLILCTNTTAIGKYDFCSAPITVLHLSVTQVVLQQGLRQMRSDFSYCHFMAKRAGMQQQQQQQLQ

SEQ ID NO: 4454 - protein, 395 aa, Oryza sativa; identical to SEQ ID NO: 4435

SEQ ID NO: 4455 - protein, 319 aa, Oryza sativa; identical to SEQ ID NO: 4432

SEQ ID NO: 4456 - protein, 502 aa, Oryza sativa
  unsure (1)..(502): unsure at all Xaa locations
EFPAIFPLFCCNKSPLAGCFLNLFPCLLRSLLSCLVHCSLQHLIKCRCPWLILGALPLPSPIGFEGYEKRLEITLSDAPVFVDPCGRGLRALSREQIDSFLDLAKCTIVSHLSNKHFDSYVLSESSLFVYPHKGVLKTCGTTKLLLSIPRILELAAELSLPVLSVKYSRGMFIFPGAQPSPHRSFLEEVSVLNSFFGGLKSGGNAYVIGDAFKPKKKWHVYYATEEPXEQPMVTLEMCMTGLDAKKAEVFFKDSTDGSCSSAKEMTMFSGISEIIPEMEICDFEFDPCGYSMNGIYGPAVSTIHVTPEEGFSYASYEAMNFNPSSLVYDDLIKKVLACFCPSDFSVAVTIFGGHGFAKSWAKGAEVDSYMCDDLVEQELPGGGVLMYQSFTAVTPGAVSPRSTLDGWNSDGAEMVGKEMSVCWEGEKAAKKKDADAXEIGSSSTSSCKFDSSEVSETPYLVLLLQFRLSSWLGYRQSICYLFIVLLYLSAQISALDGLLRLP

SEQ ID NO: 4457 - protein, 414 aa, Oryza sativa
MPPLNSTRSITTITTYISSSSSSSDRSIVINLPPLLGTSLICIVYKLNRVAPHALDRSRRRTIVINGFLRGFEKRLELVFELPASGGEVARHGLRLLPAEALREVLDAAQCAVVSAAGNAAADAYVLSESSMFVYPGRVVLKTCGTTPLLRAVPVLLRAAAALRLRLRSCRYSRGEYLFPEAQPFPHAHFADEVAYLDAALPRELLRFRRSAVMPSSSSSSPGASHRWHVYSASSSASSSDADVTAEVCMTELDRGMAARFYQRPGDGRTSHAIGDEMTAASGIGGVVARSLVCAYAFAPCGYSMNALDGARYATVHVTPEDGHCYASFECATDDAAAALAAIRRAVAAFRPATVSVSISHTSSAASSLCTPVAEALEPLGLACHCRAAEVFPGAGTVTYQTFTAPATKHEHDN

SEQ ID NO: 4458 - protein, 398 aa, Oryza sativa
MGDLSAADPPPVSAIGFEGYEKRLEITFSEAPVFADPDGRGLRALSRAQIDSVLDLARCTIVSELSNKDFDSYVLLSPACLSILIKIVIKTCGTTKLLLTIPRILELAEGLSMPLAAVKYSRGMFIFPSAQPAPLRSFSEEVAVLNRYFGHLKSGGNAYVIGDPAKPGQKWHIYYATQHPEQPMVTLEMCMTGLDKEKASVFFKTSADGHTSCAKEMTKLSGISDIIPEMEICDFDFEPCGYSMNAIHGSAFSTIHVTPEDGFSYASYEVVGFDASTLAYGDLVKRVLRCFGPSEFSVAVTIFGGHGHAGTWAKELNADAYKCNNMVEQELPCGGLLIYQSFDATEDVPVAVGSPKSVLHCFEAENMVNPAPVKEGKLGNLLPWGEDALEENDGVFDE

SEQ ID NO: 4459 - protein, 169 aa, Oryza sativa; identical to SEQ ID NO: 4433

SEQ ID NO: 4460 - protein, 391 aa, Triticum aestivum
MAAPTSAIGFEGYEKRLDITFSEASIFADPHGRGLRALSRAQIDSVLDLARCTIVSELSNKDFDSYVLSESSLFIYSQKIVIKTCGTTMLLLTIPRILELAEELCMSLAAVKYSRGMFIFPGAQPAPHRSFSEEVDVLNRYFGHLKSGGNAYVIGDPAKPGQKWHIYYATEQPEQPMVTLEMCMTGLDKKKASVFFKTSADGHVSCAKEMTKLSGISDIIPEMEVCDFDFEPCGYSMNAINGSAFSTIHVTPEDGFSYASYEVMGMDASALAYGDIVKRVLRCFGPSEFSVAVTIFGGRGHAATWGKKLDAEAYDCNNVVEQELPCGGVLIYQSFAANEEVAVSAGSPRSVFHCFEAETVESHPLVKEGKLANLLAWRAEDSLEEGVVLCE

SEQ ID NO: 4461 - protein, 392 aa, Triticum aestivum
MAAPTSAIGFEGYEKRLKITFSEASIFADPHGRGLRALSRAQIDSVLDLARCTIVSELSTKDFDSYVLSESSLFIYSQKIVIKTCGTTMLLLTIPRILELAEELCMPLAAVKYSRGMFIFPGAQPAPHRSFSEEVDVLNRYFGHLKSGGNAYVIGDPAKPGQKWHIYYATEQPEQPMVTLEMCMTGLDKKKASVFFKTQADSHVSCAKEMTKLSGISDIIPEMEVCDFDFEPCGYSMNAINGSAVSTIHVTPEDGFSYASYEVMGMDASALAYGDIVKRVLRCFGPSEFSAAVTIFGGRGHAATWGKKLDAEAYDCNNVVEQELPCGGVLIYQSFTVNEEVAVSAGSPRSVFHCFEAESVHSHPLVKEGKLANLLAWRAEEDSLEEGAVLCE

SEQ ID NO: 4462 - protein, 392 aa, Triticum aestivum
MAAPTSAIGFEGYEKRLEITFSEASIFADPHGRGLRALSRAQIDSVLDLARCTIVSELSNKDFDSYVLSESSLFIYSQKIVIKTCGTTMLLLTIPRILELAEELCMPLAAVKYSRGMFIFPGAQPAPHRSFSEEVDVLNRYFGHLKSGGNAYVIGDPAKPGQKWHIYYATEQPEQPMVTLEMCMTGLDKKKASVFFKTQADGHVSCAKEMTKLSGISDIIPEMEVCDFDFEPCGYSMNAINGSAVSTIHVTPEDGFSYASYEVMGMDASALAYGDIVKRVLRCFGPSEFSVAVTIFGGRGHAATWGKKLEAEAYDCNNVVEQELPCGGVLIYQSFAANEEVAVSAGSPRSVFHCFEAESVQSHPLVKEGKLANLLAWRAEEDSLEEGAVLCE

SEQ ID NO: 4463 - protein, 392 aa, Triticum aestivum
MAAPTSAIGFEGYEKRLEITFSEASIFADPHGRGLRALSRAQIDSVLDLARCTIVSELSNKDFDSYVLSESSLFIYSQKIVIKTCGTTMLLLTIPRILELAEELCMPLAAVKYSRGMFIFPGAQPAPHRSFSEEVDVLNRYFGHLKSGGNAYVIGDPAKPGQKWHIYYATEQPEQPMVTLEMCMTGLDKKKASVFFKTQADGHVSCAKEMTKLSGISDIIPEMEVCDFDFEPCGYSMNAINGSAVSTIHVTPEDGFSYASYEVMGMDASALAYGDIVKRVLRCFGPSEFSVAVTIFGGRGHAATWGKKLDAEAYDCNNVVEQELPCGGVLIYQSFAANEEVAVSAGSPRSVFHCFEAESVHSHPLVKEGKLANLLAWRAEEDSLEEGAVLCE

SEQ ID NO: 4464 - protein, 392 aa, Triticum aestivum
MAAPTSAIGFEGYEKRLEITFSEASIFADPHGRGLRALSRAQIDSVLDLARCTIVSELSNKDFDSYVLSESSLFIYSQKIVIKTCGTTMLLLTIPRILELAEELCMPLAAVKYSRGMFIFPGAQPAPHRSFSEEVDVLNRYFGHLKSGGNAYVIGDPAKPGQKWHIYYATEQPEQPMVTLEMCMTGLDKKKASVFFKTQADSHVSCAKEMTKLSGISDIIPEMEVCDFDFEPCGYSMNAINGSAVSTIHVTPEDGFSYASYEVMGMDASALAYGDIVKRVLRCFGPSEFSAAVTIFGGRGHAATWGKKLDAEAYDCNNVVEQELPCGGVLIYQSFTVNEEVAVSAGSPRSVFHCFEAESVHSHPLVKEGKLANLLAWRAEEDSLEEGAVLCE

SEQ ID NO: 4465 - protein, 399 aa, Triticum aestivum
  unsure (1)..(399): unsure at all Xaa locations
LLFSDQQSLFSLYQPSETMAGSAIGFEGYEKRLEITFSEAPVFTDPNGRGLRALSRAQIDSVLDLAKCTIVSELSNEKFDSYVLSESSLFVYPYKVVIKTCGSTKLLLAIPRVLELAEELSLPLAAVKYSRGTFIFPEAQPSPHKNFSDEVAFLNGYFGGLKSGGNAYVIGDPAKPGQKWHVYYATQQPEQPMVNLEMCMTGLDKKKASVFFKTSADGYTSCAKEMTKLSGISEIIPEMEICDFDFEPCGYSMNAIHGSAFSTIHVTPEDGFSYASYEVMGLDPASMAYGDLVKRVLRSFGPSEFSVAVTIFGGRNLAGTWGERLNVGVYDSTNMVVQELPDGGALIYQSFTAVGEDSTGSPRSVLNCNVHGNLESGSKMDAFLCWEDDAAQEKDERGX

SEQ ID NO: 4466 - protein, 458 aa, Triticum aestivum
  unsure (1)..(458): unsure at all Xaa locations
MESKGGKKSSSSRSSLMYEAPLGYSIEDVRPAGGIEKFRSAAYSNCSRKPSXXSLSCPLSLFSLYHPSEITVLWLAGYVRPVEITFSEAPVFTDRNGWGXLRALSRARIDSVLDLAKCSTVSELSNEKFDSYVLSESSLFVYPYKVVIKTCGTTKLLLAIPRVLELAEELSLPLAAVKYSRGTFIFPEAQPSPHKNFSAEVAFLNGFFGGLKSGGNAYVIGDPAKPGQKWHVYYATQQPEQPVVNLEMCMTGLDKKKASIFFKTSDDGHTSCAKEMTKLSGISEIIPEFQRWRSDFEPCGHVXYSMNAIHGPAFSTIHVTPEDGFSYASYEVMGFDPASLAYGDLVEKIXFGPSEFSVAVTIFGGHSLAGTWGERLNVGIYDSTNMVVQELPDGGALIYQSFTAVGEXXFTGSPRSVLNCNVDGNLVTGCKMDAFLCWEDDAAQEKDERGAGKKMKSS

SEQ ID NO: 4467 - protein, 217 aa, Triticum aestivum
  unsure (1)..(217): unsure at all Xaa locations
MESKGGKKSSSSSSLMYEAPLGYSIEDVRPAGGAKKFSAAYSNCAKKPSXXIVXGIPFPXFKIFMQFYSXLFSPTNLSGLLHDNPSSLVLLPLFLSALLSDSVLDLARCTIVSELSNKDFDSYVLSESSLFIYSQKIVIKTCGTTMLLLTIPRILELAEELCMPLAAVKYSRGMFIFPGAQPAPHRSFSEEVDVLNRYFGHLKSGGNAYVIGDPAKX

SEQ ID NO: 4468 - protein, 120 aa, Triticum aestivum
  unsure (1)..(120): unsure at all Xaa locations
GPIPSFPPSSSCTRIPPTPTKTFDSYVLSESSLFIYSQKIVIKTCGTTMLLLTIPRILELAEELCMPLAAVKYSRGMFIFPGAQPAPHRSFSEEVDVLNRYFGHLKSGGNAYVIGDPAKX

SEQ ID NO: 4469 - protein, 139 aa, Triticum aestivum
  unsure (1)..(139): unsure at all Xaa locations
MAVLQVAAAAPPPVSAIGFEGYEKRLEISFSEAPVFADPNGRGLRALSRDQIDSVLDLARCTIVSELSNEDFDSYVLSESSLFVYPYKMVIKTCGTTKLLLAIPRILELAKELSLPLSAVKYSRGTFIFPDAQPSPHKX

SEQ ID NO: 4470 - protein, 128 aa, Triticum aestivum
  unsure (1)..(128): unsure at all Xaa locations
MAAPTSAIGFEGYEKRLEITFSEASIFADPHGRGLRALSRAQIDSVLDLARCTIVSELSNKDFDSYVLSESSLFIYSQKIVIKTCGTTMLLLTIPRILELAEELCMPLAAVKYSRGMFIFPGAQPAPX

SEQ ID NO: 4471 - protein, 182 aa, Triticum aestivum
  unsure (1)..(182): unsure at all Xaa locations
MAAPTSAIGFEGYEKRLEITFSEASIFADPHGRGLRALSRAQIDSVLDLARXTIVSELSNKDFDSYVLSESSLFIYSQKNGIKTCGTTMXLLTIPKILELAEXLCMPLLXXKYSRGMXXXPGAQAAPXKSFSEEXDVLXXFFXHLXAGXNAYVIGDQRXWQKWHXYXATXQPDKXMXTWKMW

SEQ ID NO: 4472 - protein, 404 aa, Zea mays
  unsure (1)..(404): unsure at all Xaa locations
MAVLQVAAAAPPPVSVIGFEGFEKRLEISFSEAPVLADPSGRGLRALSRAQIDSVLDLARCTIVSELSNEDFDSYVLSESSLFVYPYKIVIKTCGTTKLLLAIPRILELAEELLLPLAAVKYSRGTFIFPEAQPSPHKNFADEVAFLNXRFFGGLKSGGNAYVIGDSAKPGQKWHVYYAAEHPEEPVVTLEMCMTGLDKKKASVFFKTTADGYSLCAXKEMTKLSGISDIIPEMXEICDFDFEPCGYSMNAVHGPALSTIHVTPEDGFSYASYEVMGFNPGSFSYGDLVKRVLRCFGPTEFSVAVTIFGDRDNAKTWGTKLDAEAYACSNMVEQVLPFGGLLIYQSFTVTAETTHGSPRSVLHDFAGDIVKNRSESDAXXWEADAVDESEERDVKKMKCXCGRR

SEQ ID NO: 4473 - protein, 446 aa, Zea mays
  unsure (1)..(446): unsure at all Xaa locations
MAVLSAAGAPPASAIGFEGYEKRLEITFSEAPVFVDPHGSGLRALSRSQIDSVLDLARCTIVSELSNKDFDSYVLSESSLFIYPLKIVIKTCGTTKLLLTIPRILELAEELSMPLAAVKYSRGTFIFPGAQPAPHRSFSEEVAVLNRYFGGLKSGGNAYVIGDAARPGQKWHIYYATEYPEQPMVNLEMCMTGLDTKKASVFFKTNADGNTTCAKEMTKLSGISEIIPEMEICDFDFEPCGYSMNAIHGSAFSTIHVTPEDGFSYASYEVMGLDATALSYGDLVKRVLGCFGPSEFSVAVTIFGGRGQAATWGKELGAEAYDCNNMVEQELPGGGLIIYQSFCAAEDAVASSPKSVLRCFDGENASPFVKDCKLANLVCLEEXLDAIEEKDGVLDMSKTGFWCRFASEFFLFISLRSRGCRLVSSQARLLVRRMSSINMCSYVATC

SEQ ID NO: 4474 - protein, 430 aa, Zea mays
  unsure (1)..(430): unsure at all Xaa locations
LLSSDQKISKTTSRLPPVAVCHLALKRWQSLQVAAAAPPPVSVIGFEGFEKRLEISFSEAPVLADPSGRGLRALSRAQIDSVLDLARCTIVSELSNEDFDSYVLSESSLFVYPYKIVIKTCGTTKLLLAIPRILELAEELLLPLAAVKYSRGXTFIFPEAQPSPHKNFADEVAFLNRFFGGLKSGGNAYVIGDSAKPXGQKWHVYYAAEHPEEPVVTLEMCMTGLDKKKASVFFKTTADGYSLCAKEMTKLSGISDIIPEMEICDFDFEPCGYSMNAVHGPALSTIHVTPEDGFSYASYEVMGFNPGSFSYGDLVKRVLRCFGPTEFSVAVTIFGDRDNAKTWGTKLDAEAYACSNMVEQVLPFGGLLIYQSFTVTAETTHGSPRSVLHDFAGDIVKNRSESDAXXWEADAVDESEERDVKKMKCXCGRR

SEQ ID NO: 4475 - protein, 318 aa, Zea mays
  unsure (1)..(318): unsure at all Xaa locations
MAAPTSAIGFEGYEKRLEITFSEASIFADPHGRGLRALSRAQIDSVLDLARCTIVSELSNKDFDSYVLSESSLFIYSQKIVIKTCGTTMLLLTIPRILELAEELCMPLAAVKYSRGMFIFPGAQPAPHRSFSEEVDVLNRYFGHLKSGGNAYVIGDPAKPGQKWHIYYATEQPEQPMVTLEMCMTGLDKKKASVFFKTSADGHVSCAKEMTKLSGISDIIPEMEVCDFDFEPCGYSMXNAINGSAFSTIHVTPEDGFSYASYEVMGMDASALAYGDIVKRVLRCFGPSEFSVAVTIFGGRGHAATWGKKLEAEAYDCN

SEQ ID NO: 4476 - protein, 404 aa, Zea mays
  unsure (1)..(404): unsure at all Xaa locations
MAVLQVAAAAPPPVSVIGFEGFEKRLEISFSEAPVLADPSGRGLRALSRAQIDSVLDLARCTIVSELSNEDFDSYVLSESSLFVYPYKIVIKTCGTTKLLLAIPRILELAEELLLPLAAVKYSRGTFIFPEAQPSPHKNFADEVAFLNRFFGGLKSGGNAYVIGDSAKPGQKWHVYYAAEHPEEPVVTLEXMTGLDKKKASVFFKTTADGYSLCAKEMTKLSGISDIIPEMEICDFDFEPCGYSMNAVHGPALSTIHVTPEDGFSYASYEVMGFNPGSFSYGDLVKRVLRCFGPTEFSVAVTIFGDRDNAKTWGTKLDAEAYACSNMVEQVLPSGGLLIYQSFTATGAATPGSPRSVLHDFAGDIVKPGDSGEADGPCWEADAVDESEEREVKKMKCXCCDELC

SEQ ID NO: 4477 - protein, 400 aa, Zea mays
  unsure (1)..(400): unsure at all Xaa locations
MAVLSAAGAPPASAIGFEGYEKRLEITFSEAPVFVDPHGSGLRALXSRSQIDSVLDLARCTIVSELSNKDFDSYVLSESSLFIYPLKIVIKTCGTTKLLLTIPRILELAEELSMPLAAVKYSRGTFIFPGAQPAPHRSFSEEVAVLNRYFGGLKSGGNAYVIGDAARPGQKWHIYYATEYPEQPMVNLEMCMTGLDTKKASVFFKTNADGNTTCAKEMTKLSGISEIIPEMEICDFDFEPCGYSMNAIHGSAFSTIHVTPEDGFSYASYEVMGLDATALSYGDLVKRVLRCFGPSEFSVAVTIFGGRGHAGTWGKALGAKVYDCNNMVEQELPGGGLLVYQSFCAAEDAVATSPKSVFHCFDGENVESAPPPMKDYKLANLLCWEEEADAMEEKAGVLDE

SEQ ID NO: 4478 - protein, 399 aa, Zea mays
MAVLSDADASPVSAIGFEGYEKRLEITFSEAPVFVDPHGRGLRALSRAQIDSVLDLARCTIVSELSNKDFDSYVLSESSLFIYPLKIVIKTCGTTKLLLTIPRILELAEELSMPLAAVKYSRGTFIFPGAQPAPHRSFSEEVAALNRYFGGLKSGGNAYVIGDPARPGQKWHVFYATEYPEQPMVNLEMCMTGLDKKKASVFFKTNADGNTTCAKEMTKLSGISEIIPEMEICDFDFEPCGYSMNAIHGSAFSTIHVTPEDGFSYASYEVMGLDATALSYGDLVKRVLRCFGPSEFSVAVTIFGGRGHAGTWGKALGAEVYDCNNMVEQELPGGGLLVYQSFCAAEDAVATSPKSVFHCFDGENVESAPPPMKKDYKLANLLCWEEEADAMEKAGVLDE

SEQ ID NO: 4479 - protein, 400 aa, Zea mays
MAVLSAADASPVSAIGFEGYEKRLEITFSEAPVFVDPHGRGLRALSRAQIDSVLDLARCTIVSELSNKDFDSYVLSESSLFIYPLKIVIKTCGTTKLLLTIPRILELAEELSMPLAAVKYSRGTFIFPGAQPAPHRSFSEEVAALNRYFGGLKSGGNAYVIGDPARPGQKWHVFYATEYPEQPMVNLEMCMTGLDKKKASVFFKTNADGNTACAKEMTKLSGISEIIPEMEICDFDFEPCGYSMNAIHGSAFSTIHVTPEDGFSYASYEVMGLDATALSYGDLVKRVLRCFGPSEFSVAVTIFGGRGHAGTWGKALGAEVYDCNNMVEQELPGGGLLVYQSFCAAEDAVATSPKSVFHCFDGENVESAPPPMKKDYKLANLLCWEEEADAMEEKAGVLDE

SEQ ID NO: 4480 - protein, 402 aa, Zea mays
  unsure (1)..(402): unsure at all Xaa locations
MAVLQAAAPPPVSVIGFEGFEKRLEISFSEAPVLADPSGRGLRALSRAQIDSVLDLARCTIVSELSNDDFDSYVLSESSLFVYPYKIVIKTCGTTKLLLAIPRILELAEELLLPLAAVKYSRGTFIFPXEAQPSPHKNFADEVAFLNRFFGGLKSGGNAYVIGDSAKPGQKWHVYYAAEHPEEPVVTLEMCMTGLDKKKASVFFKTTADGYSLCAKEMTKLSGISDIIPEMEICDFDFEXPCGYSMNAVHGPALSTIHVTPEXDGFSYASYEVMGFNPGSFSYGDLVKRVLRCFGPTEFSVTVTIFGDRDNAKTWGTKLDAEAYACSNMVEQVLPFGGLLIYQSFTVTAETTHGSPRSVLHDFAGDIVKNRSESDAXXWEADAVDESEERDVKKMKCXCGRR

SEQ ID NO: 4481 - protein, 400 aa, Zea mays; identical to SEQ ID NO: 408

SEQ ID NO: 4482 - protein, 400 aa, Zea mays; identical to SEQ ID NO: 408

SEQ ID NO: 4483 - protein, 525 aa, Zea mays
  unsure (1)..(525): unsure at all Xaa locations
MGPGAGTSRPAGRDPKKSRPTYSFSPPSSCPTQSTSSPHLLPLGRSFQRARWSWSRRRSRSGRTFKEIAFVDALMESKGGKKSSSSSSNFMYEAPLGYKIEDVRPAGGIKKFQTAAYSNCVRQPLAMSSADSCVSSPASPIGFEGYEKRLEITFSDAPVFEDPCGRGLRALSREQIDSFLDLARCTIVSQLSNESFDSYVLSESSLFVYPHKVVLKTXCGTTKLLLAIPRILELAAGLSLPLLSAKYSRGTFIFPGAQPAPHRSFSEEVSVLNAFFGNLKSGGNAYLIGEPFKPNKKWHVYYATEEPERPMVTLEMCMTELDVKKAAVFFKNSTGGSCTSAKEMTKLSGIHEIIPEMEICDFEFDPCGYSMNGVFGPAASTIHVTPEEGFSYASYEAMNFDPSSLVYSDVIRRVLAGFSPSDFSVAVTIFGGRGFAKSWATGADIDSYMCGDPVEQELPGGGLLMYQSFTAVPSGSVSPRSTLQTDXLEQRWNGDGLKXRDVYWLLECGEEGGEERFGCLKIWIT

SEQ ID NO: 4484 - protein, 400 aa, Zea mays
  unsure (1)..(400): unsure at all Xaa locations
MAVLSAADAPPASAIGFEGYEKRLEITFSEAPVFVXDPHGRGLRALSRSQIDSVLDLARCTIVSELSQXRDFDSYVLSESSLFIYPLKIVIKTCGTTKLLLTIPRILELAEELSMPLAAVKYSRGTFIFPGAQPAPHRSFSEEVAVLNRYFGGLKSGGNAYVIGDAARPGQKWHIYYATEYPEQPMVNLEMCMTGLDTKKASVFFKTNADGNTTCAKEMTKLSGISEIIPEMEICDFDFEPCGYSMNAIHGSAFSTIHVTPEDGFSYASYEVMGLDATALSYGDLVKRVLGCFGPSEXISVAVTIFGGRGQAGTWGKELGAEAYDCNNMVEQELPGGGILIYQSFCAAEDAVASSPKSVLRCFDGENAXXPFAKDCKLANLVCLEEXLDAIEEKDGVLDE

SEQ ID NO: 4485 - protein, 404 aa, Zea mays
  unsure (1)..(404): unsure at all Xaa locations
MAVLSAAGAPPASAIGFEGYEKRLEITFSEAPXVFVDPHGSGLRALSRSQIDSVLDLARCTIVSELSNKDFDSYVLSESSLFIYPLKIVIKTCGTTKLLLTIPRILELAEELSMPLAAVKYSRGTFIFPGAQPAPHRSFSEEVAVLNRYFGGLKSGGNAYVIGDAARPGQKWHIYYATEYPEQPMVNLEMCMTGXLDTKKASVFFKTNADGNTTCAKEMTKLSGISEIIPEMEICDFDFEPXCGYSMNAIHGSAFSTIHVTPEDGFSYASYEVMGLXDATALSYGDLVKRVLGCFGPXSEFSVAVTIFGGRGQAGTWGKELGAEAYDCNNMVEQELPGGGILXIYQSFCAAEDAVASSXPKSVLRCFDGENAXXPFAKDCKLANLVCLEEXLDAIEEKDGVLDE

SEQ ID NO: 4486 - protein, 412 aa, Zea mays
  unsure (1)..(412): unsure at all Xaa locations
MAVLSAADASPVSAIGFEGYEKXRLEITFSEAPXVFVDPHGXRGFACPSSAQIDSXVLDLARCTIVSELXSNKDFDSYVLSESSLXFIYPLKIVIKTCGTTKLLLTIPRILELAEELSMPLAAVKYSPXGTFIFPGAQPAPHRSFSEEVAALNRYFGGLKSGGNAYVIGDPARPGQKWHVFYATEYPEQPMVNLEMCMTGLDKKKASVFFKTNADGNTACAKEMTKLSGISEIIPEMEICDFDFEPCGYSMNAIHGXSAFSTIHVTPEXDGFSYASYEVMGLDATALSYGDLVKRVLRCFGPSEFSVAVTIFGGRGXHAGTWGKALGAEVYDCNNMVEQELPGGGLLVYQSFCAAEDAXVATSPKSVFHCFDGENRXESAPPPMKKDYKLANLLCWEEEADAMEEKAGVLDE

SEQ ID NO: 4487 - protein, 254 aa, Zea mays
  unsure (1)..(254): unsure at all Xaa locations
MAMSSADSCVSSPASPIGFEGYEKRLEITFSDAPVFEDPCGXRGLRALSREQIDSFLDLARCTIVSQLSNESFDSYVLSESSLFVYAHKVVLKTCGTTKLLLAIPRILELAAGLSLPLLSAKYSRGTFIFPGAQPAPHRSFSEEVSVLNAFFGNLKSGGNAYLIGEPFKPNKKWHVYYATEEPERPMVTLEMCMTELDVKKAAVFFKNSTGGSCTSAKEMTKLSGIHEIIPEMEICDFEFDPCGYSMNGVFGPA

SEQ ID NO: 4488 - protein, 371 aa, Zea mays
  unsure (1)..(371): unsure at all Xaa locations
MAVLSAAGAPPASAIGFEGYEKRLEITFSEAPVFVDPHGSGLRALSRSQIDSVLDLARKIVIKTCGTTKLLLTIPRXILELAEELSMPLAAVKYSRGTFIFPGAQPAPHRSFSEEVAVLNRYFGGLKSGGNAYVIGDAARPGQKWHIYYATEYPEQPMVNLEMCMTGLDTKKASVFFKTNADGNTTCAKEMTKLSGISEIIPEMEICDFDFEPCGYSMNAIHGSAFSTIHVTPEDGFSYASYEVMGLDATALSYGDLVKRVLGCFGPSEFSVAVTIFGGRGQAGTWGKELGAEAYDCNNMVEQELPGGGILIYQSFCAAEDAVASSPKSVLRCFDGENAXXPFAKDCKLANLVCLEEXLDAIEEKDGVLDE

SEQ ID NO: 4489 - protein, 304 aa, Zea mays
  unsure (1)..(304): unsure at all Xaa locations
CKLPVTKTIPRNHFLSSSTGCLSSCSKTIAVLQVVAAAPTPASAIGFEGYEKRLEISFYEAPVFADPNGRGLCALLRPXIYSISDHARCTVVSELSNEDFDSYVLSESSLFVYPYKILIKTCGTTKLLLGIPRILELAKELSLPLVATKYSRGTFIFPDAQPSPHKNFVDEVTFLNHFFDGLRFGGNAYVIGDSAKHKQKWHVYYATTEHXPEELVVTLEMCMTRLDKKRAYVFFKTSIDGYTSCAKDMTKPSVISDLLXVIAFYLLFLLNSSFKTKNIFKNLTRSQASTMSRLACMIWLVLVC

SEQ ID NO: 4490 - protein, 188 aa, Zea mays
  unsure (1)..(188): unsure at all Xaa locations
MAVLQVAAAAPPPVSVIGFEGFEKRLEISFSEAPVLADPSGRGLRALSRAQIDSVLDLARCTIVSELSNDDFDSYVLSESSLFVYPYKIVIKTCGTTKLLLAIPRILELAEELLLPLAAVKYSRGTFIFPEAQPSPHKNFAEEVAFLNRFFGGLKSGGNAYVIGDSAKPGQKWHVYYAAEHPEEPLIX

SEQ ID NO: 4491 - protein, 310 aa, Zea mays
  unsure (1)..(310): unsure at all Xaa locations
MMQATCDKNDSKKPLLVFLHWLSVTCSKTIAVLQVVAAAPTPASAIGFEGYEKRLEISFYEAPVFADPNGRGLCALLRPXIYSISDHARCTVVSELSNEDFDSYVLSESSLVGYPYKILIKTCGTTKLLLGIPRILELAKELSLPLVATKYSRGTFIFPDAQPSPHKNFVDEVTFLNHFFDGLRFGGNAYVIGDSAKHKQKWHVYYATTEHXPKELVVTLEMCMTRLDKKRAYVFFKTSIDGYTSCAKDMTKLSGISDLLXVKECVVTSGASSKAMALRVHGSWVWLVQRLLFAGVGEVPAELGGSGVQL

SEQ ID NO: 4492 - protein, 195 aa, Zea mays
  unsure (1)..(195): unsure at all Xaa locations
SCCQIFPPLAAAAARLPESAGTEELAEFXVENRFCLSHGRGLRALSRXQIDSVLDLARCTIVSELSNKDFDSYVLSESSLFIYPLKIVIKTCGTTKLLLTIPRILELAEELSMPLAAVKYSRGTFIFPGAQPAPHRSFSEEVAALNRYFGGLKSGGNAYVIGDPARPGQKWHVFYATEYPEQPMVNLEMCMTGLD

SEQ ID NO: 4493 - protein, 245 aa, Zea mays
  unsure (1)..(245): unsure at all Xaa locations
SLRLACFPVTKRYQRPLPVFLPWPVCHLALKRWAVLQVAAAAPPPVSVIGFEGFEKRLEISFSEAPVLADPSGRGLRALSRAQIDSVLDLARCTIVSELSNEDFDSYVLSEXSSLVVYPXYRFVIKTCGXTTKLLLAIPRILELAEELLLPLAAVKYSXRGTFIFPEAQPSPHKNFAEEVAFLNRFFGGLKSGGNAHVIGDSAKPGQKWHVYYAAEHPEEPLITLEMCMTGLDKKKASVFFKTLL

SEQ ID NO: 4494 - protein, 178 aa, Zea mays
  unsure (1)..(178): unsure at all Xaa locations
STGSPVLLLALLPPSPALGSDSPAPRAVLFVAEASPAXVIGFEGYEKRLEITFFEAPVFGDPHGRGLRALSRAQMDFVLDLARGTIVSELSNRDFDXYVLSEPSLFIYPLKIAIKTWGTTKFLFTIPRILELAEKLPMPLAAVKYSRGTLIFPGAQPAPHRSFFEEVVALNRYFGXXG

SEQ ID NO: 4495 - protein, 378 aa, Schizosaccharomyces pombe
MSPTLVVDQENSEEFNTSSFEGPEKLLELWFSAPIKTNLSAGEKANLGLKAVSRNDWDDMLAQAQCKVLSVVNSEEIDAYLLSESSMFVFAHKIILKTCGTTTLLASLPRLLEIASSVGFDRPLRIFYSRKNFLYPERQLAPHTSWEEEVRYLQLFFPSGCSYVVGPTNKNHWHLFSDLADDYSLLEDSLDPEDETLEVLMTDMSPERSLQFYAPSLDVVRSARGDDYVREKNNLSGGHILGSYVADESGVRDLCSTSDKKAVLDAFQFEPIGFSSNMIYKDRYATIHVTPQEHCSYASFETNVSQFQFGRSISETIEKTVKTFGANKFCLTLFQAKGASQEKHFSAKLKSFSSYKREEFIVYDFPGYDLIFASFTAV

SEQ ID NO: 4496 - protein, 369 aa, Dendrobium crumenatum
MACSPIGFEGYEKRLEITFSEAPLFVDPHGHGLRALTRPQIDSILEPAKCTIVSQLSNKHFDSYVLSESSLFVYPCKMILKTCGTTRLLLSIPVILDLAAELSLSVTAVKYSRGSFIFPGAQPAPHRSFSEEVAVLNQFFGGLGSGGNAYVIGNPAHPNLNWHVYYASEKPEQPMVTIEMCMTGLNTEKASIFFKNSVPRHESSAKEMTKRSGICDIIPEMKICDFEFDPCGYSMNGINKQALSTIHVTPEDGFSYASYEAMGFKPSAISYRNLIERVLRCFEPANFSVAVTIFGGRPFACSYGQKVSVNGYNCKNLVQQDLSGGGLLLYQSFKASSDGSASPRSILYCWEAEAEDEEENGVKCKKKLF

SEQ ID NO: 4497 - protein, 503 aa, Neurospora crassa
MSGLGVPAIPANYTFSPSEGTPYLTINHDVAADLDSTNAFEGPEKLLEVWFAPSAKALPAGVKEGGLKAVNPDSWTPMLDLVHCKVLSIINSENVDSYLLSESSMFVFPHKIILKTCGTTTLLLGLDLMLRIAAVEAGFPFHNVASLEDPKVAATPLRVFYSRKNFLFPQKQRGPHKSWRDEVTFLDNMFENGSAYMVGKMNGDHWYLYITSPTSSLTPPRTPTSSRGVSPSRRSKIPTGIVAPFGGVIENNADETLEILMTDLDPENAKKFYLEEATAIAKEKLFSKSEANGDASFDVFSSSGDCDADGQAILPEALTTEGHALGTVVSEACGLSAVYPTSTYPDARIDAYQFSPCGFSANGVVPPVAGADGTIPKSGHYFTVHVTPEPQCSFASFETNVPGGQNGRQTAEVIEQVVNIFRPGRFSVTLFEAKGALATTPGEDADDSRRSWGAAAKQRMERINGYRRVDRIVHDFEDYDLVFRYYEREDWVGGGGARMGEEF

SEQ ID NO: 4498 - protein, 382 aa, Leishmania donovani
MNVCSNTTKDPLTLMAMWGSMKGYNPEQGFSFEGPEKRLEVILRCTLETHVDGLRSLDDSVWSGVVGSLNAQIVSRESNEYINSYVLTESSLFVMKNRIILITCGTTTLLNSIPNILEAISAVRGELEWVSFMHKNYSFPWMQKGPHTSLADEFATLKQHFPTGKPYIFGPVDSDHYFLFCYDDIIRPCSSEDDTQLSMTMYGLDKEQTKHWFSDRFISTSAETAAIRAATHLDRVVDGTWTLHDLQFEPCGYSINAIRDEEYQTMHITPEDHCSFASYETNSRAANYSDRMKKVLGVFRPQRFTVIVFLDPESPVGKAYNEGKGIGVEPEYYPEYNLLHRTTNEFAPGYVAMKINYVRTAAVEETDTAVGGAEPGAEGGPD

SEQ ID NO: 4499 - protein, 392 aa, Leishmania infantum
MKHGNYSLATMNVCSNTTKDPLTLMAMWGSMKGYNPEQGFSFEGPEKRLEVILRCTLETHVDGLRSLDDSVWSGVVGSLNAQIVSRESNEYINSYVLTESSLFVMKNRIILITCGTTTLLNSIPNILEAISAVRGELEWVSFMHKNYSFPWMQKGPHTSLADEFATLKQHFPTGKPYIFGPVDSDHYFLFCYDDIIRPCSSEDDTQLSMTMYGLDKEQTKHWFSDRFISTSAETAAIRAATHLDRVVDGTWTLHDLQFEPCGYSINAIRDEEYQTMHITPEDHCSFASYETNSRAANYSDRMKKVLGVFRPQRFTVIVFLDPESPVGKAYNEGKGIGVEPEYYPEYNLLHRTTNEFAPGYVAMKINYVRTAAVEETVTAVGGAEAGAEGGPD

SEQ ID NO: 4500 - protein, 370 aa, Trypanosoma cruzi
MLSNKDPLSLMAMWGSVKGYDPNQGASFEGPEKRLEVIMRIIDETHSEGLHALGDEVWKGVVGSLNAQIVSKESNEYIRSYVLTESSLFVMRDRIILITCGTTTLLNAVPFVLDAVSDVRGEVEWVSFMHKNYSFPWEQKGPHLSMAEEFNTLRTYFPSGKPFIFGPVDSDHYFLFVYDDVIRPCETENDTQLSMTMYGLDRTQTKHWFSDRFISTGTETAAIRKATKLDKVADDSWKLHDLQFEPCGYSINTIRGAEYQTIHITPEDHCSFASYETNTPAVNYSERINTVLGVFAPIRFSVIVFIDPDSDVGRLYQKGQNVGVEAEYYPKYELQNRTVNEFAPGYVVMKMNYARRAEVTEKDSTDSVEE

SEQ ID NO: 4501 - protein, 370 aa, Trypanosoma cruzi
MLSNKDPLSLMAMWGSVKGYDPNQGASFEGPEKRLEVIMRITDETHSEGLHALGDGVWKGVVGSLNAQIVSKESNEYIRSYVLTESSLFVMRDRIILITCGTTTLLNAVPFVLDAVSDVRGEVEWVSFMHKNYSFPWEQKGPHLSMAEEFNTLRTYFPSGKPFIFGPVDSDHYFLFVYDDVIRPCETENDTQLSMTMYGLDRTQTKHWFSDRFISTGTETAAIRKATKLNKVADDSWKLHDLQFEPCGYSINTIRGAEYQTIHITPEDHCSFASYETNTPAVNYSERINTVLGVFAPIRFSVIVFIDPDSDVGRLYQKGQNVGVEAEYYPKYELQNRTVNEFAPGYVVMKMNYARRAEVAEKDSTDSVEE

SEQ ID NO: 4502 - protein, 370 aa, Trypanosoma brucei brucei
MSSCKDSLSLMAMWGSIARFDPKHERSFEGPEKRLEVIMRVVDGTHVSGLLAHDDDVWQKVIDAICAHIVSREFNEYIRSYVLSESSLFVMKDRVILITCGTITLLNCVPLICEAVSTVCGEVEWVSFMHKNYSFPWEQKGPHLSMAEEFKTLRSHFPSGQPFIFGPIDSDHYFLYLDSDVVQPSCSDDAQLSMTMYGLDRNQTKHWYSDKMLPTGPETAVIREATGLSEVVDDSWILHDLQYEPCGYSINAIRGSEYQTIHITPEEHCSFASYETNTCALNYSKCICGVLRVFDPERFSVIVFIDPDSAVGKSYHSGGTIGVEPEYYPNYEAHHRTVNEYTPGHWVLKVNYVKRAVGTVGTSAASGAKE

SEQ ID NO: 4503 - protein, 368 aa, Caenorhabditis elegans
MSATSATNFAVQTHPVKAPDEEYFFEGAEKLLELWFCSSTQNETRSLRIIPREEIDAMLDIARCKILHSKHNESIDSYVLSESSLFISDNRVILKTCGTTRLLAALPVIMQLAGAYAGLDQVQSVYYSRKNFLRPDLQPSLHKNFDAEVEYLDSFFVDGHAYCLGSLKQDRWYLYTFHREVEFPAHKQPDHTLEILMSDLDEEVLHKFTKDYAVDGNDCFMRAGIDKIIPAGADVHDELFDPCGYSMNAYMNDTDQYATIHVTPEKAFSFASFETNQDLVCLYSQTRKVLQCFRPNKILMTVFANDISEKGKDAQQQLWDRELPGYRRTNVQFVRLETETLVYAHFVRKASTGQDSSSSDEDDGERSD

SEQ ID NO: 4504 - protein, 365 aa, Onchocerca volvulus
MSTSTLSDGSLDEGTFAAEDVSGVIEDYFFEGAEKLLEIWFDKNQNGATSLRNIPYSELVSMLDIAQCRILHSKSNECMDSYVLSESSMFISDFRIILKTCGTTRLLHAIERILHIAKIYCNMDNVVSVFYSRKNFMHPEKQPYPHSSFETEVDYLEEHFAGGSAYCIGPQRQDRWFLYTMVTPQAVFPFPEHTLEILMNGLPEDVLSTFSPNVSKDGKDCRMKSAINTILPPDIVVHEELFSPCGYSLNGLIPHSDHYITIHVTPEPDFSYVSFETNQHTLNLCEQMLKVLEIFKPSKFLLTIFTNELSNEGKKMQKNLWDLKICGCRRTNLQFLELPTETLIYVQFERIKSAEQVTCKEVFDR

SEQ ID NO: 4505 - protein, 335 aa, Acyrthosiphon pisum
MATEDFFEGAEKLLEIWFGRQDGKFENGDLRKIPRKKYEDLLKAACCEVISYTSNDKIDAYVLSESSMFVTKRRFILKTCGTTTPIECIKPLLLNVHEFTGFDEVEDVFYSRKNFERPELQKDTYRNFKLEIESLDIMFKGTGVARCMCSSKTDDSWYLYALHPVECFGKEKQKPDQTLEILMTNLDPDVMQIFTKEQSANASQATQDSGKSELLPNMEIDDFLFEPCGYSMNGIAKEGHYMTIHITPQQEFSFVSFETNVPQSSYKELILKVLKTFQPEKCVLTMFTNEISPSNSNHKEFKYLTHLGEWQQDSNRTCSLKNHDLTVSFYSKYPS

SEQ ID NO: 4506 - protein, 347 aa, Drosophila melanogaster
MLENGSHFFEGVEKLLEIWFEESSNGDDDLRNISRSDWENVLSNVNCQIISTSKNDIIDAFVLSESSMFVSKRRWILKTCGTTTPLKCLGQLLKLAEANGYNVVADLFYSRKNFTRPEAQITPHQGFTEEVTYLDSIFPNGRSYCLGSMNLECWYLYTFSRSDIKITPQLISDEKNVDSDPDQTIEILMQDLDPETMSIFYKNKFNDANGATVKSGIDTILPTMHIDDFLFDPCGYSMNGINDKGEYMTIHITPENQFSYVSFETNVALSNYRKLINQVINTFKPGKFIVTIFANKCSLAYETMKELEVEYSQGSHWKRTDMQCCNFPSYNLLFAQYSHSEKTGDYL

SEQ ID NO: 4507 - protein, 347 aa, Drosophila melanogaster
MLENGSHFFEGVEKLLEIWFEESSNGDDDLRNISRSDWENVLSNVNCQIISTSKNDIIDAFVLSESSMFVSKRRWILKTCGTTTPLKCLGQLLKLAEANGYNVVADLFYSRKNFTRPEAQITPHQGFTEEVTYLDSIFPNGRSYCLGSMNLECWYLYTFSRSDIKITPQLISDEKNVDSDPDQTIEILMQDLDPETMSIFYKNKFNDANGATVKSGIDTILPTMHIDDFLFDPCGYSMNGINDKGEYMTIHITPENQFSYVSFETNVALSNYRKLINQVINTFKPGKFIVTIFANKCSLAYETMKELEVEYSQGSHWKRTDMQCCNFPSYNLLFAQYSHSEKTGDNL

SEQ ID NO: 4508 - protein, 347 aa, Drosophila melanogaster
MLENGSHFFEGVEKLLEIWFEESSNGDDDLRNISRSDWENVLSNVNCQIISTSKNDIIDAFVLSESSMFVSKRRWILKTCGTTTPLKCLGQLLKLAEANGYNVVADLFYSRKNFTRPEAQITPHQGFTEEVTYLDSIFPNGRSYCLGSMNLECWYLYTFSRSDIKISPQLITDEKNVDSDPDQTIEILMQDLDPETMSIFYKNKFNDANGATVKSGIDTILPTMHIDDFLFDPCGYSMNGINDKGEYMTIHITPENQFSYVSFETNVALSNYRKLINQVINTFKPGKFIVTIFANKCSLAYETMKELEVEYSQGSHWKRTDMQCCNFPSYNLLFAQYSHSEKTGDYL

SEQ ID NO: 4509 - protein, 138 aa, Drosophila melanogaster
MLENGSHFFEGVEKLLEIWFEESSNGDDDLRNISRSDWENVLSNVNCQIISTSKNDIIDAFVLSESSMFVSKRRWILKTCGTTTPLKCLGQLLKLAEANGYNVVADLFYSRKNFTRPEAQVGKKINCISNDFISYIFR

SEQ ID NO: 4510 - protein, 334 aa, Danio rerio
MEESSAHFFEGTEKLLEVWFSRQDEAKGTGDLRTIPRFEWDKLLENVHCLIISVTKTDKQEAYILSESSMFVSKRRFILKTCGTTLLLQALVPLLELAREYCGFDAIENFFYSRKNFMKPTHQEFPHRNFQEEVEFLSQIFPNGAAYCMGRLNSDCWYLFTLELPEFWENKQADQTLEVLMSDLDPAVMDQFYMKDGVSANDVTRMSGIRDLIPGSVIDATMFNPCGYSMNGMKTDGTYWTIHITPEPEFSYVSFETNLSQTSYDELICRVVDVFKPGKFVTTLFVNQSSKCRSVFSSAQKLESYRLLDRQLAHFNDYNFVFTSYAKSLQQKQS

SEQ ID NO: 4511 - protein, 335 aa, Xenopus laevis
MKMEESAAHFFEGTEKLLELWFSQQDASKGSGDLRDIPRFEWDKLLENVHCLIISVTKTDKQEAYVLSESSMFVSKRRFILKTCGTTLLLQALVPLLELAREYCGFDGIQNFFYSRKNFMKPNHQEYPHRNFHEEVEFLNQIFPNGAAYCMGRINSDCWYLYTLDIPDEYVISQPDQTLEILMSELDPEVMDQFYMKEGVTANDVTRVSGIRDLITGSVIDATMFSPCGYSMNGMKSDGTYWTIHITPEPDFSYVSFETNVSLTTYDDLISKVVDVFKPRKFVTTLFVNQSSKCRTTFSCAQKIEGFRRVDRQFAQFNDYNFVFTSFAKIQPQQS

SEQ ID NO: 4512 - protein, 334 aa, Homo sapiens
MEAAHFFEGTEKLLEVWFSRQQPDANQGSGDLRTIPRSEWDILLKDVQCSIISVTKTDKQEAYVLSESSMFVSKRRFILKTCGTTLLLKALVPLLKLARDYSGFDSIQSFFYSRKNFMKPSHQGYPHRNFQEEIEFLNAIFPNGAAYCMGRMNSDCWYLYTLDFPESRVISQPDQTLEILMSELDPAVMDQFYMKDGVTAKDVTRESGIRDLIPGSVIDATMFNPCGYSMNGMKSDGTYWTIHITPEPEFSYVSFETNLSQTSYDDLIRKVVEVFKPGKFVTTLFVNQSSKCRTVLASPQKIEGFKRLDCQSAMFNDYNFVFTSFAKKQQQQQS

SEQ ID NO: 4513 - protein, 334 aa, Homo sapiens
MEAAHFFEGTEKLLEVWFSRQQPDANQGSGDLRTIPRSEWDILLKDVQCSIISVTKTDKQEAYVLSESSMFVSKRRFILKTCGTTLLLKALVPLLKLARDYSGFDSIQSFFYSRKNFMKPSHQGYPHRNFQEEIEFLNAIFPNGAGYCMGRMNSDCWYLYTLDFPESRVISQPDQTLEILMSELDPAVMDQFYMKDGVTAKDVTRESGIRDLIPGSVIDATMFNPCGYSMNGMKSDGTYWTIHITPEPEFSYVSFETNLSQTSYDDLIRKVVEVFKPGKFVTTLFVNQSSKCRTVLASPQKIEGFKRLDCQSAMFNDYNFVFTSFAKKQQQQQS

SEQ ID NO: 4514 - protein, 354 aa, Homo sapiens
MEAAHFFEGTEKLLEVWFSRQQPDANQGSGDLRTIPRSEWDILLKDVQCSIISVTKTDKQEAYVLSEASMFVSKRRFILKTCGTTLLLKALVPLLKLARDYSGFDSIQSFFYSRKNFMKPSHQGYPHRNFQEEIEFLNAIFPNGAAYCMGRMNSDCWYLYTLDFPESRVISQPDQTLEILMSELDPAVMDQFYMKDGVTAKDVTRESGIRDLIPGSVIDATMFNPCGYSMNGMKSDGTYWTIHITPEPEFSYVSFETNLSQTSYDDLIRKVVEVFKPGKFVTTLFVNQSSKCRTVLASPQKIEGFKRLDCQSAMFNDYNFVFTSFAKKQQQQQSHICRSQMVTSQQTSSVVRQT

SEQ ID NO: 4515 - protein, 334 aa, Homo sapiens
  unsure (1)..(334): unsure at all Xaa locations
MEAAHFFEGTEKLLEVWFSRQQPDANQGSGDLRTIPRSEWDILLKDVQCSIISVTKTDKQEAYVLSEXSMFVSKRRFILKTCGTTLLLKALVPLLKLARDYSGFDSIQSFFYSRKNFMKPSHQGYPHRNFQEEIEFLNAIFPNGAGYCMGRMNSDCWYLYTLDFPESRVISQPDQTLEILMSELDPAVMDQFYMKDGVTAKDVTRESGIRDLIPGSVIDATMFNPCGYSMNGMKSDGTYWTIAITPEPEFSYVSFETNLSQTSYDDLIRKVVEVFKPGKFVTTLFVNQSSKCRTVLASPQKIEGFKRLDCQSAMFNDYNFVFTSFAKKQQQQQS

SEQ ID NO: 4516 - protein, 267 aa, Homo sapiens
  unsure (1)..(267): unsure at all Xaa locations
XSMFVSKRRFILKTCGTTLLLKALVPLLKLARDYSGFDSIQSFFYSRKNFMKPSHQGYPHRNFQEEIEFLNAIFPNGAGYCMGRMNSDCWYLYTLDFPESRVISQPDQTLEILMSELDPAVMDQFYMKDGVTAKDVTRESGIRDLIPGSVIDATMFNPCGYSMNGMKSDGTYWTIHITPEPEFSYVSFETNLSQTSYDDLIRKVVEVFKPGKFVTTLFVNQSSKCRTVLASPQKIEGFKRLDCQSAMFNDYNFVFTSFAKKQQQQQS

SEQ ID NO: 4517 - protein, 267 aa, Homo sapiens
  unsure (1)..(267): unsure at all Xaa locations
XSMFVSKRRFILKTCGTTLLLKALVPLLKLARDYSGFDSIQSFFYSRKNFMKPSHQGYPHRNFQEEIEFLNAIFPNGAAYCMGRMNSDCWYLYTLDFPESRVISQPDQTLEILMSELDPAVMDQFYMKDGVTAKDVTRESGIRDLIPGSVIDATMFNPCGYSMNGMKSDGTYWTIHITPEPEFSYVSFETNLSQTSYDDLIRKVVEVFKPGKFVTTLFVNQSSKCRTVLRSPQKIEGFKRLDCQSAMFNDYNFVFTSFAKKQQQQQS

SEQ ID NO: 4518 - protein, 267 aa, Homo sapiens
  unsure (1)..(267): unsure at all Xaa locations
XSXFVSKRRFILKTCGTTLLLKALVPLLKLARDYSGFDSIQSFFYSRKNFXKPSHQGYPHRNFQEEIEFLNAIFPNGAGYCXGRXNSDCWYLYTLDFPESRVISQPDQTLEILXSELDPAVXDQFYXKDGVTAKDVTRESGIRDLIPGSVIDATXFNPCGYSXNGXKSDGTYWTIHITPEPEFSYVSFETNLSQTSYDDLIRKVVEVFKPGKFVTTLFVNQSSKCRTVLASPQKIEGFKRLDCQSAXFNDYNFVFTSFAKKQQQQQS

SEQ ID NO: 4519 - protein, 334 aa, Bos taurus
MEAAHFFEGTEKLLEVWFSRQQPDANQGSGDLRTIPRSEWDILLKDVQCSIISVTKTDKQEAYVLSESSMFVSKRRFILKTCGTTLLLKALVPLLKLARDYSGFDSIQSFFYSRKNFMKPSHQGYPHRNFQEEIEFLNAIFPNGAAYCMGRMNSDCWYLYTLDFPESRVINQPDQTLEILMSELDPAVMDQFYMKDGVTAKDVTRESGIRDLIPGSVIDATMFNPCGYSMNGMKSDGTYWTIHITPEPEFSYVSFETNLSQTSYDDLIRKVVEVFKPGKFVTTLFVNQSSKCRTVLSSPQKIEGFKRLDCQSALFNDYNFVFTSFAKKQQQQQS

SEQ ID NO: 4520 - protein, 551 aa, Rattus norvegicus
MAKDSDIMPEQQFNSKMTPTSKQSTGLLKTYEESSIPPPGTEMLDAFLRNYEHYCPVIIRKASESMRQTFGFHDTIGPNCTPLLTCLYHRDLLCQPSSFMDSSSIFMASASGCRRVWLLTWCCMLRLLCLREGDSILLGHYSQQILPGSFLAAAGGALQASINPGFARLLISAQCLTLDCDISLGKHSWCMSLRSRHGIPGIPKTGPVVIVLGIIFLHDNCVSEEELWPLLNDMGLYAGRDHFMYGKPRRLITEHFVQEQYLEYRQDFPVIFFHGTAGPFYDVPDASSVGKKGVPALICDCLSQLPRHLLMCLLREVSHIVMERTKKWDVVLKDIQCSTISVTKTDNFFYSHKNFMKPSDQGYPHQNFQEEIKFLNPFFHNGAAYCMGCMNSGCWYLNTLALPESRVINQPIKLWKFCELDSAVMDQFFMEDGVTAKDVTHGSGISDLIPDSVIDATLFNPCDYSMNEMKLDGTYWIIHITPEPEFSYVSFETNLSQTSYDDLIRKVVDVFKPGKFVTTLILTVSNVLIARVQNDYNSVFTSFSKKQQQQS

SEQ ID NO: 4521 - protein, 108 aa, Ipomoea nil
VYPYKIIIKTCGTTKLLLSIPPILELADGLSLKVKSVKYTRGSFNFPEVQPYPHRNFSEEVAILDGYFGKLGTGSKAYVMSDAGKQQQWHVYSASAESAENTFPIYTL

SEQ ID NO: 4522 - protein, 220 aa, Glycine max
  unsure (1)..(220): unsure at all Xaa locations
XXXXXXTXTGPALESATXAPPPKLSGISEIIPEMEICDFDFEPCGYSMNAIHGSAFSTIHVTPEDGFSYASYEVMGLDATALSYGDLVKRVLRCFGPSEFSVAVTIFGGRGHAGTWGKALGAXVYDCNNMVEQELPVGGXLVYQSFCAAEXAXATLPXSVLHXXDGENVXXXXSPMXRXXXTGNLLCWXEEXDXLEDKXXLXMXKPPXGAHXFEXVXXXX

SEQ ID NO: 4523 - protein, 91 aa, Glycine max
  unsure (1)..(91): unsure at all Xaa locations
XFKTSADGHVSCAKEMTKLSGISDIIPEMEVCDFDFEPCGYSMNAINGSAFSTIHVTPEDGFSYASYEVMGMDASALAYGDIVXRVLRCFX

SEQ ID NO: 4524 - protein, 118 aa, Glycine max
  unsure (1)..(118): unsure at all Xaa locations
XILSRSRSLSIFPSLFSINEVLQICSEVVNYTRGSFIFPSAQPYPHRNFSEEVAILDGYFGKLGAGSNAYILGGQDKAQNWHVYSASADSVTQCDXVNSGIRKILPDSEICDFDFEPC

SEQ ID NO: 4525 - protein, 196 aa, Glycine max
  unsure (1)..(196): unsure at all Xaa locations
XLEEILTSADXSTAFIFLPNGIEGKIWWKNTDARHRASVPTIAGALANLSLAIXAIWASAVMLSLNVKFVNYTRGSFIFPSAQPYPHRNFSEEVAILDGYFGKLGALMTRHARRRRLMRRSRTGVXRAGGAWGSHGSGDTVEMCMTGLDGQKAHVLYREQSASSAMMTVNFGIXKIFPDSENCDFDLXPCGYSMNX

SEQ ID NO: 4526 - protein, 110 aa, Glycine max
  unsure (1)..(110): unsure at all Xaa locations
LPNVLPLYICITGLNFNKPHGYYTYQSASAAITTDNAGITKTLPHSEINDYDFEPCGYSMNSDEGTGATTIHITPQDGFSHANLETVGTDFKQLNHNEMVNKVSACSLPX

SEQ ID NO: 4527 - protein, 220 aa, Triticum aestivum
  unsure (1)..(220): unsure at all Xaa locations
XIRHEAPVVNLEMCMTGLDKKKASVFFKTNAGASPTCAKEMTKLSGISEIIPEMEICDFDFEPCGYSMNAIHGSAFSTIHVTPEDGFSYASYEVMGFDATALSYGDLVKRVLRCFGPLEFSVAVTIFGGRGQAGTWGKQLGAEVYDCNNMVEQELPGGGLLIYQSFCAAEDAVATSPKSVLHCFEGVNMENAPVKDRKLANLLCWEEVDAMEEKDGVLDE

SEQ ID NO: 4528 - protein, 396 aa, Saccharomyces cerevisiae; identical to SEQ ID NO: 406

SEQ ID NO: 4529 - protein, 312 aa, Shewanella oneidensis MR-1
MMFFEGAEKKLEISLTPKAVSLRQRGLAFWTTLVACANAEILSKISNKDCDAYLLSESSLFVWDNKILILTCGNSTLIEAACYFINSLGSEHIAALCYQRKNEYQAQLQSTTFAEDIAQLRTLISGQAFRVGHLDAHHHYVFCAAGVPITQVGTRLELMMYHIRGELAEYLNDPVQTEQGIVHRLKLTQLFPEFQLDMHCFKPTGFSLNAIQGSHYFTLHITPSAGQGEHSYVSFETNLNLAAYPYPVVAQLISLFAPSSWDLVSVNQLISTAGLSEHLCVGHCSITTEQGNYIDFNHYQQRQTEELFPKFM

SEQ ID NO: 4530 - protein, 132 aa, Arabidopsis thaliana
MDSQVQFFEGVEKRIEFDFAGTNLRDELNRAVLEKIVKPVECVIEGVLSGDHVDSYLLSASSLFVYDDLVIIKTCGATKIFECINGIVAAVGWNKLRSIKYTRGSFFRPDLQPYPHQRPCDEKRCVRLVPKS

SEQ ID NO: 4531 - protein, 383 aa, Nostoc sp. PCC 7120
MAKHLGKKIAPIPMSTDISVVDLIDNYFTAYNSARLREASQLLACDILKDGVTVGVSLSGAMTPAGFGVSALAPLIRNGFIDWMISTGANLYHDMHYGLGFELFAGNPFLDDVKLREEGTIRIYDIIFGYDVLLETDAFIRKILQAEPFQKRMGTAEFHYLLGKYVREVEKQLGVKHSCLLATAYEYGVPIYTSSPGDSSIGMNVAALALEGSQLILDPAIDVNETAAIAYNAREGEGKSAAVILGGGSPKNFLLQTQPQIHEVLGLEERGHDFFVQFTDARPDTGGLSGATPAEAVSWGKIDPDELPSTIVCYTDSTIALPLVTAYVLNQCPPRPLKRLYDRREELYDKLRTDYLAAKDKPVEKVATNGEVATYPCGTPIRQ

SEQ ID NO: 4532 - protein, 401 aa, Thermosynechococcus elongatus BP-1
MAVPAVEFPWEEQPMSAFATPITPAPIPDNISLTELIDKYFTAYNSARLREICQLLSQRVFKPEVTVGLSLSGAMTPTGLGISALAPLVRAGFVDYIISTGANLYHDIHYALGMDLYAAHPFVDDVQLRKESKIRIYDIIFDYDVLLETDAFLRQVLRSETFQRRMGTAEFHYHLGHYVRELEVQRGQPHSCLLATAYECGVPIYTSSPGDSSIGMNVAAIALEGSKLIIDPAIDVNETAAIAYFAREAAGGKGKSAALIIGGGSPKNFLLQTQPQIHEVLGLEERGHDYFIQITDARPDTGGLSGAVPSEAVSWGKVDPQGLRDTVVCYTDSTIALPILTAYCLNRCQPRPLKRLYDRRGEMVERLQQLYLQAQLQHKVKELPTEAPVATYPCGTPIRRP

SEQ ID NO: 4533 - protein, 95 aa, Oryza sativa
  unsure (1)..(95): unsure at all Xaa locations
MAGAGGGGVRDMDALEGVRSIVLKPSESLDEGRFTRIAGADFNDAGLGLPGLLASLATTGFQASNLGDAVDVVNQMLEIVVFLDPWSFXRNCNLX

SEQ ID NO: 4534 - protein, 86 aa, Zea mays
ELPRDECAATELDPAYSDSGKCNICVASTSKLESTGARDINRHRGQHRIVDIRATTDRRIETKNIKCLAPTYRGDFTLPGALLRSR

SEQ ID NO: 4535 - protein, 387 aa, Saccharomyces cerevisiae; identical to SEQ ID NO: 402

SEQ ID NO: 4536 - protein, 390 aa, Nostoc punctiforme
MSKQLGQKIAPTPISNDINVVDLIDQYFTAYNSARLREICQLLSRDVLTEGVTVGVSLSGAMTPAGFGVSALAPLIRNGFIDWMISTGANLYHDMHYGLGFELFAGNPFLDDVKLRQEGTIRIYDIIFGYDVLLETDAFIRKILQGEAFQKRMGTAEFHYLLGKYVREVEKQLGVQHSCLLATAYEYGVPIYTSSPGDSSIGMNVAALALEGSQLVLDPSIDVNETAAIAYNARESGGKSAAVILGGGSPKNFLLQTQPQLHEVLGLEERGHDYFVQFTDARPDTGGLSGATPSEAVSWGKIDPEELPNTIVCYTDSTIALPLVTAYVLNKCQPRPLKRIYDKREAILDKLQKDYLAAKTQPSDQVPAAVAESAQKQTATYPCGRLIPNT

SEQ ID NO: 4537 - protein, 138 aa, Pyrococcus furiosus DSM 3638
MGDKTKVQVSKLKPGRYIIIDDEPCRIVNITVSSPGKHGSAKARIEAVGIFDGKVRSIVKPTSAEVDVPIIDKRTAQVIAVTPDTVQIMDMETYEMFEVPLDTGVEEEIKDKIKEGINVEYWETLGRIKIMRIKGEEE

SEQ ID NO: 4538 - protein, 138 aa, Pyrococcus abyssi
MGDKTKVQVSKLKPGRYIIIDDEPCRIVNITVSSPGKHGSAKARIEAVGIFDGKVRSIVKPTSAEVDVPIIDKKTAQVIAITPDTVQIMDMETYEMFEVPIDTGVAEEIRDQLKEGINVEYWETLGRVKIMRIKGEGE

SEQ ID NO: 4539 - protein, 72 aa, Castanea dentata
VGGVSDVKGHENSLQIDDLARFAVDDHNKKANTLLQFKKVVNAKQQVVSGTIYILTLEVEDGGKKKVYEAKI

SEQ ID NO: 4540 - protein, 102 aa, Castanea sativa
MAALVGGVSDVKGHENSLQIDDLARFAVDDHNKKANTLLQFKKVVNAKQQVVSGTIYILTLEVEDGGKKKVYEAKIWEKPWLNFKEVQEFKLIGDAPTHHSA

SEQ ID NO: 4541 - protein, 95 aa, Pyrus communis
MAAVGAVRDNQGVANSVETESLARYAVDEHNKKENDLLEFVRVLDDKVQVVSGTMHYLKIEATEGGKKKVYEAKVWVKPWENFKQVQEFKPVSDS

SEQ ID NO: 4542 - protein, 99 aa, Carica papaya
MEPGIVIGGLQDVEGDANNLEYQELARFAVDEHNKKTNAMLQFKRVVNVKQAVVEGLKYCITLEAVDGHKTKVYEAEIWLKLWENFRSLEGFKLLGDAH

SEQ ID NO: 4543 - protein, 118 aa, Citrus x paradisi
MNQRFCCLIVLFLSVVPLLAAGDRKGALVGGWKPIEDPKEKHVMEIGQFAVTEYNKQSKSALKFESVEKGETQVVSGTNYRLILVVKDGPSTKKFEAVVWEKPWEHFKSLTSFKPMVK

SEQ ID NO: 4544 - protein, 140 aa, Glycine max
  unsure (1)..(140): unsure at all Xaa locations
XWKYRVVGSVAALLLLLAIVVPFTQTQTQSARDKAAMAEDAGPLVGGISDSPMGQENDLDVIALARFAVSEHNNKANALLEFENVVKVKKQTVAGTMHYITIRVTEGGAKKLYEAKVWEKPWENFKKLEEFKLVEDVPSA

SEQ ID NO: 4545 - protein, 209 aa, Ricinus communis
MATVQGGVHDSPQGTANNAEIDGIARFAVDEHNKKENAMVEFGRVLKAKEQVVAGTLHHLTIEAIEAGKKKIYEAKVWVKPWLNFKELQEFKHATDVADTTASHPSFTSSDLGVKREGHGAEWKEVAAHDPVVQDAATHAVNTIQQRSNSLFPYQLQEIVHAKAQVVDDFAKFDMILKVKRGTSEEKFKVEVHKNNEGTFLLNQMEPHT

SEQ ID NO: 4546 - protein, 63 aa, Oryza sativa (japonica cultivar-group)
MRKYRVAGLVAALLVLHSLATPSAQAEAHRAGGEGEEKMSSDGGPVLGGVEPVGNENDLHLVD

SEQ ID NO: 4547 - protein, 756 aa, Solanum tuberosum
MAIVGGLVDVPFENKVEFDDLARFAVQDYNQKNDSSLEFKKVLNVKQQIVAGIMYYITFEATEGGNKKEYEAKILLRKWEDLKKVVGFKLVGDDSTMPGGIVNVPNPNNTKFQELARFAIQDYNKKQNAHLEFVENLNVKEQVVAGIMYYITLAATDDAGKKKIYKAKIWVKEWEDFKKVVEFKLVGDDIAKLGGITDVPFPNNPEFQDLARFAIQVYNKKENVHLEFVENLNVKQQVVAGMMYYITLAAIDAGKKKIYETKIWVKEWEDFKKVVEFKLVGDDSAKTGGIINVPNPNSPEFQDLARFAVQDYNNTQNAHLEFVENLNVKEQLVSGMMYYITLAATDAGNKKEYEAKIWVKEWEDFKKVIDFKLVGNDSAKKLGGFTEVPFPNSPEFQDLTRFAVHQYNKDQNAHLEFVENLNVKKQVVAGMLYYITFAATDGGKKKIYETKIWVKVWENFKKVVEFKLVGDDSAKLGGIINVPFPNNPEFQDLARFAVQDYNKKENAHLEFVENLNVKEQLVAGMLYYITLVAIDAGKKKIYEAKIWVKEWENFKKVIEFKLIGDDSAIIGGFTDVPFPNNPEFQDLARFAVQDYNKKENAHLEYVENLNVKEQLVAGMIYYITLVATDAGKKKIYEAKIWVKEWEDFKKVVEFKLVGDDSAKPGGIIIVPFPNSPEFQDLARFAVQDFNKKENGHLEFVENLNVKEQVVAGMMYYITLAATDARKKEIYETKILVKEWENFKEVQEFKLVGDATK

SEQ ID NO: 4548 - protein, 66 aa, Solanum tuberosum
QTQNAHLEFVEVLNVKEQVVAGMMYYITLVATDDGYKKIYKTKIWVKEWENFKEVQEFKQIVYATK

SEQ ID NO: 4549 - protein, 254 aa, Ipomoea batatas
MRVRFFFYFAYFLITLVFFPSVTLQSYSGGHRQEATGFCGEEGEREDNLIRMATTTLGGISDSASAENSVEIESLARFAVEEHNKKENAMIELVRVVKAEEQVVAGKLHHLTLEVIDAGKRKLYEAKVWLKPWMNFKELQGFNHIEDIPTLTSSDLGARRDCPNTGLKSVPVNDPVVQEAAQHAVKTIQQRSNSLLPYELQEIVHANAEVIDDSAKVHMLIKTKRGEKEEKFSVEVHKNNEGAFLLHHMAPANS

SEQ ID NO: 4550 - protein, 254 aa, Ipomoea batatas
MRVRFFFYFAYFLITLVFFPSVTLQSYSGGHRQEATGFCGEEGEREDNLIRMATTTLGGISDSASAENSVEIESLARFAVEEHNKKENAMIELVRVVKAEEQVVAGKLHHLTLEVIDAGKRKLYEAKVWLKPWMNFKELQGFNHIEDIPTLTSSDLGAKRDWPNTGLKSVPVNDPVVQEAAQHAVKTIQQRSNSLLPYELQEIVHANAEVIDDSAKVHMLIKTKRGEKEEKFSVEVPKNNEGAFFLNHMAPANS

SEQ ID NO: 4551 - protein, 199 aa, Sesamum indicum
MATLGGVHDSNSNPDTHSLARFAVDQHNTKENGLLELVRVVEAREQVVAGTLHHLVLEVLDAGKKKLYEAKIWVKPWMDFKQLQEFKHVRDVPSFTSSDLGAKTDDQVSGWRPVPVHDPVVQDAAHHAIKTIQERSNSLFPYELSEVVHANAEVVDTSAKFDMLLKVKRGGKEEKYKVEVHKSTEEGGFNLKKVDLDHS

SEQ ID NO: 4552 - protein, 92 aa, Ambrosia artemisiifolia
MSILGGITEVKDNDNSVDFDELAKFAIAEHNKKENAALEFGKVIEKKQQAVQGTMYYIKVEANDGGEKKTYEAKVWVKLWENFKELQELKLV

SEQ ID NO: 4553 - protein, 90 aa, Artemisia vulgaris
MAVCGGVTECKNFENNVEIETIAKFAVEEHNKKENATLEFVKVVSAKEQVVSGKIYYITIETNDGKTYEAKLWVKPWENFQELQEFKPAA

SEQ ID NO: 4554 - protein, 205 aa, Colocasia esculenta
MALMGGIVDVEGAQNSAEVEELARFAVDEHNKKENALLQFSRLVKAKQQVVSGIMHHLTVEVIEGGKKKVYEAKVWVQAWLNSKKLHEFSPIGDSSSVTPADLGVKRDAHEAEWLEIPTHDPVVQDAANHAVKSIQQRSNTLFPYELLEILHAKAKVLEDLAKIHLLLKLKRGSREEKFKVEVHKNIEGTFHLNQMEQDHSDSGN

SEQ ID NO: 4555 - protein, 135 aa, Coix lacryma-jobi
MRKQRIVPLVAALLVLLALAVSSTRNAREEESMADDAGMLAGGIKDVPANENDLHLQELARFAVDEHNKKANALLGYEKLVKAKTQVVAGTMYYLTIEVKDGEVKKLYEAKVWEKPWENFKELLEFKPVEEDASA

SEQ ID NO: 4556 - protein, 90 aa, Oryza
MARIRARGSSRVDLARFAVTEHNKKANSLLEFEKLVSVKQQVVAGTLYYFTIEVKEGDAKKLYEAKVWEKPWMDFKELQEFKPVDASANA

SEQ ID NO: 4557 - protein, 130 aa, Sorghum bicolor
ARVVPLVAALLVLLALAVSSTRNRNAQEGEESMALDGGIKDVPANENDLHLQELARFAVDEHNKKANALLGYEKLVKAKTQVVAGTMYYLTVEVKDGEVKKLYEAKVWEKPWENFKELQEFKPVEEGASA

SEQ ID NO: 4558 - protein, 142 aa, Triticum aestivum
MEMWKYRVVGSVAALLLLLAIVVPFTQTQTQSARDKAAMAEDAGPLVGGISDSPMGQENDLDVIALARFAVSEHNNKANALLEFENVVKVKKQTVAGTMHYITIRVTEGGAKKLYEAKVWEKPWENFKKLEEFKLVEDVPSA

SEQ ID NO: 4559 - protein, 142 aa, Triticum aestivum; identical to SEQ ID NO: 4558

SEQ ID NO: 4560 - protein, 165 aa, Triticum aestivum
SARIVSLLPCSAAAAINPAPDRPPDAWIRRVVGSVAALLLLLAIVVPFTQTQTQSARDKAAMAEDAGPLVGGIKDSPMGQENDLDVIALARFAVSEHNNKANALLEFENVVKLKKQTVAGTMHYITIRVTEGGAKKLYEAKVWEKPWENFKKLEEFKPVEDAAIA

SEQ ID NO: 4561 - protein, 125 aa, Triticum aestivum
LLAIVVPFTQTRTQSARDKAAMAEDAGPLVGGIKDSPMGQENDLDVIALARFAVSEHNNKANALLEFENVVKLKKQTVAGTMHYITIRVTEGGAKKLYEAKVWEKPWENFKQLQEFKPVEDAAIA

SEQ ID NO: 4562 - protein, 134 aa, Zea mays
MRKHRIVSLVAALLILLALAVSSTRNAQEDSMADNTGTLAGGIKDVPGNENDLHLQELARFAVDEHNKKANALLGFEKLVKAKTQVVAGTMYYLTIEVKDGEVKKLYEAKVWEKPWENFKELQEFKPVDEGASA

SEQ ID NO: 4563 - protein, 134 aa, Zea mays
MRKHRIVSLVAALLILLALAVSSTRNAQEDSMADNTGTLAGGIKDVPGNENDLHLQELARFAVDEHNKKANALLGFEKLVKAKTQVVAGTMYYLTIEVKDGEVKKLYEAKVWEKPWENFKELQEFKPVEEGASA

SEQ ID NO: 4564 - protein, 134 aa, Zea mays; identical to SEQ ID NO: 4563

SEQ ID NO: 4565 - protein, 134 aa, Zea mays; identical to SEQ ID NO: 4563

SEQ ID NO: 4566 - protein, 135 aa, Zea mays
  unsure (1)..(135): unsure at all Xaa locations
MRKHRIVSLVAALLILLALAXVSSNRNAQEDSMADNTGTLVGGIQDVPENENDLHLQELARFAVDEHNKKANALLGFEKLVKAKTQVVAGTMYYLTIEVKDGEVKKLYEAKVWEKPWEKFKELQEFKPVEEGASA

SEQ ID NO: 4567 - protein, 134 aa, Zea mays
MRKHRIVSLVSALLILLALAVSSTRNAQEDSMANNTGTLVGGIQDVPGSENDLHLQELARFAVDEHNKKANALLGFEKLVKAKTQVVAGTMYYLTIEVKDGEVKKLYEAKVWEKPWEKFKELQEFKPVEEGASA

SEQ ID NO: 4568 - protein, 134 aa, Zea mays
MRKHRIVSLVAALLILLALAVSSNRNAQEDSMADNTGTLVGGIQDVPENENDLHLQELARFAVDEHNKKANALLGFEKLVKAKTQVVAGTMYYLTIEVKDGEVKKLYEAKVWEKPWEKFKELQEFKPVEEGASA

SEQ ID NO: 4569 - protein, 134 aa, Zea mays; identical to SEQ ID NO: 4568

SEQ ID NO: 4570 - protein, 135 aa, Zea mays
MRKHRIVSLVAALLVLLALAAVSSTRNAQEESAADNAGMLAGGIKDVPANENDLQLQELARFAVNEHNQKANALLGFEKLVKAKTQVVAGTMYYLTIEVKDGEVKKLYEAKVWEKPWENFKELQEFKPVEEGASA

SEQ ID NO: 4571 - protein, 138 aa, Zea mays
AGRAGAQHRIVSLVAALLILLALAVSSTRNAQEDSMADNTGTLAGGIKDVPGNENDLHLQELARFAVDEHNKKANALLGFEKLVKAKTQVVAGTMYYLTIEVKDGEVKKLYEAKVWEKPWENFKELQEFKPVEECASA

SEQ ID NO: 4572 - protein, 135 aa, Zea mays
MRKHRIVSLVAALLVLLALAAVSSTRSTQKESVADNAGMLAGGIKDVPANENDLQLQELARFAVNEHNQKANALLGFEKLVKAKTQVVAGTMYYLTIEVKDGEVKKLYEAKVWEKPWENFKQLQEFKPVEEGASA

SEQ ID NO: 4573 - protein, 135 aa, Zea mays; identical to SEQ ID NO: 4572

SEQ ID NO: 4574 - protein, 135 aa, Zea mays
MRKHRIVSLVAALLVLLALAAVSSTRSAQKESVADNAGMLAGGIKDVPANENDLQLQELARFAVNEHNQKANALLGFEKLVKAKTQVVAGTMYYLTIEVKDGEVNKLYEAKVWEKPWENFKQLQEFKPVEEGASA

SEQ ID NO: 4575 - protein, 134 aa, Zea mays
  unsure (1)..(134): unsure at all Xaa locations
XHASGIVSLVAALLILLALAVSSTRNAQEDSMADNTGTLAGGIKDVPGNENDLHLQELARFAVDEHNKKANALLGFEKLVKAKTQVVAGTMYYLTIEVKDGEVKKLYEAKVWEKPWENFKELQEFKPVEEGASA

SEQ ID NO: 4576 - protein, 135 aa, Zea mays
MRKHRIVSLVAALLVLLALAAVSSTRSAQKESVADNAGMLAGGIKDVPANENDLQLQELARFAVNEHNQKANALLGFEKLVKAKTQVVAGTMYYLTIEVKDGVVKKLYEAKVWEKPWENFKQLQEFKPVEEGASA

SEQ ID NO: 4577 - protein, 135 aa, Zea mays
MRVHRIVSLLAALLVLLALAAVSSTRSAQEESVADNAGMLAGGIKDVPANENDLQLQELARFAVNEHNKKANALLGFEKLVKAKTQVVAGTMYYLTIEAKDGEVKKLYEAKVWEKPWENFKQLQEFKPVEEGASA

SEQ ID NO: 4578 - protein, 135 aa, Zea mays
MRKHRIVSLVAALLVLLALAAVSSTRSAQKESAADNAGMLAGGIKDVPANENDLQLQELARFAVNEHNQKANALLGFEKLVKAKTQVVAGTMYYLTIEVKDGEVNKLYEAKVWEKPWENFKQLQEFKPVEEGASA

SEQ ID NO: 4579 - protein, 135 aa, Zea mays
MRKHRIVSLVAALLVLLALAAVSSTRSTQKESVADNAGMLAGGIKDVPANENDLQLQELARFAVNEHNQKANALLGFEKLVKAKTQVVAGTMYYLTIEVKDGEVNKLYEAKVWEKPWENFKQLQEFKPVEEGASA

SEQ ID NO: 4580 - protein, 135 aa, Zea mays
MRKHRIVSLVAALLVLLALAAVSSTRSAQKESVADNAGMLAGGIKDVPANENDLQLRELARFAVNEHNQKANALLGLEKLVKAKTQVVAGTMYYLTIEVKDGVVKKLYEAKVWEKPWENFKQLQEFKPVEEGASA

SEQ ID NO: 4581 - protein, 162 aa, Zea mays
  unsure (1)..(162): unsure at all Xaa locations
MRKHRIVSLVSALLILLALAVSSTRNAQEDSMANNTGTLVGGIQDVPGSENDLHLQELARFAVDEHNKKANXALLGFEKLVKAKTQVVAGXTMYYLTIEVKDGEVKKLYEAKVWEKPWENLKGLQEFKPVEEGASALRMSPSPCASLKLKAKLQNKEPCSLV

SEQ ID NO: 4582 - protein, 140 aa, Zea mays
  unsure (1)..(140): unsure at all Xaa locations
XVQYRVVGSVAALLLLLAIVVPFTQTQTQSARDKAAMAEDAGPLVGGISDSPMGQENDLDVIALARFAVSEHNNKANALLEFENVVKVKKQTVAGTMHYITIRVTEGGAKKLYEAKVWEKPWENFKKLEEFKLVEDVPSA

SEQ ID NO: 4583 - protein, 161 aa, Zea mays
  unsure (1)..(161): unsure at all Xaa locations
MALAAAPASGDSQSGPQRNYQVVEMRKHRIVSLVAALLVLLALAAVSSTRSAQKESAADNAGMLAGGIKDVPANENDLQLQELARFAVNEHNQKANXALLGFEKLVKAKTQVVAGTMYYLTIEVKDGEVNKLYEAKVWEKPXWENFKQLQEFKPVEEGASA

SEQ ID NO: 4584 - protein, 88 aa, Vigna radiata
MSQELESVEIDSLARFAVEEHNKKQNALLEFGRVVSAQQQVVSGTLYTITLEAKDGGQKKVYEAKVWEKPWLNFKELQEFKLVGEAPA

SEQ ID NO: 4585 - protein, 100 aa, Persea americana
PLLGGVRDVPDHNSAETEELARFAVQEHNKKANTRLEFSRVVKAKEQVVAGTMYYITLEVVEAGQKKIYEAKVWVKLWENFKELQEFKPVGDSSSTSSDA

SEQ ID NO: 4586 - protein, 98 aa, Dianthus caryophyllus
MATVGGIKDSGGSSANSLEIDELAKFAVDHYNSKENALLEFQRVVNTKEQVVAGTIYYITLEATDGGVKKLYEAKVWVKPWVNFKEVQDFKYVGDASA

SEQ ID NO: 4587 - protein, 98 aa, Dianthus caryophyllus
MATVGGIKDSGGSSAISLEIDELAKFAVDHYNSIENALLEFPRVVNTKEQVVAGTIYYITLEATDGGVKKLYEANVWVKPGVNFKEVQVFKYVGDAFG

SEQ ID NO: 4588 - protein, 99 aa, Rumex obtusifolius
MATIGGIKQVEGSANSLEVESLAKFAVEDHNKKQNAMLEFSKVVNTKEQVVAGTMYYITLEATDGGKKKVYEAKVWVKPWMNFKQVQEFKLLGDQGSTS

SEQ ID NO: 4589 - protein, 201 aa, Arabidopsis thaliana
MALVGGVGDVPANQNSGEVESLARFAVDEHNKKENALLEFARVVKAKEQVVAGTLHHLTLEILEAGQKKLYEAKVWVKPWLNFKELQEFKPASDAPAITSSDLGCKQGEHESGWREVPGDDPEVKHAAEQAVKTIQQRSNSLFPYELLEVVHAKAEVTGEAAKYNMLLKLKRGEKEEKFKVEVHKNHEGALHLNHAEQHHD

SEQ ID NO: 4590 - protein, 234 aa, Arabidopsis thaliana
MMRSRFLLFIVFFSLSLFISSLIASDLGFCNEEMALVGGVGDVPANQNSGEVESLARFAVDEHNKKENALLEFARVVKAKEQVVAGTLHHLTLEILEAGQKKLYEAKVWVKPWLNFKELQEFKPASDAPAITSSDLGCKQGEHESGWREVPGDDPEVKHVAEQAVKTIQQRSNSLFPYELLEVVHAKAEVTGEAAKYNMLLKLKRGEKEEKFKVEVHKNHEGALHLNHAEQHHD

SEQ ID NO: 4591 - protein, 201 aa, Arabidopsis thaliana
MALVGGVGDVPANQNSGEVESLARFAVDEHNKKENALLEFARVVKAKEQVVAGTLHHLTLEILEAGQKKLYEAKVWVKPWLNFKELQEFKPASDAPAITSSDLGCKQGEHESGWREVPGDDPEVKHVAEQAVKTIQQRSNSLFPYELLEVVHAKAEVTGEAAKYNMLLKLKRGEKEEKFKVEVHKNHEGALHLNHAEQHHD

SEQ ID NO: 4592 - protein, 209 aa, Arabidopsis thaliana
VLGFCNEEMALVGGVGDVPANQNSGEVESLARFAVDEHNKKENALLEFARVVKAKEQVVAGTLHHLTLEILEAGQKKLYEAKVWVKPWLNFKELQEFTPASDAPAITSSDLGCKQGEHESGWREVPGDDPEVKHVAEQAVKTIQQRSNSLFPYELLEVVHAKAEVTGEAAKYNMLLKLKRGEKEEKFKVEVHKNHEGALHVNHAEQHHD

SEQ ID NO: 4593 - protein, 230 aa, Arabidopsis thaliana
MRRASMCMMLICVSLVLLSGFGQFVICSEEKGTYNDNVVKMKLGGFSDSKNDWNGGKEIDDIALFAVQEHNRRENAVLELARVLKATEQVVAGKLYRLTLEVIEAGEKKIYEAKVWVKPWMNFKQLQEFKNIIPSFTISDLGFKPDGNGFDWRSVSTNNPEVQEAAKHAMKSLQQKSNSLFPYKLIDIILARAKVVEERVKFELLLKLERGNKLEKFMVEVMKDQTGKYE

SEQ ID NO: 4594 - protein, 232 aa, Arabidopsis thaliana
MDMRRASMCMMLICVSLVLLSGFGQFVICSEEKGTYNDNVVKMKLGGFSDSKNDWNGGKEIDDIALFAVQEHNRRENAVLELARVLKATEQVVAGKLYRLTLEVIEAGEKKIYEAKVWVKPWMNFKQLQEFKNIIPSFTISDLGFKPDGNGFDWRSVSTNNPEVQEAAKHAMKSLQQKSNSLFPYKLIDIILARAKVVEERVKFELLLKLERGNKLEKFMVEVMKDQTGKYE

SEQ ID NO: 4595 - protein, 125 aa, Arabidopsis thaliana
MESKTFWIVTLLLCGTIQLAICRSEEKSTEKTMMLGGVHDLRGNQNSGEIESLARFAIQEHNKQQNKILEFKKIVKAREQVVAGTMYHLTLEAKEGDQTKNFEAKVWVKPWMNFKQLQEFKESSS

SEQ ID NO: 4596 - protein, 92 aa, Arabidopsis thaliana
MLGGVHDLRGNQNSGEIESLARFAIQEHNKQQNKILEFKKIVKAREQVVAGTMYHLTLEAKEGDQTKNFEAKVWVKPWMNFKQLQEFKESSS

SEQ ID NO: 4597 - protein, 116 aa, Arabidopsis thaliana
TLLLCGTIQLAICRSEEKSTEKTMMLGGVHDLRGNQNSGEIESLARFAIQEHNKQQNKILEFKKIVKAREQVVAGTMYHLTLEAKEGDQTKNFEAKVWVKPWMNFKQLQEFKESSS

SEQ ID NO: 4598 - protein, 101 aa, Arabidopsis thaliana
MADQQAGTIVGGVRDIDANANDLQVESLARFAVDEHNKNENLTLEYKRLLGAKTQVVAGTMHHLTVEVADGETNKVYEAKVLEKAWENLKQLESFNHLHDV

SEQ ID NO: 4599 - protein, 101 aa, Arabidopsis thaliana
MADQQAGTIVGGVRDIDANANDLQVESLARFAVDEHNKNENLTLEYKRLLGAKTQVVAGTMHHLTVEVADGETNKVYEAKVLEKAWENLKQLESFNHHHDV

SEQ ID NO: 4600 - protein, 199 aa, Brassica rapa
MAMLGGVRDVPSNENSVEVESLARFAVDEHNKKENALLEFARVVKAKEQVVAGTMHHLTLEIIEAGKKKLYEAKVWVKPWLNFKELQEFKPSTTITPSDLGCKKGEGASGWREVPGDDPEVQHVADHAVKSIQQRSNSLFPYELQEVVHANAEVTGEAAKYNMVLKLKRGEKEEKFKVEVHKNHEGVLHLNHMEQQHHD

SEQ ID NO: 4601 - protein, 205 aa, Brassica rapa
MAMLGGVRDVPANQNSGEVESLARFAVDEHNKKENALLEFARVVKAKEQVVAGTMHHLTLEIIEAGKKLYEAKVWVKPWLNFKELQEFKPASDDGSPSATITPSDLGCKKGEGASGWREVPGDDPEVQHVADHAVKTIQQRSNSLFPYELQEVVHANAEVTGEAAKYNMVLKLKRGEKEEKFKVEVHKNHEGVLHLNHMEQQHHD

SEQ ID NO: 4602 - protein, 95 aa, Brassica rapa
GTSRDVDPNANDLQVESLARFAVDEHNKKENVSLEYRRLIGAKTQVVAGTMHHLTVEVADGETKKVYEAKVLEKAWENLKKLEDFTHLRMFSFIT

SEQ ID NO: 4603 - protein, 207 aa, Brassica oleracea
MAMLGGVRDLPANENSVEVESLARFAVDEHNKKENALLEFARVVKAKEQVVAGTMHHLTLEIIEAGKKKLYEAKVWVKPWLNFKELQEFKPASDDGAPSTTITPSDLGCKKVSDENASGWREVPGDDPEVQHVADHAVKTIQQRSNSLFPYELQEVVHANAEVTGEAAKYNMVLKLKRGEKEEKFKVEVHKNHEGVLHLNHMEQHHD

SEQ ID NO: 4604 - protein, 246 aa, Malus x domestica
QMKSESYISLLIASFFVLLLPAFSSAAEESSTPIGCGHTSHRNMATLGGVHESHGAQNSAEVEDLARFAVQEHNNKENALLEFVSVVKAKEQVVAGTLHHLTIEAIEAGKKKLYQAKVWVKPWMGFKEVQEFKHADEEETPSVTSSDLGVKQGGHPPGWQSVPPHDPQVQDAANHAVKSLQQRSNSLLPYELQEVVHAQAEVAEEHAKFNMLLKVKRGSKEEKFKAEVHKNMEGTFSLNQMEADHS

SEQ ID NO: 4605 - protein, 245 aa, Glycine max
MRASNSSSSISIAKRYFFFFLLFIFFALRSSSGDCSEYHHHHSPMATIGGLHDSQGSQNSVETEALARFAVDEHNKKQNSLLEFARVVRAQEQVVAGTLHHLTLEAIEAGEKKLYEAKVWVKPWLNFKELQEFKPAGDAPSFTSADLGVKKDGHQPGWQSVPTHDPQVQDAANHAIKTIQQRSNSLVPYELHEVADAKAEVIDDFAKFNLLLKVKRGQKEEKFKVEVHKNNQGGFHLNQMEQDHS

SEQ ID NO: 4606 - protein, 245 aa, Glycine max
MRALTSSSSTFIPKRYSFFFFLSILFALRSSSGGCSEYHHHHAPMATIGGLRDSQGSQNSVQTEALARFAVDEHNKKQNSLLEFSRVVRTQEQVVAGTLHHLTLEAIEAGEKKLYEAKVWVKPWLNFKELQEFKPAGDVPSFTSADLGVKKDGHQPGWQSVPTHDPQVQDAANHAIKTIQQRSNSLVPYELHEVADAKAEVIDDFAKFNLLLKVKRGQKEEKFKVEVHKNNQGGFHLNQMEQDHS

SEQ ID NO: 4607 - protein, 245 aa, Glycine max; identical to SEQ ID NO: 4606

SEQ ID NO: 4608 - protein, 244 aa, Glycine max
  unsure (1)..(244): unsure at all Xaa locations
MKVEEEEVNALIRFISSFXFLSILFALRSSSGGCSEYHHHHAPMATIGGLRDSQGSQNSVQTEALARFAVDEHNKKQNSLLEFSRVVRTQEQVVAGTLHHLTLEAIEAGEKKLYEAKVWVKPWLNFKELQEFKPAGDVPSFTSADLGVKKDGHQPGWQSVPTHDPQVQDAANHAIKTIQQRSNSLVPYELHEVADAKTEVIDDFAKFNLLLKVKRGQKEEKFKVEVHKNNQGGFHLNQMEQDHS

SEQ ID NO: 4609 - protein, 260 aa, Glycine max
  unsure (1)..(260): unsure at all Xaa locations
LLERLERLRKDDRRGRKEEINSARALTSSSSTFIPKRYSFFFFLSILFALRSSSGGCSEYHHHHAPMATIGGLRDSQGSQNSVQTEALARFAVDEHNKKQXVVRTQEQVVAGTLHHLTLEAIEAGEKKLYEAKVWVKPWLNFKELQEFKPAGDVPSFTSADLGVKKDGHQPGWQSVPTHDPQVQDAANHAIKTIQQRSNSLVPYELHEVADAKAEVIDDFAKFNLLLKVKRGQKEEKFKVEVHKNNQGGFHLNQMEQDHS

SEQ ID NO: 4610 - protein, 140 aa, Glycine max
  unsure (1)..(140): unsure at all Xaa locations
MAMLGGVRDVPSNENSVEVESLARFAVDEHNKKENALLEFARVVKAKEQVVAGTMHHLTLEIIEAGKKKLYEAKVWVKPWLNFKELQEFKPSTTITPSDLGCKKGEGASGWREVPGDDPEVQHVADHAVKSIQQRSNSLX

SEQ ID NO: 4611 - protein, 124 aa, Glycine max
  unsure (1)..(124): unsure at all Xaa locations
MRVAATRPAXXPLPXALLAALALLFLVGSASLAIGAMASHVLGGKSENPAAANSLETDGLARFAVDEHNKRENALLEFVRVVEAKEQTVAGTLHHLTLEALEAGRKKVYEAKVWVKPWLDFKEL

SEQ ID NO: 4612 - protein, 97 aa, Glycine max
MAALGGNRDVTGSQNSVEIDALARFAVEEHNKKQNALLEFEKVVTAKQQVVSGTLYTITLEAKDGGQKKVYEAKVWEKSWLNFKEVQEFKLVGDAPA

SEQ ID NO: 4613 - protein, 97 aa, Glycine max; identical to SEQ ID NO: 4612

SEQ ID NO: 4614 - protein, 97 aa, Glycine max
MAALGGNRDVAGSQNSLEIDGLARFAVEEHNKKQNALLEFEKVVSAKQQVVSGTLYTITLEAKDGGQKKVYEAKVWEKAWLNFKEVQEFKLVGDAPA

SEQ ID NO: 4615 - protein, 97 aa, Glycine max; identical to SEQ ID NO: 4614

SEQ ID NO: 4616 - protein, 92 aa, Glycine max
GNRDVTGSQNSVEIDALARFAVEEHNKKQNALLEFEKVVTAKQQVVSGTLYTITLEAKDGGQKKVYEAKVWEKSWLNFKEVQEFKLVGDAPA

SEQ ID NO: 4617 - protein, 200 aa, Glycine max
MATETKVQELGGITDVHGAANSVEINNLARFAVEEQNKRENSVLEFVRVISAKQQVVAGVNYYITLEAKDGLIKNEYEAKVWVREWLNSKELLEFKPVNVSSTPIGGITDVTANSLEIDILARFAVDQHNKKENANLEFVGVIRAKQQVVEGFIYYITLEAKDGETKNVYETKVWVRSWLNSKEVLEFKPISINPLSVSV

SEQ ID NO: 4618 - protein, 100 aa, Glycine max
LGGFTDITGAQNSIDIENLARFAVDEHNKKENAVLEFVRVISAKKQVVSGTLYYITLEANDGVTKKVYETKVLEKPWLNIKEVQEFKPITVAVNPLSVTV

SEQ ID NO: 4619 - protein, 97 aa, Vigna unguiculata
MAALGGNRDVAGNQNSLEIDSLARFAVEEHNKKQNALLEFGRVVSAQQQVVSGTLYTITLEAKDGGQKKVYEAKVWEKPWLNFKELQEFKHVGDAPA

SEQ ID NO: 4620 - protein, 101 aa, Manihot esculenta
MATLGGIKEVEESANSVEIDNLARFAVDDYNKKQNALLEFKRVVSTKQQVVAGTMYYITLEVADGGQTKVYEAKVWEKPWLNFKEVQEFKPIGVAPSDSTA

SEQ ID NO: 4621 - protein, 250 aa, Oryza sativa (japonica cultivar-group)
MRVAATTRPASSSAAAPLPLFLLLAVAAAAAALFLVGSASLAMAGHVLGGAHDAPSAANSVETDALARFAVDEHNKRENALLEFVRVVEAKEQVVAGTLHHLTLEALEAGRKKVYEAKVWVKPWLDFKELQEFRNTGDATTFTNADLGAKKGGHEPGWRDVPVHDPVVKDAADHAVKSIQQRSNSLFPYELLEIVRAKAEVVEDFAKFDILMKLKRGNKEEKFKAEVHKNLEGAFVLNQMQQEHDESSSQ

SEQ ID NO: 4622 - protein, 235 aa, Lycopersicon esculentum
MRVIRSRAILIVLFLVSAFGLSEQGKSGGFCSEEMATLGGVHDSHGSSQNSDEIHSLAKFAVDEHNKKENAMIELARVVKAQEQTVAGKLHHLTLEVMDAGKKKLYEAKVWVKPWLNFKELQEFKHVEDVPTFTSSDLGVKQVEQNSGLKSVPVHDPVVEEAAEHAIKTIQQRSNSIHPYKLQEIVHANAEMADDSTKLHLVIKTSRGGKEEKFKVQVQHNNEGAFHLNRMEPDN

SEQ ID NO: 4623 - protein, 94 aa, Lycopersicon esculentum
GGIREAGGSENSLEINDLARFAVDEHNKKQNALLEFGKVVNVKEQVVAGTMYYITLEATEGGKKKAYEAKVWVKPWQNFKQVEDFKLIGDAATA

SEQ ID NO: 4624 - protein, 254 aa, Lycopersicon esculentum
AREKAHLEFVEVLNVKEQVVAGMMYYITLAVTDAGKKKIYEANIWVKEWEHFIKVVEFKPVSDDSVKTGDIVDVPDPNIPPLQDLARFAVQDYNKAQNAHLEYVENLNVKEQLVAGTLYYITLVATDAGKKKIYETKIWVKEWEDFKKVVEFKLVGDDSPNPGGITNVPFPNLPEFKDLARFAVQDYNKKENAHLEFVENLNVKEQVVAGIIYYITLVATDAGKKKIYETKILVKGWENFKEVQDFKLVGDAIK

SEQ ID NO: 4625 - protein, 156 aa, Lycopersicon esculentum
AHLEYVENLNVKEQLVAGTLYYITLVATDAGKKKIYETKIWVKEWEDFKKVVEFKLVGDDSPNPGGITNVPFPNLPQFKDLARFAVQDYNKKENAHLEFVENLNVKEQVVAGIIYYITLVATDAGKKKIYETKILVKGWENFKEVQEFKLVGDATK

SEQ ID NO: 4626 - protein, 282 aa, Helianthus annuus
MSLVGGFTEVKDFANSIVIDDLARFAVDEYNKKQNTLLEFRKVLNAKEQIVSGTLYYITLDAANGGIIKTYEAKVWVKKWENLKELQEFKPVDAATSVIGGITEVKDFANSLEIEDLARFAVDEHNKKQNTLLEFGKVLNAKEQIVAGKLCYITLEATDGGVKKTYEAKVWVKPWENFKELQEFKPVDAATPVIGGITEVKDFANSLVIDDLARFAVDEYSKKQNTLLEFERVLDAKQQIVAGTMYYFILEATVGGVKNTYVAKVLLKPDNSKELKEFKHLY

SEQ ID NO: 4627 - protein, 82 aa, Helianthus annuus
SLEIDELARFAVDEHNKKQNALLEFGKVVNTKEQVVAGKMYYITLEATNGGVKKTYEAKVWVKPWENFKELQEFKPVDAATS

SEQ ID NO: 4628 - protein, 279 aa, Triticum aestivum
  unsure (1)..(279): unsure at all Xaa locations
MXHMIWMPATESKPHPRTRSHREAKRNRKGLLRQSMRVAATRPAXXPLPXALLAALALLFLVGSASLAIGAMASHVLGGKSENPDAANSLETDGLARFAVDEHNKRENALLEFVRVVEAKEQTVAGTLHHLTLEALEAGRKKVYEAEVWVKPWLDFKELQEFRHTGDATSFTISDLGAKRGGHEPGWRDVPVHDPVVKDAASHAVKSIQQRSNSLLPYELVEIVRAKAEVVEDFAKFDILMKLKRGTKEEKMKAEVHKNLEGAFVLNQMQPEHDESSSQ

SEQ ID NO: 4629 - protein, 243 aa, Zea mays
  unsure (1)..(243): unsure at all Xaa locations
MRVAATRPAXXPLPXALLAALALLFLVGSASLAIGAMASHVLGGKSENPAAANSLETDGLARFAVDEHNKRENALLEFVRVVEAKEQTVAGTVHHLTLEALEAGRKKVYEAKVWVKPWLDFKELQEFRHTGDATSFTISDLGAKRGGHEPGWRDVPVHDPVVKDAASHAVKSIQQRSNSLLPYELVEIVRAKAEVVEDFAKFDILMKLKRGTKEEKMKAEVHKNLEGAFVLNQMQPEHDESSS

SEQ ID NO: 4630 - protein, 247 aa, Zea mays
MRVAATRTAAAAAAHPPSAFLLLLVLLGCASLAIGGAAMAGHVLGGVKENPAAANSAESDGLGRFAVDEHNRRENALLEFVRVVEAKEQVVAGTLHHLTLEAVEAGRKKLYEAKVWVKPWLDFKELQEFSHKGDATAFTNADLGAKEGGHEPGWREVPVEDPVVKDAAHHAVKSIQERSNSLFPYELLEILRAHAQVVEDFAKFDILMKLKRGSKEEKIKAEVHKSLEGAFVLNQHQPAEHDESSSQ

SEQ ID NO: 4631 - protein, 274 aa, Zea mays
MKMAAENGSQSSLKRIEPPDFAVLLHYQSMRVAATRAAAAAHPPSAFLLLLVLLGCASLAIGGAAMAGHVLGGVKENPAAANSAESDGLGRFAVDEHNRRENALLEFVRVVEAKEQVVAGTLHHLTLEAVEAGRKKLYEAKVWVKPWLDFKELQEFSHKGDATAFTNADLGAKQGGHEPGWREVPVEDPVVKDAAHHAVKSIQERSNSLFPYELLEILRAHAQVVEDFAKFDILMKLKRGSKEEKIKAEVHKSLEGAFVLNQHQPAEHDESSSQ

SEQ ID NO: 4632 - protein, 274 aa, Zea mays
MKMAAENGSQSNLKRIKPPDFAVLLHYQSMRVAATRAAAAAHPPSAFLLLLVLLGCASLAIGGAAMAGHVLGGVKENPAAANSAESDGLGRFAVDEHNRRENALLEFVRVVEAKEQVVAGTLHHLTLEAVEAGRKKLYEAKVWVKPWLDFKELQEFSHKGDATAFTNADLGAKQGGHEPGWREVPVEDPVVKDAAHHAVKSIQERSNSLFPYELLEILRAHAQVVEDFAKFDILMKLKRGSKEEKIKAEVHKSLEGAFVLNQHQPAEHDESSSQ

SEQ ID NO: 4633 - protein, 275 aa, Zea mays
MTHASAPRRPKQSQVNQTARLRSPPPHYQSMRVAATRAAAAAHPPSAFLLLLLLLGCASLAIGGAAMAGHVLGGVKENPAAANSAESDGLGRFAVDEHNRRENALLEFVRVVEAKEQVVAGTLHHLTLEAVEAGRKKLYEAKVWVKPWLDFKELQEFSHKGDATAFTNADLGAKQGGHEPGWREVPVEDPVVKDAAHHAVKSIQERSNSLFPYELLEILRAHAQVVEDFAKFDILMKLKRGSKEEKIKAEVHKSLEGAFVLNQHQPAEHDESSSQ

SEQ ID NO: 4634 - protein, 243 aa, Zea mays
MRVAPATRTAAAAHPPSAFLLLLGCASLAIGGAAMAGHVLGGVKENPAAANSAESDGLGRFAVDEHNRRENALLEFVRVVEAKEQVVAGTLHHLTLEAVEAGRKKLYEAKVWVKPWLDFKELQEFSHKGDATAFTNADLGAKEGGHEPGWREVPVEDPVVKDAAHHAVKSIQERSNSLFPYELLEILRAHAQVVEDFAKFDILMKLKRGSKEEKIKAEVHKSLEGAFVLNQHQPAEHAESSSQ

SEQ ID NO: 4635 - protein, 236 aa, Zea mays
  unsure (1)..(236): unsure at all Xaa locations
MRVAPATRTAAAAHPPSAFLLLLGCASLAIGGAAMAGHVLGGVKENPAAANSAESDGLGRFAVDEHNRRENALLEFVRVVEAKEQVVAGTLHHLTLEAVEAGRKKLYEAKVWVKPWLDFKELQEFSHKGDATAFTNADLGAKQGGHEPGWREVPVEDPVVKDAAHHAVKSIQERSNSLFPYELLEILRAHAQVVEDFAKFDILMKLKXXLEGAFVLNQHQPAEHDESSSQXTDVTV

SEQ ID NO: 4636 - protein, 208 aa, Zea mays
  unsure (1)..(208): unsure at all Xaa locations
XSPPREPSSLSTVSETDXALLLLRLPTCTTRGPLALEFTRAAGCHEPSVSGTLHHLTLDAVXVGWKKLYEGKVWIKSWIYFSELLQFIHKGDATDFTNVELYDKLRGHEPGWREDPKDDPVFKDAVHHAVKSIQERSNSRYPYELLEILRAHAQXVCADFARFDILMTLKRGSREDKIKAVAHKSLEGVFVLNQHQPAEHDEFSTSVN

SEQ ID NO: 4637 - protein, 157 aa, Zea mays
  unsure (1)..(157): unsure at all Xaa locations
XRVCALTRPXARAADHPPSAFLLLLLLLGCASLAIGGAXXMARHVLLGVKENLPAANSGEGGGLCRFSGGEHNRHENALMEVLRLGEAKEQVEGCTLHHLTLEAVEAGRKKLYKAKGWVKPWLDFKELQEFRHKGGXATVFTNDRLGAKQGGHDPAW

SEQ ID NO: 4638 - protein, 163 aa, Zea mays
  unsure (1)..(163): unsure at all Xaa locations
WVPRGRPGARLAVLLLLYSSTRACVLPXPTTRLATASLAIGAAMAMVGHVLGAREGEPAAANSAESDELGRFTVDEHNKRENALLEFVRVVEVKEXVVAGTLHHLTLEAIKTGKKKIYAAKVWVKPXLDFKNLQEFIHKGEVTTGTNADLSVXAPKKGTSPAY

SEQ ID NO: 4639 - protein, 140 aa, Zea mays
  unsure (1)..(140): unsure at all Xaa locations
LRCPAPLPEHVARTXTRTAGADVDHPPSAFLLLLVLLGCASLASGGAPMAGHVLGGVKENPATANSGEYDGLGRFSGDEHNRRENALLESELVMEANEQVEVGTLHHLTLEDLEAGRKKLYEALDWVKPWLDFQELQEFX

SEQ ID NO: 4640 - protein, 106 aa, Zea mays
  unsure (1)..(106): unsure at all Xaa locations
PSPLPEHALAAVHPPSAFLLLLGCASLAIVGAAMAGHVLGGVKENPVAANSAESDGLERFPVDEHNRRENALLELVRVEEAKEQVVAGTLHHLTLEAVEAGRKKLX

SEQ ID NO: 4641 - protein, 138 aa, Zea mays
  unsure (1)..(138): unsure at all Xaa locations
PDFTFLLHYQSMLVGATRTAAAVDDHPTSAFLLLLVLLGXASIAIGGAXXMAGHVLWGGKENPAGVNNAKFHRLARLADVKHNRRTNALLKIVRVVDAKEQVVAWTLNHLTLDAVXARRKKLYQAQVWGKPWLDFKEX

SEQ ID NO: 4642 - protein, 110 aa, Sandersonia aurantiaca
MATLGAPRDVPAGGENSADVEELARFAVAEHNKKENALLEFGRVVKAKEQVVAGTLHHLTVEAIDAGNKKLYEAKVWVKPWLNFKELQEFRHAGDSPSVTPADLGAKRGD

SEQ ID NO: 4643 - protein, 107 aa, Hordeum vulgare subsp. vulgare
MAEAAHGGGLRGRGVLLGGVQDAPAGRENDLETIELARFAVAEHNAKANALLEFEKLVKVRQQVVAGCMHYFTIEVKEGGAKKLYEAKVWEKAWENFKQLQEFKPAA

SEQ ID NO: 4644 - protein, 96 aa, Cucumis sativus
MSSSEIGGYVPCKDPNDPHVKDIAEWAVAEYNKSQGHHLTLVSILKCESQVVAGVNWRLVLKCKDENNGEGNYETVVWEKIWENFRQLITFDHLLT

SEQ ID NO: 4645 - protein, 122 aa, Arabidopsis thaliana
MTSKVVFLLLLSLVVLLLPLYASAAARVGGWSPISNVTDPQVVEIGEFAVSEYNKRSESGLKFETVVSGETQVVSGTNYRLKVAANDGDGVSKNYLAIVWDKPWMKFRNLTSFEPANNGRFL

SEQ ID NO: 4646 - protein, 122 aa, Arabidopsis thaliana
MTSKVVFLLLLSLVVVLLPLYASAAARVGGWSPISNVTDPQVVEIGEFAVSEYNKRSESGLKFETVVSGETQVVSGTNYRLKVAANDGDGVSKNYLAIVWDKPWMKFRNLTSFEPANNGRFL

SEQ ID NO: 4647 - protein, 117 aa, Arabidopsis thaliana
MMMKSLICLSLILLPLVSVVEGLGGGGGLGSRKPIKNVSDPDVVAVAKYAIEEHNKESKEKLVFVKVVEGTTQVVSGTKYDLKIAAKDGGGKIKNYEAVVVEKLWLHSKSLESFKAL

SEQ ID NO: 4648 - protein, 117 aa, Arabidopsis thaliana
MMMKSLICLSLILLPLVSVVEGLGGGGGLGSRKPIKNVSDPDVVAVAKYAIEEHNKESKENLVFVKVVEGTTQVVSGTKYDLKIAAKDGGGKIKNYEAVVVEKLWLHSKSLESFKAL

SEQ ID NO: 4649 - protein, 350 aa, Oryza sativa (japonica cultivar-group)
MVTDRSARSDNKPTATTTSTRSIFRKKEHGQEQSPNFLEVAALQVTRLDGPGGSTRRSLSWTNGPSHDQSPQGYPARRPVNRDASNAGAGLDLCCSPAARTGGLAISEAAISITYVCRFGAAAFAKNHCVRFGAMLCTAITVYRRRTYPPTQHTDSSDTSYNNIQRRDNHPSLASFPTLTSHKNIVHVGCVSMAARCPVGVASVLLLIVLVTVASAASGARSGGGGGGGIRELRGGGAGRRVGGRTEVRDVEGDREVQELGRFSVEEHNRRRRSRDCGDVRLEFGRVVAAQRQVVSGLKYYLRVAAAEEGAAGQNGGEPRVFDAVVVVKPWLESRTLLTFAPAADSPNES

SEQ ID NO: 4650 - protein, 107 aa, Oryza sativa
MAEEAQSHAREGGRHPRQPAGRENDLTTVELARFAVAEHNSKANAMLELERVVKVRQQVVGGFMHYLTVEVKEPGGANKLYEAKVWERAWENFKQLQDFKPLDDATA

SEQ ID NO: 4651 - protein, 107 aa, Oryza sativa; identical to SEQ ID NO: 4650

SEQ ID NO: 4652 - protein, 109 aa, Oryza sativa
  unsure (1)..(109): unsure at all Xaa locations
MAEEAQXSHAXREGGRHPRQPAGRENDLTTVELARFAVAEHNSKANAMLELERVVKVRQQVVGGFMHYLTVEVKEPGGANKLYEAKVWERAWENFKQLQDFKPLDDATA

SEQ ID NO: 4653 - protein, 106 aa, Oryza sativa
MAEEAQSHAREGGRHPRQPAGRENDLTTVELARFAVAEHNSKANAMLELERVVKVRQQVVGGFMHYLTVEVKEPGGANKLYEAKVWERAWENFKQLQDFKPLDATA

SEQ ID NO: 4654 - protein, 107 aa, Triticum aestivum
MAEAAQGGGLRGRGALLGGVQDAPAGRENDLETIELARFAVAEHNTKANALLEFERLVKVRQQVVAGCMHYFTIEVKEGGAKKLYEAKVWEKAWENFKQLQDFKPAA

SEQ ID NO: 4655 - protein, 103 aa, Triticum aestivum
MAEAAQGGGLRGRGALLGGVQDAPAGRENDLETIELARFAVAEHNTKANALLEFERLVKVRQQVVAGCMHYFTIEVKEGGAKKLYEAKVWEKAWENFKQLQDF

SEQ ID NO: 4656 - protein, 107 aa, Triticum aestivum
MAEAAQGGGLRGRGVLLGGVQDAPAGRENDLATIELARFAVAEHNTKANALLEFERLVKVRQQVVAGCMHYFTIEVKEGGAKKLYEAKVWEKAWENFKQLQDFKPAA

SEQ ID NO: 4657 - protein, 107 aa, Triticum aestivum
MAEAAQGGGLRGRGVLLGGVQDAPAGRENDLATIKLARFAVAEHNTKANALLEFERLVKVRQQVVAGCMHYFTIEVKEGGAKKLYEAKVWEKAWENFKQLQDFKPAA

SEQ ID NO: 4658 - protein, 142 aa, Zea mays
  unsure (1)..(142): unsure at all Xaa locations
RPASSVSSLLSSPFSPSLHSAAHRHRTTAAIDGXGTQXAARGXMVGDVRDAPVGRENDLEAIELARFAVAEHNSKTNAMLEFERLVKVRHQVVAGTLHHFTVEVKEAGGGEKKLYEAKVWEKAWENFKQLQSFELVGDAAVA

SEQ ID NO: 4659 - protein, 142 aa, Zea mays
  unsure (1)..(142): unsure at all Xaa locations
WPASSVSSLLSSPFSPSLHSAAHRHRTTAAIDGXGTQXAARGXMVGDVRDAPVGRENDLEAIELARFAVAEHNSKTNAMLEFERLVKVRHQVVAGTLHHFTVEVKEAGGGEKKLYEAKVWEKAWENFKQLQSFELVGDAAVA

SEQ ID NO: 4660 - protein, 177 aa, Zea mays
  unsure (1)..(177): unsure at all Xaa locations
RPGLGKKKKKKKKKKKKKKKENLETARATTSGSGRHHPSRLVSSRLSSPFPPSLHSAAHRHRTTAAIDGXGTQRXRPVMVGDVRDAPVGRENDLEAIELARFAVAEHNSKTNAMLEFERLVKVRHQVVAGTLHHFTVEVKEAGGGEKKLYEAKVWEKAWENFKQLQSFELVGDAAVA

SEQ ID NO: 4661 - protein, 158 aa, Zea mays
  unsure (1)..(158): unsure at all Xaa locations
SRPAGKKKKLLPAVVAGIIRLVSSRLSSPFPPSLHSAAHRHRTTAAIDGXGTQRAARGXMVGGVRDAPVGRENDLEAIELARFAVAEHNSKTNAMLEFERLVKVRHQVVAGTLHHFTVEVKEAGGGEKKLYEAKVWEKAWENFKQLQSFELVGDAAVA

SEQ ID NO: 4662 - protein, 155 aa, Zea mays
  unsure (1)..(155): unsure at all Xaa locations
LGTSRPAGTSGSGRIIRLVSSRLSSPFPPSLHSAAHRHRTTAAIDGXGTQRAARGXMVGGVRDAPVGRENDLEAIELARFAVAEHNSKTNAMLEFERLVKVRHQVVAGTLHHFTVEVKEAGGGEKKLYEAKVWEKAWENFKQLQSFELVGDAAVA

SEQ ID NO: 4663 - protein, 179 aa, Zea mays
  unsure (1)..(179): unsure at all Xaa locations
AGRVWEKKKKKKKKKKKKKKKKKKKKKPPPGGKGAGIIRSRLVSSRLSSPFPPSLHSAAHRHRTTAAIDGXGTQRAARGXMVGGVRDAPVGRENDLEAIELARFAVAEHNSKTNAMLEFERLVKVRHQVVAGTLHHFTVEVKEAGGGEKKLYEAKVWEKAWENFKQLQSFELVGDAAVA

SEQ ID NO: 4664 - protein, 166 aa, Zea mays
  unsure (1)..(166): unsure at all Xaa locations
SPVQIVWSQAYNTVRNIFALVNLLRQPVDEDEKRSSPFPPSLHSAAHRHRTTAAIDGXGTQRAARGXMVGGVRDAPVGRENDLEAIELARFAVAEHNSKTNAMLEFERLVKVRHQVVAGTLHHFTVEVKEAGGGEKKLYEAKVWEKAWENFKQLQSFELVGDAAVA

SEQ ID NO: 4665 - protein, 157 aa, Zea mays
  unsure (1)..(157): unsure at all Xaa locations
HWVPRGRPGLPAVVAGIIRLVSSRLSSPFPPSLHSAAHRHRTTAAIDGXGTQRAARGXMVGGVRDAPVGRENDLEAIELARFAVAEHNSKTNAMLEFERLVKVRHQVVAGTLHHFTVEVKEAGGGEKKLYEAKVWEKAWENFKQLQSFELVGDAAVA

SEQ ID NO: 4666 - protein, 693 aa, Nostoc sp. PCC 7120
MAVIGCLVLPSDVTGLGSPVSDKNFITSVKMTSINHDPTFSGNSRSTLKKRTLLFRYLAEINLIFGLWYLQWRITNSINFDALWLSIPLLLAEIYSYLGGVMFVIGLWRPLVRQIKSLDQLTPSLPQTDWPIVDVFITCYNEPPEMVEQTAQAALAIDYPPTKLYVYVLDDGNSPAMRAMTEKLCIADLQSPLLQQEANRIDAERSHLVERLQKLESFTSNIQVAEEWLSKSSSVPNQDKTTDEVLAQSLQQFIRWLSPKHHSIAERLKTERQVLAGAIRQKELELVELTRFRYIARPKPAGVPHHAKAGNLNYAIFSGETSGEFILTLDADHIPKPQFLKRVLPYFYTYNLFNGKYEQNRIAFVQTPQDFYNIPPSDPFGHRASLFYGPLQQGKDGMNAAFYTGTNAILRREALINVGLQYFADDFTKDEKRLDEFQLVGGLSSNSITEDMNTAMRLHGAGWKSVYHHELLAEGLAPDDLSSTLKQRLRWAQGTIQVLVKENPLRKSGLTFWQRLQYFKTMYSYFSGFATLIFISCPIIYFFTEIVPVKTYGTDFILHFLPTFIINRLTFVVAIWGIPASEIWRSEQYAIALFPIFIQAVWSVFTGQKMNFQVTPKERQSGIYLSMIWPQLLIFFLTIIGIFWSLYSFAIGRLNHPWVNLLNSSWAVYNLLLLSGIIRASVWQMPKYDSKKV

SEQ ID NO: 4667 - protein, 298 aa, Chloroflexus aurantiacus
EIMQSLHDEAVLAELARRDRSPLAAIETVRQLIPLLVNEAMDYLPISTISVTEDMSTSMRLHACGWRSVYHDEILAHGLAPEDLRSALQQRLRWAQGTIQVFLRENPLFLPGLSIGQRLAYLDTMWSYFSGLPTIIYLIAPVLFLIFGLLPVNALSAEFFWRLTPYLLVNQLLFAVISWGRPTWRGQQYSLALFPIWIKAVVTAAANVWFGKKLGFIVTPKTRQAGRYFGLVRWQLLMMVLLAVSIGVGLLQLALGWRTDGMPVLVNVFWAVYDLVMLSVVIDAALYQPAEESSSEYA

SEQ ID NO: 4668 - protein, 194 aa, Malva sylvestris
HVGLNANGEPFVSCHECNFPICKTCFEYDIKEGRKACLRCASPYDENLLDDVEKASGEQSMMAAQSNKSQDVGVHARHISSVSTLDSEMTEDNGNPIWKNRVESWKEKKNKKKKPTATTKADIEAEVPPEQQMEDKPAPDASQPLSTIIPIPKSKLAPYRTVIIMRLIILGLFFHYRVTNPVDSAFGLWLTSVI

SEQ ID NO: 4669 - protein, 293 aa, Corynebacterium efficiens YS-314
MEAVSKLLDALQIDRSDEAQPIQPIATISVTEDMATAMQLHSQGWRSVYHHEILARGLAPDDLRTMLTQRLRWAQGTLQVMLRDNPMVKKGLSAGQRLMYFATMWSYLSGFTAVIYLAAPVIYLVFGVMPVTAWSGDFFVRFLPYFIINQLLFLFVARGMRTWRGQQYSLALFPVWIKACWTATLNVWFGRPLDFAVTKKDGRDERGIPFRQIWPQLTAMVVLVLAMAIGVGRVIVGVADSMGTIVNVLWVIYDLVVLSVILQAAFYRGFTEPAEPEPESVGAAEISKKPEGE

SEQ ID NO: 4670 - protein, 205 aa, Gossypium raimondii
HTCGEHVGLNVNGEPFVACHECNFPICKSCFEYDLKEGRKACLRCGSPYDENLLDDVEKATGDQSTMAAHLNKSQDVGIHARHISSVSTLDSEMAEDNGNSIWKNRVESWKEKKNKKKKPATTKVEREAEIPPEQQMEDKPAPDASQPLSTIIPIPKSRLAPYRTVIIMRLIILGLFFHYRVTNPVDSAFGLWLTSVICEIWFAF

SEQ ID NO: 4671 - protein, 1129 aa, Mesotaenium caldariorum
MESSTGLVAGSRNRNQFVVIPADEEQRRNVTTPAASVCQICGDDVGLSATGELFVACVECGYPVCRPCYEYERKEGSKACPQCKTVYKRLKGSPRVPTDEEDDDIEDLENEFRGHSHVAHKSHDQHDHDHLDDVESVRSGRNTHDPYATYEPYRVQPQVPLLTDAHYETGSEYGGHTTNSDYGGHGVGSDYGGKTNPSEYSHHHHSHHQAIMVPGGQPGSDAGVHAGSFVNGDGISAKSADPKDPASFGYGSIAWKDRVDAWKQRQDKMQMTTAPGGVLVDANKGGPGGPEDPYNGGNDLPLMDESRQPLSRKVDFNMGLIQPYRLMIVIRLVVLAFFLRYRILNPAPSRPLWMTSVICEIWFAVSWILDQFPKWMPINRETYLDRLNLRFEKEGEPSQLQAVDLFVSTVDPEKEPPLTTANTLLSILSIDYPVDKVSCYLSDDGAAMLTFEALSETSEFARRWVPFVKKYNIEPRAPEMYFSQKIDYLKDKIQPSFVKERRIMKREYEEFKVRINALVSKSMKVPEDGWTMQDGTPWPGNNSRDHPGMIQVFLGPSGGLDTDGNALPRLVYVSREKRPGFNHHKKAGAMNALIRVSAVLTNAPYILNLDCDHYVNNSKALRHAMCFMMDPNVGKKVCYVQFPQRFDGIDRSDRYANHNTVFFDINLRGLDGLQGPVYVGTGCCFRRHALYGYEPKKKESSRGCCSMVFCGCCGLCGRKKEKSAVDNPLKTGKFKGSDPSLPMYNIDDLEDGDGQERESLVALKQFEKRFGQSPVFVLSTFHEEGGSVASSSASSTLKEAIHVISCGYEDKTEWGKEVGWIYGSVTEDILTGFKMHCRGWRSIYCMPKIAAFKGSAPINLSDRLQQVLRWALGSVEIFLSRHCPIWYGWSGSRLKLLQRLAYINTVVYPFTAFPLLAYCTLPAICLLTNQFIIPEISSLNSLWFIALFISIFACAFLEMRWSGVGMEEWWRNEQFWVIGGVSSHLYAVFQGLLKVLAGIDTNFTVTAKAADDGEAYADLYLFKWTSLLIPPTTLIIINLIGAVAGVANAINNGYDQWGPLFGKLFFAFWVVVHLYPFLKGLMGKSNRTPTLIIVWSVLLASIFSLLWVKINPFTNTTNGPALVQCGIRC

SEQ ID NO: 4672 - protein, 239 aa, Mesotaenium caldariorum
DQFPKWNPINRETNLGRLQLRYGDALDAVDLFVSTVDPGKEPPLTTANTLLSILAMDYPVEKLNCYLSDDGASKLTFDAVNETSGFAKKWVPFCKKFAVEPRAPEAYFAQKADFLKGQVQSSFVNERRNMKKEYEEFKVRINHLVSDFQNVPEDGWTMADGSYWPGNNARDHPGMIQVFLGPSGGKDVEGNALPRLVYVSREKRPGFNHHKKAGAMNALIRVSALLTNAPHILILDCDH

SEQ ID NO: 4673 - protein, 978 aa, Zinnia elegans
MMHPETPICNTCGEHIGFGPDGNGVFVGCHECNFPICKSCLEYEINEGHTACIQCGTPYDGNLTKVGEMEKEPVTRNTMAAHLSNSQDAGLHARNVSTVSTVDTEMTDESGNPIWKNRVESWKDKKNKKKKGGDKVAKEVQVPEDQHIEEKQQSADPNAMQPPSQIIPIPKSQITPYRIVIILRLIILGLFFHYRITNPVESSYGLWLTSVICEIWFAISWVLDQFPKWYPINRVTFTDELSARYEREGEPSELAAVDFFVSTVDPLKEPPLITANTVLSILAVDYPVEKVSCYVSDDGAAMLTFESLVETAEFARKWVPFCKKFSIEPRAPEFYFSQKIDYLKDKVQPSFVKERRAMKRDYEEYKVRVNALVAKAQKTPEEGWTMQDGTPWPGNNPRDHPGMIQVFLGHSGAHDIEGNELPRLVYVSREKRPGYQHHKKAGAENALVRVSAVLTNAPYILNLDCDHYVNNSKAVREAMCFMMDPQVGRDVCYIQFPQRFDGIDRSDRYANRNTVFFDVNMKGLDGIQGPVYVGTGCVFYRQALYGYGPQSLPTLPSPSSSSSCCCCGPKKPKKDLEEFKRDARRDDLNAAIFNLKEIESYDDYERSLLISQMSFEKTFGMSSVFIESTLMENGGLAESANPATMINEAIHVISCGYEEKTAWGKEIGWIYGSVTEDILTGFKMHCRGWRSIYCMPVRPAFKGSAPINLSDRLHQVLRWALGSVEIFLSRHCPLWYGWGGGRLKLLQRLAYINTIVYPFTSLPLVAYCTLPAICLLTGKFIIPTLSNIAAVWFLGLFLSIITTSVLEIRWSGVSIEELWRNEQFWVIGGVSAHLFAVFQGFLKMLAGVDTNFTVTAKAADDQEFGELYMIKWTTVLIPPTTLLVLNLVGVVAGFSDALNKGYEAWGPLFGKVFFAFWVILHLYPFLKGLMGRQNRTPTIVILWSVLLASVFSLVWVKIDPFVSKGDSNLTQGCIAIDC

SEQ ID NO: 4674 - protein, 205 aa, Gossypium herbaceum
HTCGEHVGLNVNGEPFVACHECNFPICKSCFEYDLKEGRKACLRCGSPYDENLLDDVEKATGDQSTMAAHLSKSQDVGIHARHISSVSTLDSEMTEDNGNPIWKNRVESWKEKKNKKKKPATTKVEREAEIPPEQQMEDKPAPDASQPLSTIIPIPKSRLAPYRTVIIMRLIILGLFFHYRVTNPVDSAFGLWLTSVICEIWFAF

SEQ ID NO: 4675 - protein, 189 aa, Gossypium longicalyx
HVGLNGNGKPFVACHDCNFPICKTCFDYELKEGRKACLRCGNPYDENLLDDVEKASGDRSTMAAHMDKSQDAGIHARHISSVSTLDSEMTEDNGNPIWKNRVESWKEKKNKKKKTSIKVEIEAQVPPEQLMEDKPAADAFQPLSTVIPIPKSRLAPYRTVIIMRLIILGLFFHYRVTNPVDSAFALWLT

SEQ ID NO: 4676 - protein, 197 aa, Gossypium longicalyx
  unsure (1)..(197): unsure at all Xaa locations
VVEHVGLNVNGEPFVACHECNFPICKSCFEYDLKEGRKACLRCGNPYDENLLDDVEKATGDQSTMAAHLSKSQDVGIHARHISSVSTLDSEMTEDNGNPIWKNRVESWKEKKNKKKKPAANKVEREAEIPPEQQMEDKPAPDASQPLSTIIPXPKSRLAPYRTVIIMRLIILGLFFHYRVTNPVDSAFGLWLTSVIW

SEQ ID NO: 4677 - protein, 197 aa, Gossypium trilobum
VVEHVGLNVNGEPFVACHECNFPICKSCFEYDLKEGRKACLRCGSPYDENLLDDVEKATGDQSTMAAHLSKSQDVGIHARHISSVSTLDSEMAEDNGNPIWKNRVESWKEKKNKKKKPATTKVEREAEIPPEQQMEDKPAPDASQPLSTIIPIPKSRLAPYRTVIIMRLIILGLFFHYRVTNPVDSAFGLWLTSVIC

SEQ ID NO: 4678 - protein, 189 aa, Gossypium trilobum
HVGLNGNGKPFVACHDCNFPICKTCFGYELKEGRKACLRCGNPYDENLLDDAEKASGDRSTIAAHMDKSQDAGIHARHISSVSTLDSEMTEDNGNPIWKNRVESWKEKKSKKKKTSIKVEIEAQVPPEQLMEDKPAADAFQPLSTVIPIPKSRLAPYRTVIIMRLIILGLFFHYRVTNPVDSAFALWLT

SEQ ID NO: 4679 - protein, 197 aa, Gossypium gossypioides
VVEHVGLNINGEPFVACHECNFPICKSCFEYDLKEGRKACLRCGSPYDENLLDDVEKATGDQSTMAAHLSKSQDVGIHARHISSVSTLDSEMAEDNGNPIWKNRVESWKEKKNKKKKPATTKVEREAEIPPEQQMEDKPAPDASQPLSTIIPIPKSRLAPYRTVIIMRLIILGLFFHYRVTNPVDSAFGLWLTSVIC

SEQ ID NO: 4680 - protein, 189 aa, Gossypium gossypioides
HVGLNGNGKPFVACHDCNFPICKTCFDYELKEGRKACLRCGNPYDENLLDDAEKASGDRSTLAAHMDKSQDAGIHARHISSVSTLDSEMTEDNGNPIWKNRVESWKETKNKKKKTSIKVEIEAQVPPEQLMEDKPAADAFQPLSTVIPIPKSRLAPYRTVIIMRLIILGLFFHYRVTNPVDSAFALWLT

SEQ ID NO: 4681 - protein, 189 aa, Gossypium turneri
HVGLNGNGKPFVACHDCNFPICKTCFDYELKEGRKACLRCGNPYDENLLDDAVKASGDRSTIAAHMDKSQDAGIHARHISSVSTLDSEMTEDNGNPIWKNRVESWKEKKNKKKKTSIKVEIEAQVPPEQLMEDKPAADAFQPLSTVIPIPKSRLAPYRTVIIMRLIILGLFFHYRVTNPVDSAFALWLT

SEQ ID NO: 4682 - protein, 197 aa, Gossypium turneri
VVEHVGLNVNGEPFVACHECNFPICKSCFEYDLKEGRKACLRCGSPYDENLLDDVEKATGDQSTMAAHLSKSQDVGIHARHISSVSTLDSERAEDNGNPIWKNRVESWKEKKNKKKKPATTKVEREAEIPPEQQMEDKPAPDASQPLSTIIPIPKSRLAPYRTVIIMRLIILGLFFHYRVTNPVDSAFGLWLTSVIC

SEQ ID NO: 4683 - protein, 197 aa, Gossypium davidsonii
VVEHVGLNVNGEPFVACHECNFPICKSCFEYDLKEGRKACLRCGSPYDENLLDDVEKATGDQSTMAAHLSKSQDVGIHARHISSVSTLDSEMAEDNGNPIWKNRVESWKEKKNKKKKPATTKVEREAEIPPEQQMEDKPAPDASQPLSTIIPISKSRLAPYRTVIIMRLIILGLFFHYRVTNPVDSAFGLWLTSVIC

SEQ ID NO: 4684 - protein, 189 aa, Gossypium davidsonii
HVGLNGNGKPFVACHDCNFPICKTCFDYELKEGRKACLRCGNPYDENLLDDAEKASGDRFTIAAHMDKSQDAGIHARHISSVSTLDSEMTEDNGNPIWKNRVESWKEKKNKKKKTSIKVEIEAQVPPEQLMEDKPAADAFQPFSTVIPIPKSRLAPYRTVIIMRLIILGLFFHYRVTNPVDSAFALWLT

SEQ ID NO: 4685 - protein, 189 aa, Gossypium schwendimanii
HVGLNGNGKPFVACHDCNFPICKTCFDYELKEGRKACLRCGNPYDENRLDDAEKASGDRSTIAAHMDKSQDAGIHARHISSVSTLDSEMTEDNGNPIWKNRVESWKEKKNKKKKTSIKVEIEAQVPPEQLMEDKPATDAFQPLSTVIPIPKSRLAPYRAVIIMRLIILGLFFHYRVTNPVGSAFALWLT

SEQ ID NO: 4686 - protein, 197 aa, Gossypium schwendimanii
VVEHVGLNVNGEPFVACHECNFPICKSCFEYDLKEGRKACLRCGSPYDENLLDDVEKATGDQSTMAAHLSKSQDVGIHARHISSVSTLDSEMTEDNGNPIWKNRVESWKEKKNKKKKPATTKVEREAEIPPEQQMEDKPAPDASQPLSTIIPIPKSRLAPYRTVIIMRLIILGLFFHYRVTNPVDSAFGLWLTSVIC

SEQ ID NO: 4687 - protein, 974 aa, Gossypium hirsutum
MMESGVPVCHTCGEHVGLNVNGEPFVACHECNFPICKSCFEYDLKEGRKACLRCGSPYDENLLDDVEKATGDQSTMAAHLNKSQDVGIHARHISSVSTLDSEMAEDNGNSIWKNRVESWKEKKNKKKKPATTKVEREAEIPPEQQMEDKPAPDASQPLSTIIPIPKSRLAPYRTVIIMRLIILGLFFHYRVTNPVDSAFGLWLTSVICEIWFAFSWVLDQFPKWYPVNRETYIDRLSARYEREGEPDELAAVDFFVSTVDPLKEPPLITANTVLSILALDYPVDKVSCYISDDGAAMLTFESLVETADFARKWVPFCKKFSIEPRAPEFYFSQKIDYLKDKVQPSFVKERRAMKRDYEEYKIRINALVAKAQKTPDEGWTMQDGTSWPGNNPRDHPGMIQVFLGYSGARDIEGNELPRLVYVSREKRPGYQHHKKAGAENALVRVSAVLTNAPFILNLDCDHYVNNSKAVREAMCFLMDPQVGRDVCYVQFPQRFDGIDRSDRYANRNTVFFDVNMKGLDGIQGPVYVGTGCVFNRQALYGYGPPSMPSFPKSSSSSCSCCCPGKKEPKDPSELYRDAKREELDAAIFNLREIDNYDEYERSMLISQTSFEKTFGLSSVFIESTLMENGGVAESANPSTLIKEAIHVISCGYEEKTAWGKEIGWIYGSVTEDILTGFKMHCRGWRSIYCMPLRPAFKGSAPINLSDRLHQVLRWALGSVEIFLSRHCPLWYGFGGGRLKWLQRLAYINTIVYPFTSLPLIAYCSLPAICLLTGKFIIPTLSNLASVLFLGLFLSIIVTAVLELRWSGVSIEDLWRNEQFWVIGGVSAHLFAVFQGFLKMLAGIDTNFTVTAKAADDADFGELYIVKWTTLLIPPTTLLIVNMVGVVAGFSDALNKGYEAWGPLFGKVFFSFWVILHLYPFLKGLMGRQNRTPTIVVLWSVLLASVFSLVWVRINPFVSTADSTTVSQSCISIDC

SEQ ID NO: 4688 - protein, 974 aa, Gossypium hirsutum
MMESGVPVCHTCGEHVGLNVNGEPFVACHECNFPICKSCFEYDLKEGRKACLRCGSPYDENLLDDVEKTTGDQSTMAAHLSKSQDVGIHARHISSVSTLDSEMTGDNGNPIWKNRVESWKEKKNKKKKPATTKVEREAEIPPEQQMEDKPAPDASQPLSTIIPIPKSRLAPYRTVIIMRLIILGLFFHYRVTHPVDSAFGLWLTSVICEIWFAFSWVLDQFPKWYPVNRETYIDRLSARYDREGEPNELAAVDFFVSTVDPLKEPPLITANTVLSILALDYPVDKVSCYISDDGAAMLTFESLVETADFARKWVPFCKKFSIEPRAPEFYFSQKIVYLKDKVQPSFVKERRAMKRDYEEYKIRINALVAKAQKTPEEGWTMQDGTPWPGNNPRDHPGMIQVFLGYSGAHDIEGNELPRLVYVSREKRPGYQHHKQAGADNALVRVSAALTNAPFILNLDCDHYVNNSKAVREAMCCLMDPQGGRDVCYVQFPQRCDGIDRSERYAKRNTVFFDVNMKGRDGSQGPVYVGTGCVCNRQALYGYGPPSMPSFPKSSSSSCSCCCPGKKEPKEPTELYRDAKREELDAAIFNLREIDNYDEYERSMLISQTSFEKTFGLSSVFIESTLMENGGVAESANPSTLIKEAIHVIGCGYEEKTAWGKEIGWIYGSVTEDILTGFKMHCRGWRSIYCMPLRPAFKGSAPINLSDRLHQVLRWALGSLEIFLSRHCPLWYGFGGGRLKWLQRLAYINTSVYPFTSLPLIAYCSLPAICLLTGKFIIPTLSNLASVLYLGLFLSIIVTAVLELRWSGVSIEDLWRNEQFWVIGGVSAHLFAVFQGFLKMLAGIDTNFTVTAKAADDADFGELYIVKWTTLLIPPTTLLIVNMVGVVAGFSDALNKGYEAWGPLFGKVFFSFWVILHLYPFLKGLMGRQNRTPTIVVLWSVLLASVFSLVWVRINPFVSTADSTTVSRANSSIDC

SEQ ID NO: 4689 - protein, 205 aa, Gossypium robinsonii
HTCGEHVGLNVNGEPFVACHECNFPICKSCFEYDLKEGRKACLRCGSPYDENLLDDVEKATGDQSTMAAHLSKSQDIGIHARHISSVSTLDSEMTEDNGNPIWKNRVESWKEKKNKKKQPATTKVEREAEIPPEQQMEDKPAPDASQPLSTIIPIPKSRLAPYRTVIIMRLIILGLFFHYRVTNPVDSAFGLWLTSVICEIWFAF

SEQ ID NO: 4690 - protein, 193 aa, Thespesia populnea
HVGLNVNGDPFVACHECNFPICKSCFEYDLKEGRKACLRCGSPYDENLLDDVEKATGDQSTTAENLSKSQDAGIHARHISSVSTLDSEMTEDNGNPIWKNRVESWKEKKNKKKKPATTKVEREAEIPPEQQMEDKPALDASQPLSTIIPIPKNRLAPYRTVIIMRLIILGLFFHYRVTNPVDSAFGLWLTSVI

SEQ ID NO: 4691 - protein, 978 aa, Populus tremuloides
MMESGAPICHTCGEQVGHDANGELFVACHECSYPMCKSCFEFEINEGRKVCLRCGSPYDENLLDDVEKKGSGNQSTMASHLNDSQDVGIHARHISSVSTVDSEMNDEYGNPIWKNRVKSCKDKENKKKKRSPKAETEPAQVPTEQQMEEKPSAEASEPLSIVYPIPRNKLTPYRAVIIMRLVILGLFFHFRITNPVDSAFGLWLTSVICEIWFAFSWVLDQFPKWNPVNRETYIERLSARYEREGEPSQLAGVDFFVSTVDPLKEPPLITANTVLSILAVDYPVDKVSCYVSDDGAAMLSFESLVETAEFARKWVPFCKKFSIEPRAPEFYFSQKIDYLKDKVQPSFVKERRAMKRDYEEYKVRVNALVAKAQKTPEEGWTMQDGTPWPGNNTRDHPGHDSGLPWEILGARDIEGNELPRLVYVSREKRPGYQHHKKAGAENALVRVSAVLTNAPYILNVDCDHYVNNSKAVREAMCILMDPQVGRDVCYVQFPQRFDGIDKSDRYANRNVVFFDVNMKGLDGIQGPVYVGTGCVFNRQALYGYGPPSMPSLRKRKDSSSCFSCCCPSKKKPAQDPAEVYRDAKREDLNAAIFNLTEIDNYDEHERSMLISQLSFEKTFGLSSVFIESTLMENGGVPESANSPPFIKEAIQVIGCGYEEKTEWGKQIGWIYGSVTEDILSGFKMHCRGWRSIYCMPVRPAFKGSAPINLSDRLHQVLRWALGSVEIFFSRHCPLWYGFGGGRLKWLQRLAYINTIVYPFTSLPLIAYCTIPAVCLLTGKFIIPTLSNLASMLFLGLFISIIVTAVLELRWSGVSIEDLWRNEQFWVIGGVSAHLFAVFQGFLKMLAGIDTNFTVTAKAAEDAEFGELYMVKWTTLLIPPTTLLIINMSGCAGFSDALNKGYEAWGPLFGKVFFAFWVILHLYPFLKGLMGRQNLTPTIVVLWSVLLASVFSLVWVKINPFVNKVDNTLVAETCISIDC

SEQ ID NO: 4692 - protein, 985 aa, Arabidopsis thaliana
MMESRSPICNTCGEEIGAKSNGEFFVACHECSFPICKACLEYEFKEGRRICLRCGNPYDENVFDDVETKTSKTQSIVPTQTNNTSQDSGIHARHISTVSTIDSELNDEYGNPIWKNRVESWKDKKDKKSKKKKKDPKATKAEQQDAQVPTQQHMEDMPPNTESGATDVLSVVIPIPRTKITSYRIVIIMRLIILALFFNYRITHPVDSAYGLWLTSVICEIWFAVSWVLDQFPKWSPINRETYIDRLSARFEREGEQSQLAAVDFFVSTVDPLKEPPLITANTVLSILALDYPVDKVSCYVSDDGAAMLSFESLVETADFARKWVPFCKKYSIEPRAPEFYFSLKIDYLRDKVQPSFVKERRAMKRDYEEFKIRMNALVAKAQKTPEEGWTMQDGTSWPGNNTRDHPGMIQVFLGYSGARDIEGNELPRLVYVSREKRPGYQHHKKAGAENALVRVSAVLTNAPFILNLDCDHYVNNSKAVREAMCFLMDPVVGQDVCFVQFPQRFDGIDKSDRYANRNIVFFDVNMRGLDGIQGPVYVGTGTVFRRQALYGYSPPSKPRILPQSSSSSCCCLTKKKQPQDPAEIYKDAKREELDAAIFNLGDLDNYDEYDRSMLISQTSFEKTFGLSTVFIESTLMENGGVPDSVNPSTLIKEAIHVISCGYEEKTEWGKEIGWIYGSITEDILTGFKMHCRGWRSIYCMPLRPAFKGSAPINLSDRLHQVLRWALGSVEIFLSRHCPLWYGCSGGRLKLLQRLAYINTIVYPFTSLPLVAYCTLPAICLLTGKFIIPTLSNLASMLFLGLFISIILTSVLELRWSGVSIEDLWRNEQFWVIGGVSAHLFAVFQGFLKMLAGLDTNFTVTSKTADDLEFGELYIVKWTTLLIPPTSLLIINLVGVVAGFSDALNKGYEAWGPLFGKVFFAFWVILHLYPFLKGLMGRQNRTPTIVILWSILLASVFSLVWVRINPFVSKTDTTSLSLNCLLIDC

SEQ ID NO: 4693 - protein, 985 aa, Arabidopsis thaliana
MMESRSPICNTCGEEIGVKSNGEFFVACHECSFPICKACLEYEFKEGRRICLRCGNPYDENVFDDVETKTSKTQSIVPTQTNNTSQDSGIHARHISTVSTIDSELNDEYGNPIWKNRVESWKDKKDKKSKKKKKDPKATKAEQHEAQIPTQQHMEDTPPNTESGATDVLSVVIPIPRTKITSYRIVIIMRLIILALFFNYRITHPVDSAYGLWLTSVICEIWFAVSWVLDQFPKWSPINRETYIDRLSARFEREGEQSQLAAVDFFVSTVDPLKEPPLITANTVLSILALDYPVDKVSCYVSDDGAAMLSFESLVETADFARKWVPFCKKYSIEPRAPEFYFSLKIDYLRDKVQPSFVKERRAMKRDYEEFKIRMNALVAKAQKTPEEGWTMQDGTSWPGNNTRDHPGMIQVFLGYSGARDIEGNELPRLVYVSREKRPGYQHHKKAGAENALVRVSAVLTNAPFILNLDCDHYVNNSKAVREAMCFLMDPVVGQDVCFVQFPQRFDGIDKSDRYANRNIVFFDVNMRGLDGIQGPVYVGTGTVFRRQALYGYSPPSKPRILPQSSSSSCCCLTKKKQPQDPSEIYKDAKREELDAAIFNLGDLDNYDEYDRSMLISQTSFEKTFGLSTVFIESTLMENGGVPDSVNPSTLIKEAIHVISCGYEEKTEWGKEIGWIYGSITEDILTGFKMHCRGWRSIYCMPLRPAFKGSAPINLSDRLHQVLRWALGSVEIFLSRHCPLWYGCSGGRLKLLQRLAYINTIVYPFTSLPLVAYCTLPAICLLTGKFIIPTLSNLASMLFLGLFISIILTSVLELRWSGVSIEDLWRNEQFWVIGGVSAHLFAVFQGFLKMLAGLDTNFTVTSKTADDLEFGELYIVKWTTLLIPPTSLLIINLVGVVAGFSDALNKGYEAWGPLFGKVFFAFWVILHLYPFLKGLMGRQNRTPTIVILWSILLASVFSLVWVRINPFVSKTDTTSLSLNCLLIDC

SEQ ID NO: 4694 - protein, 958 aa, Arabidopsis thaliana
MMESRSPICNTCGEEIGVKSNGEFFVACHECSFPICKACLEYEFKEGRRICLRCGNPYDENVFDDVETKTSKTQSIDSGIHARHISTVSTIDSELNDEYGNPIWKNRVESWKDKKDKKSKKKKKDPKATKAEQHEAQIPTQQHMEDTPPNTESGATDVLSVVIPIPRTKITSYRIVIIMRLIILALFFNYRITHPVDSAYGLWLTSVICEIWFAVSWVLDQFPKWSPINRETYIDRLSARFEREGEQSQLAAVDFFVSTVDPLKEPPLITANTVLSILALDYPVDKVSCYVSDDGAAMLSFESLVETADFARKWVPFCKKYSIEPRAPEFYFSLKIDYLRDKVQPSFVKERRAMKRDYEEFKIRMNALVAKAQKTPEEGWTMQDGTSWPGNNTRDHPGMIQVFLGYSGARDIEGNELPRLVYVSREKRPGYQHHKKAGAENALVRVSAVLTNAPFILNLDCDHYVNNSKAVREAMCFLMDPVVGQDVCFVQFPQRFDGIDKSDRYANRNIVFFDVNMRGLDGIQGPVYVGTGTVFRRQALYGYSPPSKPRILPQSSSSSCCCLTKKKQPQDPSEIYKDAKREELDAAIFNLGDLDNYDEYDRSMLISQTSFEKTFGLSTVFIESTLMENGGVPDSVNPSTLIKEAIHVISCGYEEKTEWGKEIGWIYGSITEDILTGFKMHCRGWRSIYCMPLRPAFKGSAPINLSDRLHQVLRWALGSVEIFLSRHCPLWYGCSGGRLKLLQRLAYINTIVYPFTSLPLVAYCTLPAICLLTGKFIIPTLSNLASMLFLGVSIEDLWRNEQFWVIGGVSAHLFAVFQGFLKMLAGLDTNFTVTSKTADDLEFGELYIVKWTTLLIPPTSLLIINLVGVVAGFSDALNKGYEAWGPLFGKVFFAFWVILHLYPFLKGLMGRQNRTPTIVILWSILLASVFSLVWVRINPFVSKTDTTSLSLNCLLIDC

SEQ ID NO: 4695 - protein, 939 aa, Oryza sativa (japonica cultivar-group)
MESGVPPCAACGDDAHAACRACSYALCKACLDEDAAEGRTTCARCGGEYGAPDPAHGQGAVVEEEVEESHEPAAGGVRERVTMASQLSDHQDEGVHARTMSTHARTISSVSGVGSELNDESGKPIWKNRVESWKEKKKEKKASAKKAAAKAQAPPVEEQIMDEKDLTDAYEPLSRIIPISKNKLTPYRAVIIMRLVVLGLFFHYRITNPVYSAFGLWMTSVICEIWFGFSWILDQFPKWCPINRETYVDRLIARYGDGEDSGLAPVDFFVSTVDPLKEPPLITANTVLSILAVDYPVEKISCYVSDDGSAMLTFESLAETAEFARRWVPFCKKYSIEPRAPEFYFSQKIDYLKDKIHPSFVKERRAMKRDYEEYKVRINALVAKAQKTPEEGWIMQDGTPWPGNNPRDHPGMIQVFLGETGARDFDGNELPRLVYVSREKRPGYQHHKKAGAMNALVRVSAVLTNAPYILNLDCDHYVNNSKAVREAMCFMMDPSVGRDVCYVQFPQRFDGIDRSDRYANRNVVFFDVNMKGLDGLQGPVYVGTGCCFYRQALYGYGPPSLPALPKSSVCSWCCCCCPKKKAEKSEKEMHRDSRREDLESAIFNLREIDNYDEYERSMLISQMSFEKSFGLSSVFIESTLMENGGVPESANPSTLIKEAIHVISCGYEEKTEWGKEVLRWALGSVEIFLSRHCPLWYGYGGGRLKWLQRLSYINTIVYPFTSLPLIAYCCLPAICLLTGKFIIPTLSNAATIWFLGLFISIIVTSVLELRWSGIGIEDWWRNEQFWVIGGVSAHLFAVFQGILKMIAGLDTNFTVTAKATDDTEFGELYVFKWTTVLIPPTSILVLNLVGVVAGFSDALNSGYESWGPLFGKVFFAMWVIMHLYPFLKGLMGRQNRTPTIVVLWSVLLASVFSLLWVKIDPFIGSSETTTTNSCANFDC

SEQ ID NO: 4696 - protein, 1091 aa, Nicotiana alata
MDTKGRLVAGSHNRNEFVVINADDVGRVTSVKELSGQICQICGDEIEVTVDGEPFIACNECAFPVCRQCYEYERREGNQACPQCKTRFKRIKGSPRVDGDDEDDEFDDLDHEFDYHGNPRYMSEAAFSSRLGRGTNHNASGLTTPSEVDPAALNSEIPLLTYGQEDDTISADKHALIIPPFMGRGKKVHPVPYSDSMSLPPRPMDPKKDLAVYGYGTVAWKERMEDWKKKQNDKLQVVKHGGGKGGGNDGDELDDPDLPKMDEGRQPLSRKLPISSSRLSPYRLLILVRLAVVGLFFHYRITHPVNDAYALWLISIICEIWFAVSWIFDQFPKWFPIVRETYLDRLSLRYEKEGKPSGLAPIDIFVSTVDPLKEPPLITANTVLSILAVDYPEDKVSCYVSDDGAAMLTFEALSETSEFARKWVPFCKKFNIEPRAPEWYFSQKVDYLKNKVHPSFVRERRAMKRDYEEFKVRINGLVATAQKVPEDGWTMQDGTPWPGNLVRDHPGMIQVFLGNDGVRDIEGNVLPRLIYVSREKRPGFDHHKKAGAMNALMRVSAVISNAPYLLNVDCDHYINNSKALREAMCFMMDPTSGKKICYVQFPQRFDGIDRHDRYSNRNVVFFDINMKGLDGIQGPIYVGTGCVFRRQALYGYDAPKKTKPPGKTCNCWPKWCCCCFGSRKKHKKGKTTKDNKKKTKTKEASPQIHALENIEEGIEGIDSEKATLMPQIKLEKKFGQSPVFVASTLLEDGGIPPGATSASLLKEAIHVISCGYEDKTEWGREVGWIYGSVTEDILTGFKMHCHGWRSVYCMPKRPAFKGSAPINLSDRLHQVLRWALGSVEILLSKHCPIWYGYGCGLKPLERFSYINSVVYPLTSLPLIAYCALPAVCLLTGKFIVPEISNYASILFMGLFIMIAATSVLEMQWGGVTIDDWWRNEQFWVIGGASSHLFALFQGLLKVLAGVSTSFTVTSKAADDGEFSELYLFKWTSLLIPPMTLLIINIIGVIVGISDAINNGYDSWGPLFGRLFFALWVIVHLYPFLKGVMGRQNKVPTIIVVWSILLASIFSLLWVRVNPFTARGGLVLEVCGLDCE

SEQ ID NO: 4697 - protein, 223 aa, Nicotiana tabacum
LDGIQGPVYVGTGCVFNRTALYGYEPPIKPKHKKAGLFSSCFGGSRKKSSKSSKKGSDKKKSSKNVDPTVPIFNLEDIEEGVEGAGFDYEKSLLMSQMSLEKKFGQSAVFVASTLMENGGVPQSATPETLLKEAIHVISCGYEDKSEWGSEIGWIYGSVTEDILTGFKMHARGWRSIYCMPKRPAFKGSAPINLSDRLNQVLRWALGSVEILFSRHCPIWYGY

SEQ ID NO: 4698 - protein, 161 aa, Nicotiana tabacum
  unsure (1)..(161): unsure at all Xaa locations
SDKHADGSVPVFNLEDIEEGIEGSGFDDEKXLLMSQMSLEERFGQSSVFVASTLMEYVGVPQSATPESLLKEAIHVISCGYEDRSDWGREIAWIYGSVTEDILTGFKMHARGWRSIYCMPKRPLSSSAPINLSDRLNQVLRWALGSVEILFSRHCPIWYGY

SEQ ID NO: 4699 - protein, 133 aa, Nicotiana benthamiana
LIYVSREKRPGFQHHKKAGAMSALVRVSAVLTNGPFMLNLDCDHYINNSKALREAMCFLTDPNLGKYVCYVQFPQRFDGIDRNDRYANRNTVFFDINLRGLDGIQGPVYVGTGCVFNRTALYGYEPPIKPKHK

SEQ ID NO: 4700 - protein, 944 aa, Oryza sativa
  unsure (1)..(944): unsure at all Xaa locations
MMESGVPPCAACGDDAHAACRACSYALCKACLDEDAAEGRTTCARCGGEYDNVVWDFVXXTGXRSSXARTMSTHARTISSVSGVGSELNDESGKPIWKNRVESWKEKKKEKKASAKKAAAKAQAPPVEEQIMDEKEPDAYEPLSRIIPISKNKLTPYRAVIIMRLVVLGLFFHYRITNPVYSAFGLWMTSVICEIWFGFSWILDQFPKWCPINRETYVDRLIARCVRYGEDSGLAPVDFFVSTVDPLKEPPLITANTVLSILAVDYPVEKISCYVSDDGSAMLTFESLAETAEFARRWVPFCKKYSIEPRAPEFYFSQKIDYLKDKIHPSFVKXERRAMKRDYEEYKVRINALVAKAQKTPEEGWIMQDGTPWPGNNPRDHPGMIQVFLGETGARDFDGNELPRLVYVSREKRPGYQHHKKAGAMNALVRVSAVLTNAPYILNLDCDHYVNNSKAVREAMCFMMDPSVGRDVCYVQFPQRFDGIDRSDRYANRNVVFFDVNMKGLDGLQGPVYVGTGCCFYRQALYGYGPPSLPALPKSSVCSWCCCCCPKKKAEKSEKEMHRDSRREDLESAIFNLREIDNYDEYERSMLISQMSFEKSFGLSSVFIESTLMENGGVPESANPSTLIKEAIHVISCGYEEKTEWGKEIGWIYGSVTEDILTGFKMHCRGWRSIYCMPIRPAFKGSAPINLSDRLHQVLRWALGSVEIFLSRHCPLWYGYGGGRLKWLQRLSYINTIVYPFTSLPLIAYCCLPAICLLTGKFIIPTVRCLSLYMFLGIGIEDWWRNEQFWVIGGVSAHLFAVFQGILKMIAGLDTNFTVTAKATDDTEFGELYVFKWTTVLIPPTSILVLNLVGVVAGFSDALNSGYESWGPLFGKVFFAMWVIMHLYPFLKGLMGRQNRTPTIVVLWSVLLASVFSLLWVKIDPFIGSSXXTTTTNSCANFDC

SEQ ID NO: 4701 - protein, 939 aa, Oryza sativa; identical to SEQ ID NO: 4695

SEQ ID NO: 4702 - protein, 918 aa, Oryza sativa
  unsure (1)..(918): unsure at all Xaa locations
MMESGVPPCAACGDDAHAACRACSYALCKACLDEDAAEGRTTCARCGGEYEQLERSXXLLTMLCGILWEQDEGVHARTMSTHARTISSVSGVGSELNDESGKPIWKNRVESWKEKKKEKKASAKKAAAKAQAPPVEEQIMDEKXXTDAYEPLSRIIPISKNKLTPYRAVIIMRFVVLGLFFHYGGPTPVYSAVGLWMTSVICEIWFGFSWILDQFPKWCPINRETYVDRLIARYGDGEDSGLAPVDFFVSTVDPLKEPPLITANTVLSILAVDYPVEKISCYVSDDGSAMLTFESLAETAEFARRWVPFCKKYSIEPRAPEFYFSQKIDYLKDKIHPSFVKERRAMKRDYEEYKVRINALVAKAQKTPEEGWIMQDGTPWPGNNPRDHPGMIQVFLGETGARDFDGNELPRLVYVSREKRPGYQHHKKAGAMNALVRVSAVLTNAPYILNLDCDHYVNNSKAVREAMCFMMDPSVGRDVCYVQFPQRFDGIDRSDRYANRNVVFFDVNMKGLDGLQGPVYVGTGCCFYRQALYGYGPPSLPALPKSSVCSWCCCCCPKKKAEKSEKEMHRDSRREDLESAIFNLREIDNYDEYERSMLISQMSFEKSFGLSSVFIESTLMENGGVPESANPSTLIKEAIHVISCGYEEKTEWGKEVLRWALGSVEIFLSRHCPLWYGYGGGRLKWLQRLSYINTIVYPFTSLPLIAYCCLPAICLLTGKFIIPTLSNAATIWFLGLFISIIVTSVLELRWSGIGIEDWWRNEQFWVIGGVSAHLFAVFQGILKMIAGLDTNFTVTAKATDDTEFGELYVFKWTTVLIPPTSILVLNLVGVVAGFSDALNSGYESWGPLFGKVFFAMWVIMHLYPFLKGLMGRQNRTPTIVVLWSVLLASVFSLLWVKIDPFIGSSETTTTNSCANFDC

SEQ ID NO: 4703 - protein, 860 aa, Oryza sativa
  unsure (1)..(860): unsure at all Xaa locations
MESGVPPCAACGDDAHAACRACSYALCKACLDEDAAEGRTTCARCGGEYGAPDPAHGQGAVVEEEVEESHEPAAGGVRERVTMASQLSDHQDEGVHARTMSTHARTISSVSGVGSELNDESGKPIWKNRVESWKEKKKEKKASAKKAAAKAQAPPVEEQIMDEKDLTDAYEPLSRIIPISKNKLTPYRAVIIMRLVVLGLFFHYRITNPVYSAFGLWMTSVICEIWFGFSWILDQFPKWCPINRETYVDRLIARYGDGEDSGLAPVDFFVSTVDPLKEPPLITANTVLSILAVDYPVEKISCYVSDDGSAMLTFESLAETAEFARRWVPFCKKYSIEPRAPEFYFSQKIDYLKDKIHPSFVKXERRAMXDGTPWPGNNPRDHPGMIQVFLGETGARDFDGNELPRLVYVSREKRPGYQHHKKAGAMNALVRVSAVLTNAPYILNLDCDHYVNNSKAVREAMCFMMDPSVGRDVCYVQFPQRFDGIDRSDRYANRNVVFFDKKAEKSEKEMHRDSRREDLESAIFNLREIDNYDEYERSMLISQMSFEKSFGLSSVFIESTLMENGGVPESANPSTLIKEAIHVISCGYEEKTEWGKEVLRWALGSVEIFLSRHCPLWYGYGGGRLKWLQRLSYINTIVYPFTSLPLIAYCCLPAICLLTGKFIIPTLSNAATIWFLGLFISIIVTSVLELRWSGIGIEDWWRNEQFWVIGGVSAHLFAVFQGILKMIAGLDTNFTVTAKATDDTEFGELYVFKWTTVLIPPTSILVLNLVGVVAGFSDALNSGYESWGPLFGKVFFAMWVIMHLYPFLKGLMGRQNRTPTIVVLWSVLLASVFSLLWVKIDPFIGSSETTTTNSCANFDC

SEQ ID NO: 4704 - protein, 743 aa, Oryza sativa
  unsure (1)..(743): unsure at all Xaa locations
XSRLIARYXXDGEDTGFAPVDLLIYTGDALGESSLITEHTELLLLAGGYGAEMIXGHASDDGSAMLTFESLVETAXFARRWVPFCKKYSIEARAPEFYFXQKIDYLKDKIHPSFVKERRAMKRDYEEYKVRINALVAKAQKTPEEGWIMQDGTPWPGNNPRDHPGMIQVFLGETGARDFDGNELPRLVYVSREKRPGYQHHKKAGAMNALVRVSAVLTNAPYILNLDCDHYVNNSKAVREAMCFMMDPSVGRDVCYVQFPQRFDGIDRSDRYANRNVVFFDVNMKGLDGLQGPVYVGTGCCFYRQALYGYGPPSLPALPKSSVCSWCCCCCPKKKAEKSEKEMHRDSRREDLESAIFNLREIDNYDEYERSMLISQMSFEKSFGLSSVFIESTLMENGGVPESANPSTLIKEAIHVISCGYEEKTEWGKEIGWIYGSVTEDILTGFKMHCRGWRSIYCMPIRPAFKGSAPINLSDRLHQVLRWALGSVEIFLSRHCPLWYGYGGGRLKWLQRLSYINTIVYPFTSLPLIAYCCLPAICLLTGKFIIPTLSNAATIWFLGLFISIIVTSVLELRWSGIGIEDWWRNEQFWVIGGVSAHLFAVFQGILKMIAGLDTNFTVTAKATDDTEFGELYVFKWTTVLIPPTSILVLNLVGVVAGFSDALNSGYESWGPLFGKVFFAMWVIMHLYPFLKGLMGRQNRTPTIVVLWSVLLASVFSLLWVKIDPFIGSSXXTTTTNSCANFDC

SEQ ID NO: 4705 - protein, 924 aa, Triticum aestivum
  unsure (1)..(924): unsure at all Xaa locations
MPPARWIEAREAASERARSGRRRGRGWARRTREXGPQTERGLSGSIGNVAWKERVDGWKMKQDKGAIPMTNGTSIAPSEGRAATDIDASTEYNMEDALLNDETRQPLSRKVPIASSKINPYRMVIVLRLVVLSIFLHYRLTNPVRNAYPLWLLSVICEIWFALSWILDQFPKWFPINRETYLDRLALRYDREGEPSQLAAVDIFVSTVDPLKEPPIVTANTVLSILAVDYPVDKVSCYVSDDGASMLTFDALAETSEFARKWVPFVKKYDIEPRAPEFYFCQKIDYLKDKVQPSFVKDRRAMKREYEEFKIRINALVSKALKVPXEGWIMQDGTPWPGNNTRDHPGMIQVFLGHSGGLDTEGNELPRLVYVSREKRPGFQHHKKAGAMNALVRVSAVLTNGQYMLNLDCDHYINNSKAVREAMCFLMDPNLGPQVCYVQFPQRFDGIDRNDRYANRNTVFFDINLRGLDGIQGPVYVGTGCVFNRTALYGYEPPMKNKESGLFSKLCGGRXXSKSKRSTGSKKSDKHADGSVPVFNLEDIEEGVEGAGFDDEKSLLMSQMSLEKRFGQSSVFVASTLMEYGGVPQSATPESLLKEAIHVISCGYEDKSEWGTEIGWIYGSVTEDILTGFKMHARGWRSVYCMPKRPAFKGSAPINLSDRLNQVLRWALGSVEILFSRHCPLWYGYGGRLKFLERFAYINTTIYPLTSLPLLVYCILPAICLLTGKFIMPEISNLASIWFIALFLSIFATGILEMRWSGVGIDEWWRNEQFWVIGGISAHLFAVFQGLLKVLAGIDTNFTVTSKANDEEGDFAELYMFKWTTLLIPPTTILIINMVGVVAGTSYAINSGYQSWGPLFGKLFFAFWVIVHLYPFLKGLMGRQNRTPTIVIVWAVLLASIFSLLWVRVDPFTTRLAGPNIQTCGINC

SEQ ID NO: 4706 - protein, 948 aa, Triticum aestivum
  unsure (1)..(948): unsure at all Xaa locations
ADPPCRRRGGGPVDRAGGGEHGRGAGADEDGRGGRESKQREAGSVLWRGPAXGAFFWNGAGDGWKMKQDKGAIPMTNGXKYCSXSEGRAATDIESTEYNMEDALLNDETRQPLSRKVPIASSKINPYRMVIVLRLVVLSIFLHYRLTNPVRNAYPLWLLSVICEIWFALSWILDQFPKWFPINRETYLDRLALRYDREGEPSQLAAVDIFVSTVDPLKEPPIVTANTVLSILAVDYPVDKVSCYVSDDGASMLTFDALAETSEFARKWVPFVKKYDIEPRAPEFYFCQKIDYLKDKVQPSFVKDRRAMKREYEEFKIRINALVSKALKVPEEGWIMQDGTPWPGNNTRDHPGMIQVFLGHSGGLDTEGNELPRLVSVSREKRPGFQHHKKAGAMNALVRVSAVLTNGQYMLNLDCDHYINNSKAVREAMCFLMDPNLGPQVCYVQFPQRFDGIDRNDRYANRNTVFFDINLRGLDGIQGPVYVGTGCVFNRTAIYGYEPPIKAKKPGXXLASLCGGKKKASKSKKRSSDKKKSNKHVDSSVPVFNLEDIEEGVSGFDDEKSVLMSQMSLEKRFGQSAAFVASTLMECGGVPQSSTPESLLKEAIHVISCGYEDKSEWGTEIGWIYGSVTEDILTGFKMHARGWRSVYCMPKRPAFKGSAPINLSDRLNQVLRWALGSVEILFSRHCPLWYGYGGRLKFLERFAYINTTIYPLTSLPLLVYCILPAICLLTGKFIMPEISNLASIWFIALFLSIFATGILEMRWSGVGIDEWWRNEQFWVIGGISAHLFAVFQGLLKVLAGIDTNFTVTSKANDEEGDFAELYMFKWTTLLIPPTTILIINMVGVVAGTSYAINSGYQSWGPLFGKLFFAFWVIVHLYPFLKGLMGRQNRTPTIVIVWAVLLASIFSLLWVRVDPFTTQNTFVNRCNRPSTVFMRLSSSFLEQRNLIGL

SEQ ID NO: 4707 - protein, 505 aa, Triticum aestivum
  unsure (1)..(505): unsure at all Xaa locations
RPPFCKKYSIEPRAPEWYFQQKIDYLKDKVVPNFVRDRRAMKREYEEFKIRINALVAKAQKVPEEGWTMQDGTPWPGNNVRDHPGMIQVFLGQSGGLDVEGNELPRLVYVSREKRPGYNHHKKAGAMNALVRVSAVLTNAPYMLNLDCDHYVNNSKAVKEAMCFMMDPLVGKKVCYVQFPQRFDSIDRHDRYANKNVVFFDINMKGLDGIQGPIYVGTGCVFRRQALYGYDAPKTKKPPSRTCNCWPKWCVCCFCFGNRKNKKKVTKPKTEKKKRLFFKKEENQSPAYALSEIDEAAAGAETQKAGIVNQQKLEKKFGQSAVFVASTLLEXGGTLRCDSPASLLKEAIHVIGCGYEDKTDWGKEIGWIYGSVTEDILTGFKMHCHGWRSIYCIPKRPAFKGSAPLNLSDRLNQVLRWALGSIEIFFSNHCPLWYGYGGGLKFLERFSYINSIVYPWTSIPLLAYCTLPAICLLTGKFITPELSNLASIWYMSLFICIFATGILEM

SEQ ID NO: 4708 - protein, 498 aa, Triticum aestivum
  unsure (1)..(498): unsure at all Xaa locations
PRVRKTCYVQFPQRFDGIDLHGRRANRNIVFFDINMKGLDGIQGPMYVGXTGCCFNRQALYGYDPVLTEADLEPNIVVKSCCGGRKKKSKSYMDNKNRMMKRTESSAPIFNMDDIEEGIEGYEDERSMLMSQKRLEKRFGQSPIFTASTFMTQGGIPPSTNPASLLKEAIHVISCGYEDKTEWGKEIGWIYGSVTEDILTGFKMHARGWISIYCMPPRPCFKGSAPINLSDRLNQVLRWALGSVEILFSRHCPIWYNYGGRLKLLERVAYINTIVYPLTSLPLIAYCVLPAICLLTNKFIIPEISNYAGMFFILMFASIFATGILELRWSGVGIEDWWRNEQFWVIGGTSAHLFAVFQGLLKVLAGIDTNFTVTSKANDEDGDFAELYVFKWTSLLIPPTTVLVINLVGMVAGISYAINSGYQSWGPLFGKLFFSIWVILHLYPFLKGLMGKQNRTPTIVIVWSILLASIFSLLWVKIDPFISDTQKAVAMGQCGVNC

SEQ ID NO: 4709 - protein, 476 aa, Triticum aestivum
  unsure (1)..(476): unsure at all Xaa locations
XTNDRYANRNTVFFDINLRGLDGIQGPVYVGTGCVFNRTALYGYEPPMKSKESGLFSKLCGGRTSKSKSTGSKKSDKHADGSVPMFNLEDIEEGIEGSGFDDEKSLLMSQMSLEKRFGQSSVFVASTLMEYGGVPQSATPESLLKEAIHVISCGYEDRSDWGREIGWIYGSVTEDILTGFKMHARGWRSIYCMPKRPAFKGSAPINLSDRLNQVLRWALGSVEILFSRHCPIWYGYGGRLKFLERFAYINTTIYPLTSIPLLIYCILPAVCLLTGKFIIPQISNIASIWFISLFISIFATGILEMRWSGVGIDEWWRNEQFWVIGGISAHLFAVFQGLLKVXLAGIDTSFTVTSKASDEDNDFAELYMFKWTTLLIPPTTILIINLVGVVAGTSYAINSGYQSWGPLFGKLFFAFWVIIHLYPFLKGLMGRQNRTPTIVVVWAILLASIFSLLWVRIDPFTTRVTGPDIQMCGINC

SEQ ID NO: 4710 - protein, 472 aa, Triticum aestivum
  unsure (1)..(472): unsure at all Xaa locations
ACLDGIQGPXIYVGTGCVFRRQALYGYDAPKTKKPPSRTCNCWPKWCVCCFCFGNRKNKKKVTKPKTEKKKRLFFKKEENQSPAYALSEIDEAAAGAETQKAGIVNQQKLEKKFGQSAVFVASTLLENGGTLRCDSPASLLKEAIHVIGCGYEDKTDWGKEIGWIYGSVTEDILTGFKMHCHGWRSIYCIPKRPAFKGSAPLNLSDRLNQVLRWALGSIEIFFSNHCPLWYGYGGGLKFLERFSYINSIVYPWTSIPLLAYCTLPAICLLTGKFITPELSNLASIWYMSLFICIFATGILEMRWARVAVDDWWRNEQFWVIGGVSAHLFAVFQGLLKVIAGVDTSFTVTTKAGDDEEFSELYTFKWTTLLIPPTTLLLLNFIGVVAGISNAINNGYESWGPLFGKLFFAFWVIVHLYPFLKGLLGRQNRTPTIVIVWSILLASIISLLWVRVNPFLAKTDGPLLEECGLDCT

SEQ ID NO: 4711 - protein, 386 aa, Triticum aestivum
  unsure (1)..(386): unsure at all Xaa locations
KKSTPRPHRNGTTTPGGKPPQPFPNSFHSFPIPLPQSPSRRRAAPRRDLLCLGAGIGIRGIWCGSEDKTXDWGKEIGWIYGSVTEDILTGFKMHCHGWRSIYCIPKRPAFKGSAPLNLSDRLNQVLRWALGSIEIFFSNHCPLWYGYGGGLKFXERFSYINSIVYPWTSIPLLAYCTLPAICLLTGKFITPELSNLASIWYMSLFICIFATGILEMRWARVAVDDWWRNEQFWVIGGVSAHLFAVFQGLLKVIAGVDTSFTVTTKAGDDEEFSELYTFKWTTLLIPPTTLLLLNFIGVVAGISNAINNGYESWGPLFGKLFFAFWVIVHLYPFLKGLLGRQNRTPTIVIVWSILLASIISLLWVRVNPFLAKTDGPLLEECGLDCT

SEQ ID NO: 4712 - protein, 302 aa, Triticum aestivum
  unsure (1)..(302): unsure at all Xaa locations
WLVSVXCEXWFALSWLLDQFPKWYPINRETYLDRLALRYDKEGRPPRLCPIDIFVSTVDPLKEPPLITADAVLSILAVDYPVDKVSCYVSDDGSAMLTFESLSETAEFARKWVPFCKKHNIEPRAPEFYFQQKIDYLKDKIQPSFVKERRAMKREYEEFKIRINALVAKAQKVPEEGWTMADGTAWPGNNPRDHPGMIQVFLGHSGGLDTDGNELPRLVYVSREKRPGFQHHKKAGAMNALIRVSAVLTNGAYLFNVDXDHYFNSSKALKEAMCFMMDPALRRKTCYVQFPQRFDGIDLHDX

SEQ ID NO: 4713 - protein, 189 aa, Gossypium anomalum
HVGLNGNGKPFVACHDCNFPICKTCFDYELKEGRKACLRCGNPYDENLLDDAEKASGDRSTMAAHMDKSQDAGIHARHISSVSALDSEMTEDNGNPIWKNRVESWKEKKNKKKKTSIKVEIEAQVPPEQLMEDKPAADAFQPLSTVIPIPKSRLAPYRTVIIMRLIILGLFFHYRVTNPVDSAFALWLT

SEQ ID NO: 4714 - protein, 197 aa, Gossypium anomalum
  unsure (1)..(197): unsure at all Xaa locations
VVEHVGLNVNGEPFVACHECNFPICKSCFEYDLKEGRKACLRCGXPYDENLLDDVEKATGDQSTMAAHLSKSQDVGIHARHISSVSTLDSEMTEDNGNPIWKNRVESWKEKKNKKKKPATTKVEREAEIPPEQQMEDKPAPDASQPLSTIIPIPKSRLAPYRTVIIMRLIILGLFFHYRVTNPVDSAFGLWLTSVIC

SEQ ID NO: 4715 - protein, 193 aa, Cienfuegosia tripartita
HVGLNVNGEPFVACHECNFPVCKSCFEYDLKEGRKACLRCGSPYDENLLDDVEKATGDHSAVAANMSKSQDLGVHARHISSVSTLDSEMTEDNGNPIWKNRVESWKEKKNKKKKPATTKVEREAEIPPEQQMEDKPATDASQPLSTIIPIPKSRLAPYRTVIIMRLIILGLFFHYRVTNPVDSAFGLWLTSVI

SEQ ID NO: 4716 - protein, 192 aa, Lebronnecia kokioides
HVGLNVNGEPFAACHECNFPICKSCFEYDLKEGRKACLRCGSPYDENLLDDVEKATGDQSTMAEHLSKSQDVGIHARHISSVSTLDSEMTEDNGNPIWKNRVESWKEKKNKKKPATTKVEREAEIPPEQQMEDKPAPDASQPLSTIIPIPKSRLAPYRTVIIMRLIILGLFFHYRVTNPVDSAFGLWLTSVI

SEQ ID NO: 4717 - protein, 192 aa, Hampea appendiculata
HVGLNVNGEPFVACHECNFPICKSCFEYDLKEGRKACLRCGSPYDENLLDDVEKATGDQSTMAEHLSKSQDVGIHARHISSVSTLDSEMTEDNGNPIWKNRVESWKEKKNKKKPATTKVERKAEIPPEQQMEDKPALDASQPLSTIIPIPKSRLAPYRTVIIMRLIILGLFFHYRVTNPVDSAFGLWLTSVI

SEQ ID NO: 4718 - protein, 187 aa, Gossypioides kirkii
HVGLNGNGEPFAFCHDCNFPICKTCLDYELKEGRKACLRCGNPYDENLLDDAEKASGDRSTMAAHMAKSQDAGIHARHISSVSTLDSEMTEDNGNPIWKNRVESWKEKKNKKKKTSIKVEIEAQVPPEQLMEDKLAADAFQPLSTVIPIPKSRLAPYRTVIIMRLIILGLFFHYRVTNPVASAFALW

SEQ ID NO: 4719 - protein, 193 aa, Gossypioides kirkii
  unsure (1)..(193): unsure at all Xaa locations
EHVGLNVNGEPFVACHECNFPICKSCFEYDLKEGRKACLRCGTPYDENLLDDVEKATGDQSTMAAQLSKPQDVGIHARHISSVSTLDSEMTEXNGNPIWKNRVESWKEKKXKKKKPATTKVEREAEXPPEQQMEDKPVPDASQPLSTIIPIPKSRLAPYRTVIILRLIILGLFFHYRVTNPVXSAFGLWLXSV

SEQ ID NO: 4720 - protein, 190 aa, Kokia drynarioides
HVGLNGNGKLFVACHDCNFPICKTCFDSELKEGRKACLRCGNPYGENLLDDAEKASGDRSTMAAHMDKSHDAGIHARHISSVSTLDSEMTEDNGNPIWKNRVESWKEKKNKKKKTSIKVEIEAQVPAEQLMEDKPRAADAFQPLSTVIPIPKSRLAPYRTVIIMRLIILGLFFHYRVTNPVDSAFALWRT

SEQ ID NO: 4721 - protein, 193 aa, Kokia drynarioides
HVGLNVNGEPFVACHECNLPICKSCFEYDLKEGRKACLRCGSTYDENLLDDVEKATGDQSTMPAQLSKSQDVGIHARHISSVSTLDSEMTEDNGNPIWKNRVESWKEKKNKKKKPAPTKVEREAEIPPEQQMEDKPVPDASQPLSTIIPIPKSRLAPYRTVIILRLIILGLFFNYRVTNPVDSAFGLWLTSVI

SEQ ID NO: 4722 - protein, 192 aa, Thespesia lampas
HVGLNVNGEPFVACHECNFPICKSCFEYDLKEGRKACLRCGSPYDENLLDDVEKATSYQSTMAEHLSKSQDVGIHARHISSVSTLDSEMTEDNGNPIWKNRVESWKEKKNKKKPATTKVEREAEIPPEQQMEDKPALDASQPLSTIIPIPKSRLAPYRTVIIMRLIILGLFFHYRVTNPVDSAFGLWLTSVI

SEQ ID NO: 4723 - protein, 197 aa, Gossypium bickii
  unsure (1)..(197): unsure at all Xaa locations
VVEHVGLNVNGEPFVACHECXFPICKSCFEYNLKEGRKACLRCGSPYDENLLDXVEKATGDQSTMAAHLTKSQDXGIHARHISSVSTLDSEMTEDNGNPIWKNRVESWKEKKNKKKKPATTKVEREAEIPPEQQMEDKPAPDASQPLSTIIPIPKSRLAPYRTVIIMRLIILGLFFHYRVTNPVDSAFGLWLTSVIC

SEQ ID NO: 4724 - protein, 189 aa, Gossypium bickii
  unsure (1)..(189): unsure at all Xaa locations
HVGSNGNGKPFVACHDCNFPICKTCFDYEFKEGRKACLRCGNPYDENLLDDAEKSSGDRSTMAAHMDKSQDAGIHARHISSVSTLDSEMTEDNGNPIWKNRVESWKEXXIXNNKTSIKVEIEAQVPHEQIMEDKPAADAFQPLSTVIPIPKSKLAPYRTVIIMRLIILGFFFHYRVTNPVDSAFALWLT

SEQ ID NO: 4725 - protein, 197 aa, Gossypium somalense
VVEHVGLNVNGEPFVACHECNFPICKSCFEYDLKEGRKACLRCGSPYDENLLDDVEKATGDQSTMAAHLSKSQDVGIHARHISSVSTLDSEMAEDNGNPIWKNRVESWKEKKNKKKKPATTKIEREAEIPPEQQMDDKPAPDASQPLSTIIPIPKSRLAPYRTVIIMRLIILGLFFHYRVTNPVDSAFGLWLTSVIC

SEQ ID NO: 4726 - protein, 189 aa, Gossypium somalense
HVGLNGNGKPFVACHDCSFPICKTCFDYELKEGRKASLLCGNPYDENLLDDAEKASGDRSTMAAHMDKSQDAGTHARHISSVSTLDSEMTEENGNPIWKNRVESWKEKKNKKKKTSIEVEIKAQVPPGQLMEDKPAADTFQSLSTVVPIPKSRLAPYRTVIIMRLIILGLFFRYRVTNPVNSAFALWLT

SEQ ID NO: 4727 - protein, 667 aa, Nostoc punctiforme
MSSVSISDNSSKFSGNSRSLLKKRTLLFRYLAEINLIFGIWYLQWRVTHSINFDALWISIPLLIAEIYSYFGGVMFVIGLWRPLVRQVKSLDQMTPPLPRSDWPTVDVFVTCYNEPPKIVEETAKAALVMDYPPTKLRVYVLDDGNSADMRAMTERLCIEDLQSPQLQQEANRIDAEHSSLLQRLKELENLTPNTQGAEQWLQTSSSEPVVNQLATEFVQSLRQFILWLPPTHQSISDSPVETLRDRLTTERKALEETIRKKELELLELSRFRYIARPKTPGVAHHAKAGNINYAIFSGQTAGNFIVTLDADHIPKQNFLKRVVPYFYTYNLSTGRYDQNQIAFVQTRQDFYNIPPGDPFGHRANLFYGPLQQGKDGMNAAFYTGTNAILRREALVSVGLQNFADEFAKDEKRLDEFDLVGGVSSNSITEDMNTAMRLHSAGWKSIYHNELLAEGLAPDDLSSTLKQRLRWAQGTIQVLVRENPLTKSGLTFWQRLQYFKTMYSYFSGFATLVFISCPIIYFFTDIVPVKTYGSDFAIHFFPAFIINRLTFLAATWGIPATEVWRSEQYAIALFPLLIQAVWSVFTGQKLNFQVTPKQRQSGIYLRLVWPQLVIFILTILGILWSLYRFAIGHLNNPLVHLLNGAWAIYNLLLLSAIIRASVWQPPK

SEQ ID NO: 4728 - protein, 1042 aa, Populus x canescens
MAGLVTGSSQTLHAKDELMPPTRQSATSKKCRVCGDEIGVKEDGEVFVACHVCGFPVCRPCYEYERSEGNQSCPQCNTRYKRHKGCPRVPGDNDDEDANFDDFDDEFQIKHHDHDESNQKNVFSHTEIEHYNEQEMHPIRPAFSSAGSVAGKDLEGDKEGYSNAEWQERVEKWKVRQEKRGLVSKDEGGNDQGEEDEYLMAEARQPLWRKIPIPSSRINPYRIVIVLRLIILCFFFRFRILTPASDAYALWLISVICEVWFGLSWILDQFPKWNPIERETYLDRLSMRFEREGEPNRLGPVDVFVSTVDPLKEPPIITANTVLSILSVDYPVDKVSCYVSDDGASMLLFDSLAETAEFARKWVPFCKKHNIEPRAPEFYFTQKIDYLKDKVHPNFVKERRAMKREYEEFKVRINALVSKAQKKPEEGWVMQDGTPWPGNITRDHPGMIQVYLGSEGALDVEGKELPRLVYVSREKRPGYNHHKKAGAMNALILVSAVLTNAPFMLNLDCDHYINNSKAVREAMCFLMDPQLGKKLCYVQFPQRFDGIDRHDRYANRNVVFFDINMKGLDGVQGPVYVGTGCVFNRQSLYGYDPPVSEKRPKMTCDCWPSWCCCCFGGSRKKSKKKGQRSLLGGLYPMKKKMMGKKYTRKASAPVFDLEEIEEGLEGYEELEKSSLMSQKSLEKRFGQSPVFIASTLMENGGVPEGTNSQSHIKEAIHVISCGYEEKTEWGKEVGWIYGSVTEDILTGFKMHCRGWRSVYCSPKRPAFKGSAPINLSDRLHQVLRWALGSIEIFLSHHCPLWYGYGGKLKLLERLAYINTIVYPFTSIPLLAYCTTPAVCLLTGKFIIPTLNNLASIWFPGPFHLNHSNICVGVGWSGVSIQDLGRNEQFWVIGGVSGHLFAVFQGFFKVLGGVDTNFTVTSKSADDAEFGELYLFKWTTLLIPPTTLIILNMVGVVAGVSARINNGYGSWGPLFGKLFFAFWVIVHLYPFLKGLMGKQNRTPTIVVLWSVLLASIFSLIWVRIDPFLPKQTGPILKQCGVEC

SEQ ID NO: 4729 - protein, 359 aa, Nostoc sp. PCC 7120
MQSTTIPSDNSPSFGQSENTTTLPFTLQDLKAAIPAECFQPNVSKSLFYFFRDVLIVGLLYAVAHYLDSWYFWPIFWLIQGTMFWALFVVGHDCGHQSFSKHKWLNDLIGHLTHTFILVPYHGWRISHRTHHKNTGNIDNDESWYPVTQSQYKEMPLGQKIGRYYVFLLAYPVYLFKRSPNKEGSHFLPSSSLFKPSEKWDVITSTVLWSCMVGLLGFLTYQWGWMWLLKYYAAPYIVFVIWLDLVTFLHHTEADLPWYRGEDWTFLKGAISSIDRNYGLVNHIHHDIGTHVAHHIFLNIPHYNLLKATEAIKPVMGEYYRKSEEPIWKSLWRSCVSCHFVPDTGGKVYYTSNNQVVNK

SEQ ID NO: 4730 - protein, 363 aa, Rhodopseudomonas palustris
MRSQDLFAMPSNMPHDAEAPASDARLWTRILAEYGTPSRSRSIAELTITALPLVALWSAAWFVYSMGHAWASLLIAIPAAGFLLRLFMIQHDCGHGAFFSKRQANDWVGRAIGVITLTPYDCWRRQHATHHATTGNLDRRGVGDLDTLTVREYSELSWWGRLKYRLYRNPLVMFGLGPAYVFLLQQRLPVGLMRDGWRPWVSAMATNAAIAGIVVTLTWFIGIKAFLLVHLPIMLLAATAGVWLFYVQHQFETTTWEHNERWSLHQAALYGSSYYDLPAPLSWFTANIGMHHVHHLASRIPYYRLPRVLHDHPELRAIGRVTLWQSFRCIPLALWDEAQRRLVSFRDVRAQKQQQATVGLATR

SEQ ID NO: 4731 - protein, 164 aa, Hordeum vulgare subsp. vulgare
RSLDSSTRKLRFALPFPMLAYPFYLWSRSPGKSGSHFHPSSDLFQPNEKNDILTSTTCWLAMAGLLAGLTAVMGPLQILKLYAVPYWIFVMWLDFVTYLHHHGHNDKLPWYRGKAWSYLRGGLTTLDRDYGWLNNIHHDIGTHVIRHLFPQIPHYHLVEATEAA

SEQ ID NO: 4732 - protein, 349 aa, Synechocystis sp.
MTATIPPLRPTETSSNPDRPIADLKLQDIIKTLPKECFEKKASKAWASVLITLGAIALGYLGIIYLPWYCLPFTWIWTGTALTGAFVVGHDCGHRSFAKKRWVNDLVGHIAFAPLIYPFHSWRLLHDHHHLHTNKIEVDNAWDPWSVEAFQASPAIVRLFYRAIRGPFWWTGSIFHWGLMHFKLSNFAERDRNKVKLSIAVVFLFAAVAFPALIITTGVWGFVKFWLMPWLVYHFWMSTFTIVHHTIPEIRFRPAEDWSAAEAQLNGTVHCDYPRWVEVLCHDINVHIPHHLSVAIPSYNLRLAHASLKQNWGPFLYERTFNWGLMQQISGQCHLYDPDNGYRTFSSLK

SEQ ID NO: 4733 - protein, 359 aa, Synechocystis sp. PCC 6803; identical to SEQ ID NO: 525

SEQ ID NO: 4734 - protein, 393 aa, Ralstonia metallidurans
MTAPSDTLSPADADAISQAPNHGTNRPKRPAKNIPLPEPIAFEAPFPNRKTIRSWLIPLGGRSTARALLLFAFDYALFAAVLAGVVLASPWWAKVGLGVLAGLIIARLFIIGHDACHQSLTDRRGLNKWLGRLTFLPSLTPYSLWEVGHNVVHHGYTNLKGFDFVWAPYSLEEFRALPRSRRILERIYRNGLGAGLYYLIEIWWFKLFFPSKRQMATRRPIFMWDCALVGAFGAVWIGALVWLAVATGQSPLLLVGTGFVLPFLIWNATVGFVLYVHHTHTSVAWYDTKAMWAKAQPFVSTTVHLRFNFGIGAALHHIMEHTAHHVDMSIPLYQLKRAQALLEHALPGRIIIEKFSWRWYFHTAHRCKLYDFKALCWTDFRGRQTSENAPTPV

SEQ ID NO: 4735 - protein, 379 aa, Arachis duranensis
MGAGGRVTKIEAQKKPLSRVPHSNPPFSVGQLKKAIPPHCFERSLFISFSYVVYDLLVAYLLFYIATTYFHKLPYPFSFLAWPIYWAIQGCILTGVWVIAHECGHHAFSKYQLVDDMVGLTLHSCLLVPYFSWKISHRRHHSNTGSLDRDEVFVPKPKSKVSWYNKYMNNPPGRAISLFITLTLGWPLYLAFNVSGRPYDRFASHYDPYAPIYSNRERLLIYVSDSSVFAVTYLLYHIATLKGLGWVVCVYGVPLLIVNGFLVTITYLQHTHASLPHYDSSEWDWLRGALATVDRDYGILNKAFHHITDTHVAHHLFSTMPHYHAMEATNAIKPILGDYYQFDGTPFYKALWREAKECLYVEPDDGASKKGVYWYKNKF

SEQ ID NO: 4736 - protein, 379 aa, Arachis ipaensis
MGAGGRVTKIEAQKKPLSRVPHSNPPFSVGQLKKAIPPHCFERSLFISFSYVVYDLLMAYLLFYIATTYFHKLPYPFSFLAWPIYWAIQGCILTGVWVIAHECGHHAFSKYQLVDDMVGLTLHSCLLVPYFSWKISHRRHHSNTGSLDRDEVFVLKPKSKVSWYNKYMNNPPGRAISLFITLTLGWPLYLAFNVSGRPYDRFASHYDPYAPIYSNRERLLIYVSDSSVFAVTYLLYHIATLKGLGWVVCVYGVPLLIVNGFLVTITYLQHTHASLPHYDSSEWDWLRGALATVDRDYGILNKAFHHITDTHVAHHLFSTMPHYHAMEATNAIKPILGDYYQFDGTPVYKALWREAKECLYVEPDDGASQKGVYWYKNKF

SEQ ID NO: 4737 - protein, 383 aa, Borago officinalis
MGGGGRMPVPTKGKKSKSDVFQRVPSEKPPFTVGDLKKVIPPHCFQRSVLHSFSYVVYDLVIAALFFYTASRYIHLQPHPLSYVAWPLYWFCQGSVLTGVWVIAHECGHHAFSDYQWLDDTVGLLLHSALLVPYFSWKYSHRRHHSNTGSLERDEVFVPKKRSGISWSSEYLNNPPGRVLVLLVQLTLGWPLYLMFNVSGRPYDRFACHFDPKSPIYNDRERLQIYISDAGIVAVMYGLYRLVAAKGVAWVVCYYGVPLLVVNGFLVLITYLQHTQPSLPHYDSSEWDWLKGALATVDRDYGFLNKVLHNITDTHVAHHLFSTMPHYHAMEATKAIKPILGDYYQCDRTPVFKAMYREVKECIYVEADEGDNKKGVFWYKNKL

SEQ ID NO: 4738 - protein, 302 aa, Brassica rapa subsp. oleifera
GDIRAAIPKHCWVKSPLRSMSYVARDICAVVALAVAAVYVDSWFFWPLYWAAQGTLFWAIFVLGHDCGHGSFSDIPLLNTAVGHILHSFILVPYHGWRISHRTHHQNHGHVENDESWVPLPEKLYKNLSHSTRMLRYTVPLPMLAYPLYLWYRSPGKEGSHYNPYSSLFAPSERKLIATSTTCWSIMLATLVYLSFLVGPVTVLKVYGVPYIIFVMWLDAVTYLHHHGHDDKLPWYRGKEWSYLRGGLTTIDRDYGIFNNIHHDIGTHVIHHLFPQIPHYHLVDATKAAKHVLGRYYREPKT

SEQ ID NO: 4739 - protein, 383 aa, Olea europaea subsp. europaea
MGAGGRMSVPPEGKKSKSDVIQRVPHSKPQFSLGDIKKAIPPHCFQRSVLRSFSYVVYDLTIASLLCYVASTYIQFLPNPLCYFGWLLYWICQGCVLTGVWVVAHECGHHAFSDYQWLDDTVGLILHSSLLVPYFSWKYSHRRHHSNTGSLERDEVFVPRVKSGIRWISKNLNNPPGRVLLLVFQLTLGWPLYLMFNVSGRHYDRFACHYNPNSPMYSDRERAQILISDAGVLAVTCGLYRLTAAKGLAWVFCVYGGPLLVVNGFLVLITYLQHTHPSLPHYDSSGWDWLRGALATVDRDWGILNKVFRNITDTHVSHHLFSTMPHYHAMEATKAIKPILWNYYQFDGTPIFKAMWREAKECIYVERDEGDQNKGVFWYNNTL

SEQ ID NO: 4740 - protein, 365 aa, Leptospira interrogans serovar lai str. 56601
MKVKNKTNHSPKETLGSVREILSDETFANPAYKGVSYFLRDLFFFVIVMVLLWNVDSWYVLPFLWFFAGMIISALFVVGHDCAHEALFKSKFLQYWIGQIAMLPSLHAYNQWGYGHNRIHHGHTIKRQADFVWHPTTKEEYSEFRIFKKLMHRFFWSIWGGGFYYMIEIWFKGMVLFTAPLKEAKRDKLIMLSFAFISSGLVFYFGASSIPGVFDIGTGLWMFTKVCLIPFIAWNYFMGITVYVHHIHSEIPWKTKEEWTPFYGQMKGTVNYHINPIMNFFFHNIFIHMPHHVHMKIPFYNLKRALNEIKVIYGDYVLERNTILGDYLKSTSLCKVIDSDTGKWMTYREAEEMSLKEKDLESIPV

SEQ ID NO: 4741 - protein, 357 aa, Trichodesmium erythraeum IMS101
MQSNTVLDQTNDTKSIELPFTLQEVKAAIPAHCFKSSLWRSLSYFFLDIGIIAGLYGIAYSLDSWFFFPFFWLMQGTMFWALFVVGHDCGHGSFSKYKWVNNLVGHLCHTPILVPFHGWRISHRTHHANTGNIETDESWYPVSESKYNMMLWYEKLFRFYLLLLAYPLYLFKRSPNREGSHFVPNSPLFRPHEKSDVLTSSALWMLMVGFLGCLTYQFGWVFLVKYYLVPYIIFVIWLDLVTFLHHTDSDIPWYRGKDWYFLKGALSSIDRDYGFINSIHHDIGTHVAHHIFLNMPHYHLKTATEAIKPILGEYYHKSSEPIWKSFINSYMNCHFVSDTGSQIYYRSAWKKPSEELS

SEQ ID NO: 4742 - protein, 493 aa, Bradyrhizobium japonicum USDA 110
MAGVSESASVLDEHRPRTYEAPAHMAGYAVPEAAADDSRFAGCVIASMPRSRVSFSSILLTLPENRRRSVNISDLRPFPSQSRCVMGGRPIRRDAGSRREQYCSAGHPGSDQYECVRGRTSELLPEASVGDNDTSSADIGNRPEMTERTPEIRATARMLARYREPDSARGVLELAITAVPLVIIWVLIWAALDHGYWFALLLEVPAAGLLVRLFMIQHDCGHGSFFRGRVANDWVGRAIGVMTLTPYDYWRHNHARHHANSGNLDHRGSGDIDTLTVREFRDQPLWGRMLYRLYRHPLVMFGVGPSYLFILKHRLPVGLMRGGWKPWLSTMGTNVAIAVLVGAMIRLVGYGPFLLVHLPIIVLAASIGVWLFYVQHQFEHTHWSHDDNWNFHDAALYGSSHYQLPGVLRWFTANIGVHHIHHLCSRIPCYRLPDVLRDHPQLAGVGRITLLQSLRTVRLTLWDEERLRLVSFGEAALTSTASPTPAAASRRGR

SEQ ID NO: 4743 - protein, 343 aa, Bacillus cereus ATCC 14579
MTLENTKNLKKQVAPFEKSTIKKSVWQLINTIVPFIILWYLAYKSLSVSYWLTLVPALLAAGFMTRIFIIFHDCTHYSFFKSRRANRIVGTCMGVLTLFPFDQWGHEHSIHHATSGNLDKRGTGDIWTLTVDEYVAAPFRLRLAYRLYRNPFVMFGLGPIYVFLLKNRFNRKGARQKERMNTYLTNIIIVAVVAILCWAIGWQSFLLVHGTIFLIAGSVGIWLFYVQHTFEDSYFEEDKDWEYVKAAVEGSSFYKLPKILQFLTGNIGFHHVHHLSPRVPNYKLEEAHNNTLPLKNVPTITLATSLQSLRFRLWDEKSNNFVSFKDVKNIIKNNVSVRVKSEL

SEQ ID NO: 4744 - protein, 436 aa, Phaeodactylum tricornutum
MGKGGQRAVAPKSATSSTGSATLSQSKEQVWTSSYNPLAKDSPELPTKGQIKAVIPKECFQRSAFWSTFYLMRDLAMAAAFCYGTSQVLSTDLPQDATLILPWALGWGVYAFWMGTILTGPWVVAHECGHGAYSDSQTFNDVVGFIVHQALLVPYFAWQYTHAKHHRRTNHLVDGESHVPSTAKDNGLGPHNERNSFYAAWHEAMGDGAFAVFQVWSHLFVGWPLYLAGLASTGKLAHEGWWLEERNAIADHFRPSSPMFPAKIRAKIALSSATELAVLAGLLYVGTQVGHLPVLLWYWGPYTFVNAWLVLYTWLQHTDPSIPHYGEGEWTWVKGALSTIDRDYGIFDFFHHTIGSTHVVHHLFHEMPWYNAGIATQKVKEFLEPQGLYNYDPTPWYKAMWRIARTCHYVESNEGVQYFKSMENVPLTKDVRNKAA

SEQ ID NO: 4745 - protein, 495 aa, Phaeodactylum tricornutum
MVRFSTAALLSLSTLTTSCIGAFQLSSPAQLPTSRLRRHTNTAPLSAVAVDSGSSDPALVGNLPLPNNNDNEDKNRRMPMMDLKGIALSGLKGQALSVRAEDFPQAKDLRAVIPKDCFEPDTAKSLGYLSVSTMGTILCSVVGANLLSVLDPSNPLTWPLWAAYGAVTGTVAMGLWVLAHECGHGAFSKNRSLQDAVGYIIHSIMLVPYFSWQRSHAVHHQYTNHMELGETHVPDRADKEGEKSLALRQFMLDSFGKDKGMKAYGGLQSFLHLIVGWPAYLLIGATGGPDRGMTNHFYPNPLSTPTQPKKELFPGNWKEKVYQSDIGIAAVVGALIAWTATSGLAPVMALYGGPLIVINAWLVLYTWLQHTDTDVPHFSSDNHNFVKGALHTIDRPYDKLDPWGIIDFLHHKIGTTHVAHHFDSTIPHYKAQIATDAIKAKFPEVYLYDPTPIPQAMWRVAKGCTAVEQRGDAWVWKNEGIEDLVEHRQSKLSSE

SEQ ID NO: 4746 - protein, 436 aa, Limnanthes douglasii
MASWVLSQYALNPLPHIFRTPRTSITSHKLTVSHTNNRATPDLTKLSLIKFRERKLGLRVSAPFQIASTTPEEEDEVAEFDPGSPPPFKLADIRAAIPKHCWVKNQWRSMSYVVRDVVIVLGLAAAAVAANSWAVWPLYWVAQGTMFWALFVLGHDCGHGSFSNNHKLNSVVGHLLHSSILVPYHGWRIRHRTHHQNHGHVENDESWHPMSEKLFRSLDKIALTFRFKAPFPMLAYPFYLWERSPGKTGSHYHPDSDLFVPSEKKDVITSTICWTTMVGLLIGLSFVMGPIQILKLYVVPYWIFVMWLDFVTYLDHHGHEDKLPWYRGEEWSYLRGGLTTLDRDYGLINNIHHDIGTHVIHHLFPQIPHYHLVEATQAAKPIFGKYYKEPAKSKPLPFHLIDVLLKSLKRDHFVPDTGDIVYYQSDPQISGSLKPE

SEQ ID NO: 4747 - protein, 396 aa, Amylomyces rouxii
MATKRNVTSNAPAAEDISISNKAVIDEAIERNWEIPNFTIKEIRDAIPAHCFRRDTFRSFTHVLHDIIIMSILAIGASYIDSIPNTYARIALWPLYWIAQGIVGTGVWVIGHECGHQAFSPSKTINNSVGYVLHTALLVPYHSWRFSHSKHHKATGHMSKDQVFVPSTRKEYGLPPREQDPEVDGPHDALDEVPLLSCIACSFNLPLAGLFISSPMSLVKITPVGLLISTPSVLSTIENQFWDVMSSTAGVLGMIGFLAYCGQVLALLLSSSTMLFPYLNVNFWLVLITYLQHTDPKLPHYRENVWNFQRGAALTVDRSYGFLLDYFHHHISDTHVAHHFFSTMPHYHAEEATVHIKKALGKHYHCDNTPVPIALWKVWKSCRFVEDEGDVVFFKN

SEQ ID NO: 4748 - protein, 396 aa, Amylomyces rouxii
MATKRNVTSNAPAAEDISISNKAVIDEAIERNWEIPNFTIKEIRDAIPAHCFRRDTFRSFTHVLHDIIIMPILAIGASYIDSIPNTYARIALWPLYWIAQGIVGTGVWVIGHECGHQAFSPSKTINNSVGYVLHTALLVPYHSWRFSHSKHHKATGHMSKDQVFVPSTRKEYGLPPREQDPEVDGPHDALDEVPLLSCIACSFNLPLAGLFISSPMSLVKITPVGLLISTPSVLSTIENQFWDVMSSTAGVLGMIGFLAYCGQVLALLLSSSTMLFPYLNVNFWLVLITYLQHTDPKLPHYRENVWNFQRGAALTVDRSYGFLLDYFHHHISDTHVAHHFFSTMPHYHAEEATVHIKKALGKHYHCDNTPVPIALWKVWKSCRFVEDEGDVVFFKN

SEQ ID NO: 4749 - protein, 196 aa, Dunaliella salina
YWVPYHGWRISHRNHHANHGHVENDESWHPTRKSVYDKMDDLGRIGRLTLPWSMFAYPFYLWKRSPGKTGSHYDPNCDLFVTKTEKEQCITSNVFLVAWLGVLAACKTQLGIPAMINLYVMPYWFFVVWLDVVTYLQHHGSHDPEEKLPWFRGEEWSYLRGGLTTLDRDYGIFSRIHHSIGIHVVHQFFPQIPHYQ

SEQ ID NO: 4750 - protein, 418 aa, Chlorella vulgaris
MVAALTTQLVCSAAIVRSARPSGLSRALPLRRRVTLRVANIAAPAEDMLVGQPAVVPPFEGGKRLANAPPFTLQDMRDAIPAECFEKDTFRSAAHLALDVGIVAALAIGAYTIGNPLVWPLYWFLQGTMFWALFVVGHDCGHQSWSNNKTLNDFVGNIVHSSIMVPYHGWRISHRTHHANHGHVENDESWHPIVKSNYEKLDKWAKLGRLLFPFPLFAYPFYLLNRSPGKNGSHYDPKSDLFTASEGPLVETSNKFQCAWIGFLAGCTVALGPLAMLNLYVLPYWVFVVWLDVVTYLHHHGPSDPEEEVPWYRGEEWSYFRGGLSTIDRDYGIFNKLHHDIGTHVVHHLFPQIPHYHLQKATEAVKPIMGDYYREPEKSPGPIPTHLFEPLRRSFARDHFVDNTGDIVFYQQDKNLKL

SEQ ID NO: 4751 - protein, 350 aa, Synechococcus sp. PCC 7002
MQSTVRSPGSRESLRQDLPFTLKDVKAAIPDYCFQPSVFRSLAYFFLDIGIIAGLYAIAAYLDSWFFYPIFWFAQGTMFWALFVVGHDCGHGSFSRSKFLNDLIGHLSHTPILVPFHGWRISHRTHHSNTGNIDTDESWYPIPESKYDQMGFAEKLVRFYAPLIAYPIYLFKRSPGRGPGSHFSPKSPLFKPAERNDIILSTAAIIAMVGFLGWFTVQFGLLAFVKFYFVPYVIFVIWLDLVTYLHHTEADIPWYRGDDWYYLKGALSTIDRDYGIFNEIHHNIGTHVAHHIFHTIPHYHLKDATEAIKPLLGDYYRVSHAPIWRSFFRSQKACHYIADQGSHLYYQPKK

SEQ ID NO: 4752 - protein, 449 aa, Picea abies
MALVLSDCCVLKTLPSLKMGSKHKPMVPQAAVPATVGLRPLPSLCLGRSFPKHKGAGTFPYGPLRRGPRLGGETGVAVPLRPTLVSDNENGEAGFDPSAPPPFTLAEIRAAIPKHCWGKNTWKSISYVVRDVAVVIGLAAAASYFNNWVFWPIYWVAQGTMFWALFVLGHDCGHGSFSSNHKLNSVIGHLTHSSILVPYHGWRISHRTHHQNHGHVENDESWHPMSKKLYNSLDETTRKLRFNIPWALLAYPFYLWGRTPGKKGSHFHPDSDLFVPSEKKDVITSTACWSAMVALLAGLTVFMGPAWIIKFYVIPYWIFVMWLDLVTYLHHHGYDEKVPWYRGKEWSYLRGGLTTIDRDYGLINNIHHDIGTHVVHHLFPQIPHYHLVEATEAVKPVLGKYYREPKQSGPLPLHLLDPLVKSMSQDHYVNDEGEIVYYQADPDIKKSRR

SEQ ID NO: 4753 - protein, 382 aa, Persea americana
MGAGGRMSVVTPSVKKDVLERVPIAKPPFTFGQLKKAIPPHCFNRSIPRSMSYVVSDLTISSILYYLATTYIPLLPSPLSYFIAWPLYWALQGCVLTGVWVIAHECGHHAFSDYSWLDDTVGLILHSFLLVPYFSWKYSHRRHHSNTGSLTSDEVFVPKPKSQMPWFSKYLNNPPGRFLTLAFSLTLGWPLYLAFNVSGRKYDRFACHFDPYGPIYSDRERLQILISDLGVLAVLCGLFRLVAVCGLGWVVCVYGVPLLIVNGFLVLITFLQHTHPSLPHYDSEEWDWLRGALATVDRDYGVLNKVFHNITDTHVAHHLFSTMPHYHAMEATKAIRPILGDYYHSDGTPVYKAMYREAKECVYVEPDEGSGVKGVFWYRNKF

SEQ ID NO: 4754 - protein, 455 aa, Betula pendula
MASWVLSECGLKPLPQVFPRPRAGPISYKPSKIRFLHSNETGTDLKFHSKRVSSGCLRERNWGLKVSAPWRVASVEGEEEREERINGVNGFKEEEEPGFDPGAPPPFNLSNIRAAIPKHCWVKDPWRSVSYVVRDVVVVFALAAAAVYLNKWFVWPLYWAAQGTMFWALFVLGHDCGHGSFSNNHKLNSVVGHLLHSSILVPYHGWRISHRTHHQNHGHVENDESWHPLPERIYKNLDNLTKSFRFNAPFPLFAYPFYLWGRSPGKTGSHFDPNSDLFVPNERKDVITSTVCWTAMAALLVGLGFVMGPGQLLKLYGVPYWVFVMWLDLVTYLHHHGHGDKLPWYRGKEWSYLRGGLTTIDRDYGLINNIHHDIGTHVIHHLFPQIPHYHLIEATEAAKPVLGKYYREPQKSLPLPFHLIGSLIRSLKQDHYVSDSGDVVYYRTDPKISGSSKLK

SEQ ID NO: 4755 - protein, 382 aa, Spinacia oleracea
MGAGGRSIPPSARKEKSDALNRVPYEKPPFTLGQIKKAIPPHCFKRSVLRSFSYVVYDFTIAFLLYYVATNYIHLLPKPFNYLAWPVYGFVQGCVLTGVWVIAHECGHHAFSDYQWLDDTVGLVLHSFLLVPYFSWKYSHRRHHSNTGSMEKDEVFVPQRKENMSWFSKYLSNPPGRILTLVVTLTLGWPLYLLFNVSGRKYERFACHYDPSSPIYSDRERLQIFISDVGISIVAFGLYHLAAAKGISWVLCVYGGPLLVVNGFLVLITFLQHTHPSLPHYDTSEWDWLRGALATADRDYGILNKVFHNITDTHVAHHLISTMPHYHAMEATKAIKPILGKYYRLDSTPVFKAMWREAKECMYVEADEDDQNKGVLWYRNKL

SEQ ID NO: 4756 - protein, 346 aa, Prunus armeniaca
KKAIPPHCFQRSVIRSFSYVFYDLTIAFLLYYIASNYIQPLSQPLSSLAWPVYWFVQGCVLTGVWVIAHECGHHAFSDYQWLDDTVGLILHSALLVPYFSWKYSHRRHHSNTGSIERDEVFVPKQKSAIGWYSKYLNNPPGRFLTLTIQLTLGWPLYLAFNVSGRHYEGFACHYHPYGPIFSDRERLQIFLSDAGVLAVVYGLYRLAVAKGLAWVVCYYGGPLMVVNGFLVLITYLQHTHPSLPHYDSSEWDWLKGALATVDRDYGILNKVFHNITDTHVAHHLFSTMPHYHAMEATKAIKPILGDYYQLDRTPVFKAMFREAKECIYIQRDEGDQKGVFWYNNKL

SEQ ID NO: 4757 - protein, 399 aa, Momordica charantia
MGGRGAIGVLRNGGGPKKKMGPGQGLGPGERITHARPPFSISQIKKAIPPHCFQRSLRRSFSYLLSDIALVSAFYYVADTYFHRLPHPLLHYLAWPVYWFCQGAVLTGMWGIAHDCGHHAFSDYQLVDDVVGFLIHSLVFVPYFSFKISHRRHHSNTSSVDRDEVFVPKPKAKMPWYFKYLTNPPARVFIIFITLTLGWPMYLTFNISGRYYGRFTSHFDPNSPIFSPKERVLVHISNAGLVATGYLLYRIAMAKGVGWLIRLYGVPLIVLNACVVLITALQHTHPSFPYYDSTEWDWLRGNLVTVDRDYGPIMNRVFHHITDTHVVHHLFPSMPHYNGKEATVAAKRILGEYYQFDGTPIWKAAWREFRECVYVEPDEDDGATSGSSSKGVFWYHNKL

SEQ ID NO: 4758 - protein, 435 aa, Arabidopsis thaliana; identical to SEQ ID NO: 361

SEQ ID NO: 4759 - protein, 435 aa, Arabidopsis thaliana
MASSVLSECGFRPLPRFYPKHTTSFASNPKPTFKFNPPLKPPSSLLNSRYGFYSKTRNWALNVATPLTTLQSPSEEDTERFDPVAPPPFNLADIRAAIPKHCWVKNPWMSMSYVVRDVAIVFGLAAVAAYFNNWLLWPLYWFAQGTMFWALFVLGHDCGHGSFSNDPRLNSVAGHLLHSSILVPYHGWRISHRTHHQNHGHVENDESWHPLPESIYKNLEKTTQMFRFTLPFPMLAYPFYLWNRSPGKQGSHYHPDSDLFLPKEKKDVLTSTACWTAMAALLVCLNFVMGPIQMLKLYGIPYWIFVMWLDFVTYLHHHGHEDKLPWYRGKEWSYLRGGLTTLDRDYGWINNIHHDIGTHVIHHLFPQIPHYHLVEATEAAKPVLGKYYREPKNSGPLPLHLLGSLIKSMKQDHFVSDTGDVVYYEADPKLNGQRT

SEQ ID NO: 4760 - protein, 446 aa, Arabidopsis thaliana; identical to SEQ ID NO: 360

SEQ ID NO: 4761 - protein, 446 aa, Arabidopsis thaliana
MANLVLSECGIRPLPRIYTTPRSNFLSNNNKFRPSLSSSSYKTSSSPLSFGLNSRDGFTRNWALNVSTPLTTPIFEESPLEEDNKQRFDPGAPPPFNLADIRAAIPKHCWVKNPWKSLSYVVRDVAIVFALAAGAAYLNNWIVWPLYWLAQGTMFWALFVLGHDCGHGSFSNDPKLNSVVGHLLHSSILVPYHGRRISHRTHHQNHGHVENDESWHPMSEKIYNTLDKPTRFFRFTLPLVMLAYPFYLWARSPGKKGSHYHPDSDLFLPKERKDVLTSTACWTAMAALLVCLNFTIGPIQMLKLYGIPYWINVMWLDFVTYLHHHGHEDKLPWYRGKEWSYLRGGLTTLDRDYGLINNIHHDIGTHVIHHLFPQIPHYHLVEATEAAKPVLGKYYREPDKSGPLPLHLLEILAKSIKEDHYVSDEGEVVYYKADPNLYGEVKVRAD

SEQ ID NO: 4762 - protein, 386 aa, Arabidopsis thaliana
MVVAMDQRTNVNGDPGAGDRKKEERFDPSAQPPFKIGDIRAAIPKHCWVKSPLRSMSYVVRDIIAVAALAIAAVYVDSWFLWPLYWAAQGTLFWAIFVLGHDCGHGSFSDIPLLNSVVGHILHSFILVPYHGWRISHRTHHQNHGHVENDESWVPLPERVYKKLPHSTRMLRYTVPLPMLAYPLYLCYRSPGKEGSHFNPYSSLFAPSERKLIATSTTCWSIMFVSLIALSFVFGPLAVLKVYGVPYIIFVMWLDAVTYLHHHGHDEKLPWYRGKEWSYLRGGLTTIDRDYGIFNNIHHDIGTHVIHHLFPQIPHYHLVDATKAAKHVLGRYYREPKTSGAIPIHLVESLVASIKKDHYVSDTGDIVFYETDPDLYVYASDKSKIN

SEQ ID NO: 4763 - protein, 163 aa, Arabidopsis thaliana
LNSRYGFYSKTRNWALNVATPLTTLQSPSEEDTERFDPGAPPPFNLADIRAAIPKHCWVKNPWMSMSYVVRDVAIVFGLAAVAAYFNNWLLWPLYWFAQGTMFWALFVLGHDCGHGSFSNDPRLNSVAGHLLHSSILVPYHGWISHRTHHQNHGHVENDESWH

SEQ ID NO: 4764 - protein, 177 aa, Arabidopsis thaliana
LSNNNKFRPSLSSSSYKTSSSPLSFGLNSRDGFTRNWALNVSTPLTTPIFEESPLEEDNKQRFDPGAPPPFNLADIRAAIPKHCWVKNPWKSLSYVVRDVAIVFALAAGAAYLNNWIVWPLYWLAQGTMFWALFVLGHDCGHGSFSNDPKLNSVVGHLLHSSILVPYHGWRISHRTH

SEQ ID NO: 4765 - protein, 429 aa, Brassica juncea
MANLVLSECGIRPLPRIYTTPRSTFLSNTTFKLKPSPAFRLNGFSTKNWALNVTTPLTVDSSPPTSEEHETQRFDPGAPPPFNLADIRAAIPKHCWVKNPWKSMSYVVRDVAIVFALAAGAAYLNSWLVWPLYWLAQGTMFWALFVLGHDCGHGSFSNDPRLNSVVGHLLHSSILVPYHGWRISHRTHHQNHGHVENDESWHPMSEKIFKTLDRPTRFFRFTLPLVMLAYPFYLWARSPGKKGSHYNPDSDLFLPKERNDVLTSTACWTAMAALLVCLNFVMGPMQMLKLYGIPYWINVMWLDFVTYLHHHGHEDKLPWYRGKEWSYLRGGLTTLDRDYGVINNIHHDIGTHVIHHLFPQIPHYHLVEATEAAKPVLGKYYREPDKSGPLPLHLLGILAKSMKEDHYVSDEGDVVYYKADPNLYGEVKV

SEQ ID NO: 4766 - protein, 404 aa, Brassica napus
FKFRQSPSSPRFRLNSRNWALNVTTPLTVDSSSSPPIEEEPKTQRFDPGAPPPFNLADIRAAIPKHCWVKNPWKSMSYVVRELAIVFALAAGAAYLNNWLVWPLYWIAQGTMFWALFVLGHDCGHGSFSNDPRLNSVVGHLLHSSILVPYHGWRISHRTHHQNHGHVENDESWHPMSEKIYKSLDKPTRFFRFTLPLVMLAYPFYLWARSPGKKGSHYHPDSDLFLPKERNDVLTSTACWTAMAVLLVCLNFVMGPMQMLKLYVIPYWINVMWLDFVTYLHHHGHEDKLPWYRGKEWSYLRGGLTTLDRDYGLINNIHHDIGTHVIHHLFPQIPHYHLVEATEAAKPVLGKYYREPDKSGPLPLHLLGILAKSIKEDHFVSDEGDVVYYEADPNLYGEIKVTAE

SEQ ID NO: 4767 - protein, 172 aa, Brassica rapa
FILVPYHGWRISHRTHHQNHGHVENDESWVPLPEKLYKNLSHSTRMLRYTVPLPMLAYPLYLWYRSPGKEGSHYNPYSSLFAPSERKLIATSTTCWSIMLATLVYLSFLVGPVTVLKVYGVPYIIFVMWLDAVTYLHHHGHDDKLPWYRGKEWSYLRGGLTTIDRDYGIFNN

SEQ ID NO: 4768 - protein, 163 aa, Brassica rapa
TSFKFRQSPSSPRFRLNSRNWALNVTTPLTVDSSSSPPIEEEPKTQRFDPGAPPPFNLADIRAAIPKHCWVKNPWKSMSYVVRDVAIVFALAAGAAYLNNWLVWPLYWIAQGTMFWALFVLGHDCGHGSFSNDPRLNSVVGHLLHSSILVPYHGWRIRHRTHH

SEQ ID NO: 4769 - protein, 169 aa, Brassica oleracea
TSFKFRQSPSSSSLNLRLNSRNWALNVSTPLTVDSSSSPPIEEEPKTQRFDPGAPPPFNLADIRAAIPKHCWVKNPWKSMSYVVRDVAIVFALAAGAAYLNNWLVWPLYWIAQGTMFWALFVLGHDCGHGSFSNDPRLNSVVGHLLHSSILVPYHGWRISHRTHHQNHG

SEQ ID NO: 4770 - protein, 165 aa, Brassica oleracea
SNTTFKLKPSPAFRLNGFSTKNWAALNVTTPLTADSPPPTSEEHERQRFDPGAPPPFNLADIRAAIPKHCWVKNPWKSMSYVVRDVAIVFALAAGAAYLNSWLVWPLYWLAQGTMFWALFVLGHDCGHGSFSNDPRLNSVVGHLLHSSILVPYHGWRISHRTHHQ

SEQ ID NO: 4771 - protein, 141 aa, Brassica oleracea
LPEKLYKNLSHSTRMLRYTVPLPMLAYPLYLWYRSPGKEGSHYNPYSSLFAPSERKLIATSTTCWSIVLATLVYLSFLVGPVTVLKVYGVPYIIFVMWLDAVTYLHHHGHDDKLPWYRGKEWSYLRGGLTTVDRDYGIFNN

SEQ ID NO: 4772 - protein, 108 aa, Brassica oleracea
VVRPGAPPPFNLADIRAAIPKHCWVKNPWRSMSYVVRDVAIVFGLAAVAAYFNSWLLWPLYWFAQGTMFWALFVLGHDCGHGSFSNDPRLNSVAGHLLHSSILVPYHG

SEQ ID NO: 4773 - protein, 286 aa, Prunus persica
FVLGHDCGHGSFSNNPKLNSVVGHLLHSSILVPYHGWRISHRTHHQNHGHVENDESWHPLSEKVYKTLDKATQMLRFTLPFPMLAYPFYLWGRSPGKSGSHFDPNSDLFVPNERKDIITSTACWTAMAGLLVGLSFVMGPVQMLKLYGVPYWLFVMWLDLVTYLHHHGHEDKLPWYRGKEWSYLRGGLTTLDRDYGLINNIHHDIGTHVIHHLFPQIPHYNLVEATEAAKPVLGKYYREPKKSGPLPLHLLGVLIRSMKRDHYVSDTGDVVYYQTDKKLPGSVTSE

SEQ ID NO: 4774 - protein, 340 aa, Mesorhizobium loti
MNMISPDAAANSKRAWLKILARYKKPDRRRSAVELAITLIPFATLWALSSAAYAYGHWWGLILILPAAGFLVRIFMIQHDCGHGSFFANRYADDWIGRALGVLTLTPYDCWRRAHATHHASAGNLDERGMGDIRTLTVAEYRQLSWRGRLAYRLYRHPLVMFGLGPIWLFIFSQRLPIGMMRGGLTPWVSSMTTNLAIALAAALLIWAVGPGAFLVVHLPIVILAGSAGIWLFYVQHQFEETEWAKDDDWEFQHAALHGSSYYDLPPVLNWFTGNIGVHHVHHLSAKVPGYRLQEVLRDYPELRGIGRVTLLDSLRCVKLALWDENRRKLVSFREARATM

SEQ ID NO: 4775 - protein, 379 aa, Arachis hypogaea
MGAGGRVTKIEAQKKPLSRVPHSNPPFSVGQLKKAIPPHCFERSLFISFSYVVYDLLMAYLLFYIATTYFHKLPYPFSFLAWPIYWAIQGCILTGVWVIAHECGHHAFSKYQLVDDMVGLTLHSCLLVPYFSWKISHRRHHSNTGSLDRDEVFVPKPKSKVSWYNKYMNNPPGRAISLFITLTLGWPLYLAFNVSGRPYDRFASHYDPYAPIYSNRERLLIYVSDSSVFAVTYLLYHIATLKGLGWVVCVYGVPLLIVNGFLVTITYLQHTHASLPHYDSSEWDWLRGALATVDRDYGILNKAFHHITDTHVAHHLFSTMPHYHAMEATNAIKPILGDYYQFDGTPVYKALWREAKECLYVEPDDGASQKGVYWYKNKF

SEQ ID NO: 4776 - protein, 379 aa, Arachis hypogaea
MGAGGRVTKIEAQKKPLSRVPHSNPPFSVGQLKKAIPPHCFERSLFISFSYVVYDLLVAYLLFYIATTYFHKLPYPFSFLAWPIYWAIQGCILTGVWVIAHECGHHAFSKYQLVDDMVGLTLHSCLLVPYFSWKISHRRHHSNTGSLDRNEVFVPKPKSKVSWYNKYMNNPPGRAISLFITLTLGWPLYLAFNVSGRPYDRFASHYDPYAPIYSNRERLLIYVSDSSVFAVTYLLYHIATLKGLGWVVCVYGVPLLIVNGFLVTITYLQHTHASLPHYDSSEWDWLRGALATVDRDYGILNKAFHHITDTHVAHHLFSTMPHYHAMEATNAIKPILGDYYQFDGTPFYKALWREAKECLYVEPDDGASKKGVYWYKNKF

SEQ ID NO: 4777 - protein, 379 aa, Arachis hypogaea
MGAGGRVTKIEAQKKPLSRVPHSNPPFSVGQLKKAIPPHCFERSLFISFSYVVYDLLMAYLLFYIATTYFHKLPYPFSFLAWPIYWAIQGCILTGVWVIAHECGHHAFSKYQLVDDMVGLTLHSCLLVPYFSWKISHRRHHSNTGSLDRDEVFVPKPKSKVSWYNKYMNNPPGRAISLFITLTLGWPLYLAFNVSGRPYDRFASHYDPYAPIYSNRERLLIYVSDSSVFAVTYLLYHIATLKGLGWVVCVYGVPLLIVNGFLVTITYLQHTHASLPHYDSSEWDWLRGALATVDRDYGILNKAFHHITDTHVAHHLFSTMPHYRAMEATNAIKPILGDYYQFDGTPVYKALWREAKECLYVEPDDGASQKGVYWYKNKF

SEQ ID NO: 4778 - protein, 355 aa, Sinorhizobium meliloti
MSAHVYPPASLVEDNAGAWLKTLAKYRQPRLGRSAFELFVTLVPFAIFWAAACFSLANGFWPGLIAILPASAFLLRLFMIQHDCGHGSFFSRRGLDDWTGRLLGVLTLTPYDYWRRAHAAHHATAGNLDERGVGDITTLTITEYCALSPIKRLGYRLYRHPLVMFGIGPAWLFLFKQRLPFGMMNSGALPWISTMATNFAIVTLAALMVWAVGLGTFLLIHLPVVLLAGAAGVWLFYVQHQFEETHWSAGEDWRFPQAALHGASHYDLPPVLRWLTGNIGIHHVHHLSSRIPYYRLPEVLRDHPQLAGIGRITLWDSLKCVRLVLWDDRRRRLVSFHDAAGSLRRSLTEDGRKTK

SEQ ID NO: 4779 - protein, 380 aa, Vigna radiata var. radiata
MIQAQTLQHFGNGAREGDQSYFDPGAPPPFKIADIRAAIPKHCWEKSTLRSLSYVLRDVLVVTALAASAISFNSWFFWPLYWPAQGTMFWALFVLGHDCGHGSFSNSSKLNSFVGHILHSLILVPYNGWRISHRTHHQNHGHVEKDESWVPLTEKVYKNLDDMTRMLRYSFPFPIFAYPFYLWNRSPGKEGSHFNPYSNLFSPGERKGVVTSTLCWGIVLSVLLYLSLTIGPIFMLKLYGVPYLIFVMWLDFVTYLHHHGYTHKLPWYRGQEWSYLRGGLTTVDRDYGWINNVHHDIGTHVIHHLFPQIPHYHLVEATKSAKSVLGKYYREPQKSGPLPFHLLKYLLQSISQDHFVSDTGDIVYYQTDPKLHQDSWTKSK

SEQ ID NO: 4780 - protein, 460 aa, Ricinus communis
MAAGWVLSECGLRPLPRIYSRPRIGFTSKTTNLLKLRELPDSKSYNLCSSFKVSSWSNSKQSNWALNVAVPVNVSTVSGEDDREREEFNGIVNVDEGKGEFFDAGAPPPFTLADIRAAIPKHCWVKNPWRSMSYVLRDVVVVFGLAAVAAYFNNWVAWPLYWFCQGTMFWALFVLGHDCGHGSFSNNPKLNSVVGHLLHSSILVPYHGWRISHRTHHQNHGHVENDESWHPLSEKIFKSLDNVTKTLRFSLPFPMLAYPFYLWSRSPGKKGSHFHPDSGLFVPKERKDIITSTACWTAMAALLVYLNFSMGPVQMLKLYGIPYWIFVMWLDFVTYLHHHGHEDKLPWYRGKAWSYLRGGLTTLDRDYGWINNIHHDIGTHVIHHLFPQIPHYHLVEATEAAKPVMGKYYREPKKSGPLPLHLLGSLVRSMKEDHYVSDTGDVVYYQKDPKLSGIGGEKTE

SEQ ID NO: 4781 - protein, 413 aa, Oryza sativa (japonica cultivar-group)
MARLLLSGVAPLPLLPCRRRAIAFALPLGNVRLRLRVAAPTSRVATVEEDDNENNAPPPPCEDFDPGAAPPFGLADIRAAIPKHCWVKDPWRSMGYVLRDVVVVFALAAAAARLHSCLAWPLYWAAQGTMFWALFVLGHDCGHGSFSNNSRLNSVMGHILHSSILVPYHGWRISHRTHHQNHGHVDKDESWHPLPERLYRSLNRATRMLRFSIPFPMLAYPFYLWSRSPGKSGSHFHPSSDLFQPNERNDVLTSTACWVAMAALLAGLTFLMGPLLMLNLYFVPYWIFVMWLDFVTYLHHHGHNDKLPWYRGKEWSYLRGGLTTVDRDYGWINNIHHDIGTHVIHHLFPQIPHYHLIEATEAAKGVMGKYYREPDKSGPFPLHLFGALSRSLKRDHYVSDTGDVVYYQTDPAN

SEQ ID NO: 4782 - protein, 269 aa, Oryza sativa (japonica cultivar-group)
NNVVGHLLHSFILVPYHGWRFSHRTHHQNHGHIERDESWHPITEKLYWQLETRTKKLRFTLPFTLLAFPWYRSPGKTGSHFLPSSDLFSPKEKSDVIVSTTCWCIMISLLVALACVFGPVPVLMLYGVPYLVFVMWLDLVTYLHHHGHNDLPWYRGEEWSYLRGGLTTVDRDYGWINNIHHDIGTHVIHHLFPQIPHYHLVEATKAARPVLGRYYREPEKSGPLPLHLFGVLLRTLRVDHFVSDVGDVVYYQTDHSLNGTDWAEDAKHK

SEQ ID NO: 4783 - protein, 407 aa, Pelargonium x hortorum
IRGRCDKEKKVLLRRPPLPRLQPSFHHFCFVMEPKLAPSAYGHDDSDFDPSAPPPFRLGEIRAAIPQHCWVKSPWRSMSYVVRDIVVVFALAVAAFRLDSWLVWPIYWAVQGTMFWAIFVLGHDCGHGSFSDSHILNSVMGHILHSSILVPYHGWRISHKTHHSNHGHVENDESWVPLTEKTYKSLDVSTRLLRFTIPFPVFAYPFYLWWRSPGKKGSHFNPYSDLFAPSERRDVLTSTISWSIMVALLAGLSCVFGLVPMLKLYGGPYWIFVMWLDTVTYLHHHGHDDHKLPWYRGKEWSYLRGGLTTVDRDYGLFNNIHHDIGTHVIHHLFPQIPHYHLVEATRAAKPVLGKYYREPKRSGPFPYHLIDNLVKSIKEDHYVSDTGDIVFYETDPEQFKSDPKKLA

SEQ ID NO: 4784 - protein, 383 aa, Daucus carota
MGAGGRMSAPSNVKKTETEALRRAPHEKPPFTIGDLKKAIPAHCFEKSLITSFRYLIQDLLMAYALYYVATNYIDQYLPHPINYLGWAAYIAIQGCVLTGAWVVGHECDHDAFSDYGWINDLVGLVVHSSLMVPYFSWKISHRRHHANTQSLENDEVYVPRFKSNIRNYYKILNNPPGRVIVWLITLLIGFPIYLMFNVSGHKYERWTSHYDPHSPLYTERERKQIIVSDFAILAVLYGLYNLVLAKGFAWVFCVYGGPLLVVNGWFTLITILNHTHPSLPYYDSSEWDWLRGALCTVDRDYGILNKVFHNVCNAHVCHHIFSMIPHYHGLEATEAMKPLLGDYYQYDGTPILKAMYREMKECIYVEKDEGETKGVYWSRKDI

SEQ ID NO: 4785 - protein, 438 aa, Petroselinum crispum
MASWVISECGLRPLPRIYARPRSGASCFNSKNPVKNLRFLDENVKISMTGSRNWGLRVSVPMSVPSVSEEEERFESLVEEENEFDPGAAPPFKLSDVRAAIPKHCWVKDPVRSMSYVLRDVLIVFGLAVAASFVNNWAVWPLYWIAQGTMFWALFVLGHDCGHGSFSNDAKLNSVVGHILHSSILVPYHGWRISHRTHHQNHGHVENDESWHPLSEKLFNSLDDLTRKFRFTLPFPMLAYPFYLWGRSPGKKGSHYDPSSDLFVPNERKDVITSTVCWTAMAALLVGLNFVMGPVKMLMLYGIPYWIFVMWLDFVTYLHHHGHDDKLPWYRGKEWSYLRGGLTTLDRDYGWINNIHHDIGTHVVHHLFPQIPHYHLIEATEAAKPVFGKYYREPKKSGPVPFHLLATLWKSFKKDHFVSDTGDVVYYQAHPEIAKTQK

SEQ ID NO: 4786 - protein, 438 aa, Capsicum annuum
MASWVLSECGVRPLPRIYPKPRPGLASSTATTNINMRISPTRTDLVSRNCWALRVSAPLRIQTVGEEERDIKDRQYDEYFDPGAPPPFKLSDIRAAIPKHCWVKNPWRSMSYVVRDVAIVLGLAAAAAYLNNWVVWPLYWFAQSTMFWALFVLGHDCGHGSFSNNHKLNSVAGHILHSSILVPYHGWRISHRTHHQNHGHVENDESWHPLSEKVYNSLDYATKKLRFTLPFPLLAYPFYLWGRSPGKKGSHFDSNSDLFVPSEKKDVITSTLCWTAMAAFLVGLSFVMGPIQLLKLYVIPYWGFVMWLDIVTYLHHHGHDDKLPWYRGEEWSYLRGGLTTLDRDYGWINNIHHDIGTHVIHHLFPQIPHYHLVEATEAAKPVLGKYYKEPKKSGPLPFYLLGYLIKSMEEDHYVSDTGNVVYYQLILTFWMSEIEFLV

SEQ ID NO: 4787 - protein, 447 aa, Lycopersicon esculentum
MASWVLSECGLGPLPKIYPKPTIGFSSSVSVSATSLNLRRISPSPIRTDRNCWALRVSAPLRIQIAGEEEEQTTNNGDEFFDPGAPPPFKLSDIKAAIPNHCWVKNPWTSMSYVVRDVAIVFGLAAAAAYFNNWLVWPLYWFAQSTMFWPLYWFAQSTMFWALFALGHDCGHGSLSNNHSLNSVAGHILHSSIPVPYHGWRISHRTHHQNHGHVENDESWHPLSEKLYNSLDDITKKFRFTLPFPLLAYPFYLWGRSPGKKGSHFDPNSDLFVASEKKDVITSTVYWTAMAALLVGLSFVMGPLQMLKLYGIPYLGLCHMLDLVAYLHHHGHEDKVPWYRGEEWSYLRGGLTTLDRDYGWINNIHHDIGTHVIHHLFPQIPHYHLVEATEAAKPVLGKYYKEPKKSGPLPFYLLGYLIRSMKEDHFVSDTGNVVYYETDPNLYGSKK

SEQ ID NO: 4788 - protein, 441 aa, Nicotiana tabacum
MASWVLSECGLRPLPRIYPKPRTGAATSASSHIKLRISRTDLSGSAISLSNTNKERNWALRVSAPLRIQTVGEEESERTNNSGGEFFDPGAPPPFKLSDIKAAIPKHCWVKNPWKSMSYVVRDVAIVFGLAAAAAYFNNWVVWPLYWFAQSTMFWALFVLGHDCGHGSFSNNHKLNSVVGHILHSSILVPYHGWRISHRTHHQNHGHVENDESWHPIPEKIYNSLDLATKKLRFTLPFPLLAYPFYLWSRSPGKKGSHFDPNSDLFVPSEKKDVMTSTLCWTAMAALLVGLSFVMGPFQVLKLYGIPYWGFVMWLDLVTYLHHHGHDDKLPWYRGEEWSYLRGGLTTLDRDYGWINNIHHDIGTHVIHHLFPQIPHYHLVEATEAAKPVLGKYYKEPKKSGPLPFYLLGVLIKSMKQDHYVSDTGDIVYYRTDPQLSGFQK

SEQ ID NO: 4789 - protein, 383 aa, Solanum commersonii
MGAGGRMSAPNGETEVKRNPLQKVPTSKPPFTVGDIKKAIPPHCFQRSLIRSFSYVVYDLILVSIMYYVANTYFHLLPSPYCYIAWPIYWICQGCVCTGIWVNAHECGHHAFSDYQWVDDTVGLILHSALLVPYFSWKYSHRRHHSNTGSLERDEVFVPKPKSQLGWYSKYLNNPPGRVLSLTITLTLGWPLYLAFNVSGRPYDRFACHYDPYGPIYNNRERLQIFISDAGVLGVCYLLYRIALVKGLAWLVCVYGVPLLVVNGFLVLITYLQHTHPSLPHYDSTEWDWLRGALATCDRDYGVLNKVFHNITDTHVVHHLFSTMPHYNAMEATKAVKPLLGDYYQFDGTPIYKEMWREAKECLYVEKDESSQGKGVFWYKNKL

SEQ ID NO: 4790 - protein, 431 aa, Solanum tuberosum
MASWVLSECGLRPLPRIYPKPRIGSSSVCATNLNLRRISPSPIRTDRNCWALRVSAPLRIQIAGEEEEQTTNNGDEFDPGASPPFKLSDIKAAIPKHCWVKNPWTSMSYVVRDVAIVFGLAAAAAYFNNWLVWPLYWFAQSTMFWALFVLGHDCGHGSFSNNHNLNSVAGHILHSSILVPYHGWRISHRTHHQNHGHVENDESWHPLSEKLYNSLDDITKKFRFTLPFPLLAYPFYLWGRSPGKKGSHFDPSSDLFVASEKKDVITSTVCWTAMAALLVGLSFVMGPLQVLKLYGIPYWGFVMWLDIVTYLHHHGHEDKVPWYRGEEWSYLRGGLTTLDRDYGWINNIHHDIGTHVIHHLFPQIPHYHLVEATEAAKPVLGKYYKEPKKSGPLPFYLLGYLIKSMKEDHFVSDTGNVVYYQTDPNLYGSEK

SEQ ID NO: 4791 - protein, 447 aa, Sesamum indicum
MASWVLSECGLRPLPRVYPKPRTGHPLLNSNPTKLRFSRTDLGNGSSFCLSSGILREKNWALRVSAPLRVLQVEEEEENKEGERVINGGEEFDPGAPPPFKLSDIREAIPKHCWVKDPWRSMGYVVRDVAVVFGLAAVAAYFNNWVVWPLYWFAQSTMFWALFVLGHDCGHGSFSNDPKLNSVVGHILHSSILVPYHGWRISHRTHHQNHGHVENDESWHPLSEKIYKNLDTATKKLRFTLPFPLLAYPIYLWSRSPGKQGSHFHPDSDLFVPNEKKDVITSTVCWTAMLALLVGLSFVIGPVQLLKLYGIPYLGNVMWLDLVTYLHHHGHEDKLPWYRGKEWSYLRGGLTTLDRDYGWINNIHHDIGTHVIHHLFPQIPHYHLIEATEAAKPVLGKYYREPKKSAPLPFHLLGDLTRSLKRDHYVSDVGDVVYYQTDPQLTGAEKS

SEQ ID NO: 4792 - protein, 189 aa, Lactuca sativa
MGSGGRATQRDNSGNKVVKRAPSSKPPFTLSDIKKTIPPHCFNRSLLRSSSYLFVDLFFSFFFYYVASTYIIHLPTPLSYVAWVVYWILQGCVQMGLWVIGHECGHQAFSDYTWLNDTIGYFLHTSLLAPYFSWKYSHRRHHSNTASLEHDESFVPKKKSSLNSFARLLNTPPGRFFRLVILCTIGWLL

SEQ ID NO: 4793 - protein, 435 aa, Oryza sativa
  unsure (1)..(435): unsure at all Xaa locations
MARLVLSECCGLTPLRLXXGRGAIALPAPSSLAGGPRRPVSAAAAGGAIHRERRPGVRWRRPKPAAGEVGGXXGDGFDPGAPPPFGLAEIRAAIPKHCWVKDPWRSMSYVLRDVVVVLGLAAAAARVDSWLVWPLYWAAQGTMFWALFVLGHDCGHGSFSGGPKLNSVVGHILHSSILVPYHGWRISHRTHHQNHGHVEKDESWQPLSERRYNSPDYMTKNLRFPMXPFPMLAFPLYLFARSPGKKGSHFNPSSDLFQPNEKKDVITSTASWLAMVGILAGLTFVMGPLKMLKLYAVPYVIFVMWLDXVTYLHHHGHEDKLPWYRGKEWSYLRGGLTTLDRDYGWINNVHHDIGTHVIHHLFPQIPHYHLVEATEAAKPVLGKYYKEPEKSAPLPFHLLGVLAKSLNSDHYVSDTGDVVYYQTDLKTSSSAQSSD

SEQ ID NO: 4794 - protein, 388 aa, Oryza sativa
  unsure (1)..(388): unsure at all Xaa locations
MSASARVAAPTSRVATVEEDDNEDFDPGAAPPFGLADIRAAIPKHCWVKDPWRSMGYVLRDVVVVFALAAAAARLHSCLAWPLYWAAQGTMFWALFVLGHDCGHGSFSNNSRLNSVMGHILHSSILVPYHGWRISHRTHHQNHGHVDKDESWHPLPERLYRSLNRATRMLRFSIPFPMLAYPFYLWSRSPGKSGSHFHPSSDLFQPNERNDVLTSTACWVAMAALLAGLTFLMGPLLMLNLYFVPYWIFVMWLDFVTYLHHHGHNDKLPWYRGKEWSYLRGGLTTVDRDYGWINNIHHDIGTHVIHHLFPQIPHYHLIEATEAASVMGKYYREPDKSGPFPLHLFGALSRSLKRDHYVSDTGDVVYYQTDPANXINFTFPSILLSPEA

SEQ ID NO: 4795 - protein, 385 aa, Oryza sativa
MAASATQEADCKASEDARLFFDAAKPPPFRIGDVRAAIPAHCWRKTPLRSLSYVARDLLIVAALFAAAATRIDVSVAWAAWPLYWAAQGTMFWALFVLGHDCGHGSFSDSAMLNNVVGHLLHSFILVPYHGWRISHRTHHQNHGHIEKDESWHPITEKLYRKLETRTKKLRFTLPFPLLAFPVYLWYRSPGKTGSHFLPSSDLFSPKEKSDVIVSTTCWCIMISLLVALACVFGPVPVLMLYGVPYLVFVMWLDLVTYLHHHGHNDLPWYRGEEWSYLRGGLTTVDRDYGWINNIHHDIGTHVIHHLFPQIPHYHLVEATKAARPVLGRYYREPEKSGPLPLHLFGVLLRSLRVDHFVSDVGDVVYYQTDHSLNGTDWAEDAKHK

SEQ ID NO: 4796 - protein, 381 aa, Oryza sativa
MAASATQEADCKASEDARLFFDAAKPPPFRIGDVRAAIPVHCWRKTPLRSLSYVARDLLIVAALFAAAASSIDLAWAWAWPLYWARQGTMVWALFVLGHDCGHGSFSDSAMLNNVVGHLLHSFILVPYHGWRFSHRTHHQNHGHIERDESWHPITEKLYWQLETRTKKLRFTLPFTLLAFPWYRSPGKTGSHFLPSSDLFSPKEKSDVIVSTTCWCIMISLLVALACVFGPVPVLMLYGVPYLVFVMWLDLVTYLHHHGHNDLPWYRGEEWSYLRGGLTTVDRDYGWINNIHHDIGTHVIHHLFPQIPHYHLVEATKAARPVLGRYYREPEKSGPLPLHLFGVLLRTLRVDHFVSDVGDVVYYQTDHSLNGTDWAEDAKHK

SEQ ID NO: 4797 - protein, 381 aa, Oryza sativa; identical to SEQ ID NO: 4796

SEQ ID NO: 4798 - protein, 297 aa, Oryza sativa
MSYVLRDVVVVLGLAAAAARVDSWLVWPLYWAAQGTMFWALFVLGHDCGHGSFSSNAKLNSVVGHILHSSILVPYHGWRISHRTHHQNHGHVEKDESWQPFARSPGKKGSHFNPSSDLFQPNEKKDVITSTASWLAMVGILAGLTFVMGPLKMLKLYAVPYVIFVMWLDFVTYLHHHGHEDKLPWYRGKEWSYLRGGLTTLDRDYGWINNVHHDIGTHVIHHLFPQIPHYHLVEATEAAKPVLGKYYKEPEKSAPLPFHLLGVLAKSLNSDHYVSDTGDVVYYQTDLKTSSSAQSSD

SEQ ID NO: 4799 - protein, 308 aa, Oryza sativa
  unsure (1)..(308): unsure at all Xaa locations
MARLLLSGVAPLPLLPCRRRAIAFALPLGNVRLRSRVATVEEDDNENNAPPPPCEDFDPGAAPPFGLADIRAAIPKHCWVKDPWRSMGYVLRDVVVVFALAAAAARLHSCLAWPLYWAAQGTMFWALFVLGHDCSDLFQPNERNDVLTSTACWVAMAALLAGLTFLMGPLLMLNLYFVPYWIFVMWLDFVTYLHHHGHNDKLPWYRGKEWSYLRGGLTTVDRDYGWINNIHHDIGTHVIHHLFPQIPHYHLIEATEAASVMGKYYREPDKSGPFPLHLFGALSRSLKRDHYVSDTGDVVYYQTDPANX

SEQ ID NO: 4800 - protein, 440 aa, Triticum aestivum
  unsure (1)..(440): unsure at all Xaa locations
MARLALSDCRGLTPLRARSRGGAIALPSPPHLAAGPRRPAAAAIHRDWALRVAAPTRLASVXXEEDKRSLGGAEEAGSSSAGFNPGAPPPFGLAEIRAAIPKHCWVKDPWRSMSYVLRDVLVVLGLAAAAARVDSWLVWPLYWAAQGTMFWALFVLGHDCGHGSFSSNPKLNSVVGHILHSSILVPYNGWRISHRTHHQNHGHVEKDESWHPLPQRLYNSLDNMTKKLRFSMPFPMLAFPLYLFARSPGKEGSHFNPNSDLFQPNENKDVLTSTASWLAMIGVLAGLSFVMGPLKMLKLYAVPYVIFVMWLDFVTYLHHHGHEDKVPWYRGKEWSYLRGGLTTLDRDYGLINNIHHDIGTHVIHHLFPQIPHYHLVEATEAAKPVLGKYYKEPEKSAPLPFHLLQVLSRSLKEDHYVSDTGDIVYYQSESETSTCAQSSD

SEQ ID NO: 4801 - protein, 381 aa, Triticum aestivum
RQDDGSGSSSRAQGGDEGPSADGFDPGAPPPFGLADIRAAIPKHCWVKDPWRSMGYVVRDVVVVLALAATAARLDSWLAWPVYWAAQGTMFWALFVLGHDCGHGSFSNNAKLNSVVGHILHSSILVPYNGWRISHRTHHQNHGHVENDESWHPLPEKLYRSLDSSTRKLRFALPFPMLAYPFYLWSRSPGKSGSHFHPSSDLFQPNEKKDILTSTTCWLAMAGLLAGLTVVMGPLQILKLYAVPYWIFVMWLDFVTYLHHHGHNDKLPWYRGKAWSYLRGGLTTLDRDYGWLNNIHHDIGTHVIHHLFPQIPHYHLVEATEAAKPVLGKYYREPDKSGPFPFHLFGALARSMKSDHYVSDTGDIIYYQTDPKLAAGAHTSD

SEQ ID NO: 4802 - protein, 380 aa, Triticum aestivum
RQDDGSGSSSRAQGGDEGPSADGFDPGAPPPFGLADIRAAIPKHCWVKDPWRSMGYVVRDVVVVLALAATAARLDSWLAWPVYWAAQGTMFWALFVLGHDCGHGSFSNNAKLNSVVGHILHSSILVPYNGWRISHRTHHQNHGHVENDESWHPLPEKLYRSLDSSTRKLRFALPFPMLAYPFYLWSRSPGKSGSHFHPSSDLFQPNEKKDILTSTTCWLAMAGLLAGLTVVMGPLQILKLYAVPYWIFVMWLDFVTYLHHHGHNDKLPWYRGKAWSIYTGGLTTLDRDYGWLNNIHHDIGTHVIHHLLPQIPHYHLVEATEAATVLGKYYREPDKSGPFPFHLFGALARSMKSDHYVSDTGDIIYYQTDPKLAAGAHTSD

SEQ ID NO: 4803 - protein, 380 aa, Triticum aestivum
RQDDGSGSSSRAQGGDEGPSADGFDPGAPPPFGLADIRAAIPKHCWVKDHWSSMGYVVRDVVVVLALAATAARLDSWLAWPVYWAAQGTMFWALFVLGHDCGHGSFSNNAKLNSVVGHILHSSILVPYNGWRISHRTHHQNHGHVENDESWHPLPEKLYRSLDSSTRKLRFALPFPMLAYPFYLWSRSPGKSGSHFHPSSDLFQPNEKKDILTSTTCWLAMAGLLAGLTVVMGPLQILKLYAVPYWIFVMWLDFVTYLHHHGHNDKLPWYRGKAWSIYTGGLTTLDRDYGWLNNIHHDIGTHVIHHLLPQIPHYHLVEATEAATVLGKYYREPDKSGPFPFHLFGALARSMKSDHYVSDTGDIIYYQTDPKLAAGAHTSD

SEQ ID NO: 4804 - protein, 383 aa, Triticum aestivum
MAPAMRPEQEASCKATEDHRSEFDAAKPPPFRIGDVRAAVPAHCWRKSPLRSLSYVARDVAVVAALAAAAWRADSWALWPLYWAVQGTMFWALFVLGHDCGHGSFSDSGTLNSVVGHLLHTFILVPYNGWRISHRTHHQNHGHIEKDESWHPITEKVYQKLEPRTKTLRFSVPFPLLAFPVYLWYRSPGKEGSHFNPSSDLFTPKERRDVIISTTCWFTMIALLIGMACVFGLVPVLKLYGVPYIVNVMWLDLVTYLHHHGHQDLPWYRGEEWSYLRGGLTTVDRDYGWINNIHHDIGTHVIHHLFPQIPHYHLVEATKAARPVLGRYYREPEKSGPLPMYLITVLLKSLRVDHFVSDVGDVVFYQTDPSLSGDKWTGTDKQK

SEQ ID NO: 4805 - protein, 383 aa, Triticum aestivum
MAPAMRPEQEASCKATEDHRSEFDAAKPPPFRIGDVRAAVPAHCWPQEPPASLSYVARDVAVVAALAAAAWRADSWALWPLYWAVQGTMFWALFVLGHDCGHGSFSDSGTLNSVVGHLLHTFILVPYNGWRISHRTHHQNHGHIDRDESWHPITEKVYQKLEPRTKTLRFSVPFPLLAFPVYLWYRSPGKEGSHFNPSSDLFTPKERRDVIISTTCWFTMIALLIGMACVFGLVPVLKLYGVPYIVNVMWLDLVTYLHHHGHQDLPWYRGEEWSYLRGGLTTVDRDYGWINNIHHDIGTHVIHHLFPQIPHYHLVEATKAARPVLGRYYREPEKSGPLPMHLITVLLKSLRVDHFVSDVGDVVFYQTDPSLSGDKWTGTDKQK

SEQ ID NO: 4806 - protein, 383 aa, Triticum aestivum; identical to SEQ ID NO: 4805

SEQ ID NO: 4807 - protein, 398 aa, Zea mays
WALRVSAPTRLTSAVEEDKRSSPLGEGDEHVAASGAAGGEFDPGAPPPFGLAEIRAAIPKHCWVKDPWRSMAYVLRDVVVVLGLAAAAARLDSWLVWPLYWAAQGTMFWALFVLGHDCGHGSFSNNPKLNSVVGHILHSSILVPYHGWRISHRTHHQNHGHVEKDESWHPLPERLYKSLDFMTRKLRFTMPFPLLAFPLYLFARSPGKSGSHFNPSSDLFQPNEKKDIITSTASWLAMVGVLAGLTFLMGPVAMLKLYGVPYFVFVAWLDMVTYLHHHGHEDKLPWYRGQEWSYLRGGLTTLDRDYGLINNIHHDIGTHVIHHLFPQIPHYHLIEATEAAKPVLGKYYKEPKKSGPLPWHLFGVLAQSLKQDHYVSDTGDVVYYQTDSKTNTSAQKSD

SEQ ID NO: 4808 - protein, 398 aa, Zea mays; identical to SEQ ID NO: 4807

SEQ ID NO: 4809 - protein, 398 aa, Zea mays
WALRVSAATRLTSAVEEDKRSSPLGEGDEHVAASGAAGGEFDPGAPPPFGLAEIRAAIPKHCWVKDPWRSMAYVLRDVVVVLGLAAAAARLDSWLVWPLYWAAQGTMFWALFVLGHDCGHGSFSNNPKLNSVVGHILHSSILVPYHGWRISHRTHHQNHGHVEKDESWHPLPERLYKSLDFMTRKLRFTMPFPLLAFPLYLFARSPGKSGSHFNPSSDLFQPNEKKDIITSTASWLAMVGVLAGLTFLMGPVTMLKLYGVPYFVFVAWLPAGTYLHHHGHEDKLPWYRGQEWSYLRGGLTTLDRDYGLINNIHHDIGTHVIHHLFPQIPHYHLIEATEAAKPVLGKYYKEPKKSGPLPWHLFGVLAQSLKQDHYVSDTGDVVYYQTDSKTNTSAQKSD

SEQ ID NO: 4810 - protein, 443 aa, Zea mays
MARLVLSECSGLAPVRRLRAGRGAIAARSPPALSAAPRRRPASASIHRDWALRVSAPTRLASAAVEEDKPSAAPGQEEGAAAGGEFDPGAPPPFGLAEIRAAIPKHCWVKDPWRSMSYVLRDVAVVLGLAAAAARLDSWLVWPLYWAAQGTMFWALFVLGHDCGHGSFSNNPKLNSVVGHILHSSILVPYHGWRISHRTHHQNHGHVEKDESWHPLPERLYKSLDFMTRKLRFTMPFPLLAFPLYLFARSPGKSGSHFNPGSDLFQPTEKNDIITSTASWLAMVGVLAGLTFLMGPVPMLKLYGVPYLVFVAWLDMVTYLHHHGHEDKLPWYRGKEWSYLRGGLTTLDRDYGWINNIHHDIGTHVIHHLFPQIPHYHLIEATEAAKPVLGKYYKEPKNSGALPWHLFRVLAQSLKQDHYVSHTGDVVYYQAESKTSTSAQKSD

SEQ ID NO: 4811 - protein, 443 aa, Zea mays; identical to SEQ ID NO: 4810

SEQ ID NO: 4812 - protein, 398 aa, Zea mays
WALRVSAPTRLTSAVEEDKRSSPLGEGDEHVAASGAAGGEFDPGAPPPFGLAEIRAAIPKHCWVKDPWRSMAYVLRDVVVVLGLAAAAARLDSWLVWPLYWAAQGPSVWAPCVLGHDCGHGSFSNNPKLNSVVGHILHSSILVPYHGWRISHRTHHQNHGHVEKDESWHPLPERLYKSLDFMTRKLRFTMPFPLLAFPLYLFARSPGKSGSHFNPSSDLFQPTEKNDIITSTASWLAMVGVLAGLTFLMGPVPMLKLYGVPYLVFVAWLDMVTYLHHHGHEDKLPWYRGKEWSYLRGGLTTLDRDYGWINNIHHDIGTHVIHHLFPQIPHYHLIEATEAAKPVLGKYYKEPKKSGALPWHLFRVLAQSLKQDHYVSDTGDVVYYQADSKTSTSAQKSD

SEQ ID NO: 4813 - protein, 467 aa, Zea mays
  unsure (1)..(467): unsure at all Xaa locations
ADNRKPDLNGCRQTSWVTLTAGAGGAVGPSRPARPPRISSRREEESQAATGPGEPAWHACSSPSQSPCPLAAAAALWFLVPRGTEAAAASVSLCPPPPPPPXTQQEFDPAAAPPFGLGDIRAAIPKHCWVKDPWRSMGYVVRDVVLVLGLAAAAARLDSWLVWPLYWAAQGTMFWALFVLGHDCGHGSFSNNPILNSVVGHILHSSILVPYNGWRISHRTHHQNHGHVDKDESWHPLPERLFKSLDSVVLMLRFRLPFPMLVYPFYLANRSPGKSGSHFHPASDLFQPSESKQVLTSTACWLAMVALLAGLAFLMGPLQMLKLYLVPYWVFGMWLDFVTXLHHHGHNDKXLPWYXRGKEWTYLRGGLTTLDRDYGWINNIHHDIGTHVIHHLFPQIPHYHLIEATEAAKPVLGNYYREPQKSGPLPLHLLGDLVQSLRRDHYVSDTGDVVYYQTDPTXLAVLVHSLD

SEQ ID NO: 4814 - protein, 388 aa, Zea mays
MQMTADQESAAKATEDDTMIFDAGKPPPFRIGDVRAAVPEHCWRKSPWRSLWYVARDVAVVAALGAAAAGMDSWAVWPLYWAAQGTMFWALFVLGHDCGHGSFSDSATLNSVVGHLLHSFILVPYHGWRISHRTHHQNHGHIHRDESWHPITEKLYRQLEPRTKKLRFTVPFPLLAFPVYLLYRSPGKSGSHFLPSSDLFSPKEKSDVMVSTTCWCIMLASLLAMACAFGPLQVLKMYGIPYLVFVMWLDLVTYLHHHGHHQLPLPWYRGQEWSYLRGGLTTVDRDYGWINNVHHDIGTHVIHHLFPQIPHYHLVEATKAAKPVLGRYYREPHKSGPLPLHLLVVLLRSLRVDHFVSDHGDVVYYQTDHDLNTSSAHGWANQNHHKQK

SEQ ID NO: 4815 - protein, 511 aa, Zea mays
MARLVLSECCGLAPLRLRAGRGAIAAPSPPALSAAAAPGRPAPAAIHRDWALRVSAPTRLTSAVEEDKRSSPLGEGDEHVAASGAAGGEFDPGAPPQFGLAEIRAAIPKHCWVKDPWRSMAYVLRDVVVVLGLAAAAARLDSWLVWPLYWAAQGTMFWALFVLGHDCGHGSFSNNPKLNSVVGHILHSSILVPYHGWRISHRTHHQNHGHVEKDESWHPLPERLYKSLDFMTRKLRFTMPFPLLAFPLYLVRLRTWKSGSHFNPSSDLFQPNEKKDIITSTASWLAMVGVLAGLTFLMGPVTMLKLYGVPYFVFVAWLDMVTYLHHHGHEDKLPWYRGQTEAAKPVLGKYYKEPKKSGPLPWHLFGVLAQSLKQDHYVSDTGDGLASWGSPEVGALAAGAWGRADEGAERRPALARTAVGLRGGRPGGWGVGLGGCLRLGPGGQPARAGLGGWGRRVTGPIVGGLRPPKDKSIYDRKSMIVTKVVVAPKLHARELRLNRRKENRLKREKVI

SEQ ID NO: 4816 - protein, 292 aa, Zea mays
MFWALFVLGHDCGHGSFSNNPKLNSVVGHILHSSILVPYHGWRISHRTHHQNHGHVEKDESWHPLPERLYKSLDFMTRKLRFTMPFPLLAFPLYLFARSPGKSGSHFNPGSDLFQPTEKNDIITSTASWLAMVGVLAGLTFLMGPVPMLKLYGVPYLVFVAWLDMVTYLHHHGHEDKLPWYRGKEWSYLRGGLTTLDRDYGWINNIHHDIGTHVIHHLFPQIPHYHLIEATEAAKPVLGKYYKEPKNSGALPWHLFRVLAQSLKQDHYVSHTGDVVYYQAESKTSTSAQKSD

SEQ ID NO: 4817 - protein, 262 aa, Zea mays
LHSSILVPYHGWRISHRTHHQNHGHVEKDESWHPLPERLYKSLDFMTRKLRFTMPFPLLAFPLYLFARSPGKSGSHFNPGSDLFQPTEKNDIITSTASWLAMVGVLAGLTFLMGPVPMLKLYGVPYLVFVAWLDMVTYLHHHGHEDKLPWYRGKEWSYLRGGLTTLDRDYGWINNIHHDIGTHVIHHLFPQIPHYHLIEATEAAKPVLGKYYKEPKNSGALPWHLFRVLAQSLKQDHYVSHTGDVVYYQAESKTSTSAQKSD

SEQ ID NO: 4818 - protein, 236 aa, Zea mays
KPMQMTADQESAAKATEDHDVVFDAGKPPPFRIGDVRAAVPEHCWRKNPWRSLWYVARDVAVVAALGAAAAGMDSWAVWPLYWAAQGTMFWALFVLGHDCGHGSFSDSATLNSVVGHLLHSFILVPYHGWRISHRTHHQNHGHIHRDESWHPITEKLYRQLEPRTKKLRFTVPFPLLAFPVYLLYRSPGKSGSHFLPSSDLFSPKEKSDVMVSTTCWCIMLASLLAMACAFGPLQG

SEQ ID NO: 4819 - protein, 188 aa, Zea mays
  unsure (1)..(188): unsure at all Xaa locations
XAARPGFLVFPRVRPASDITSTAFWLAMVGVLSGLTFLMGPVTMLKLYGVPYFVFVASRPAGTYLHHHGHEDKLPWYRGQEWSYLRGGLTTLDRDYGLINNIHHDIGTHVIHHLFPQIPHYHLIEATEAAKPVLGKYYKEPKKSGPLPWHLFGVLAQSLKQDHYVSDTGDVVYYQTDSKTNTSAQKSD

SEQ ID NO: 4820 - protein, 152 aa, Zea mays
  unsure (1)..(152): unsure at all Xaa locations
XWLDFVTYLHHHGHNDKLPWYRGKEWTYLRGGLTTLDRDYGWINNIHHDIGTHVIHHLFPQIPHYHLIEATEAAKPVLGNYYREPQKSGPLPLHLLGDLVQSLRRDHYVSDTGDVVYYQTDPTISCSGPFTXLIEGGWKLCETQGSEATGEI

SEQ ID NO: 4821 - protein, 438 aa, Perilla frutescens
MASWVLSECGLRPLPRIYPKPRTGQYLSNSNPSKLRLSRTGFSSDSSFSLVGRERNWGLKVSAPLRFQEVEEESEERGSVIVNGVDEFDPGAPPPFKLSDIRAAIPKHCWVKDPWRSMSYVVRDVVVVFGLAAAAAYFNNWAVWPIYWFAQSTMFWALFVLGHDCGHGSFSNDPKLNSVAGHLLHSSILVPYHGWRISHRTHHQNHGHVENDESWHPIPEKIYRTLDFATKKLRFTLPFPMLAYPFYLWGRSPGKKGSHFHPDSDLFVPNERKDVITSTVCWTAMVAILAGLSFVMGPVQLLKLYGIPYIGFVAWLDLVTYLHHHGHDEKLPWYRGKEWSYLRGGLTTLDRDYGWINNIHHDIGTHVIHHLFPQIPHYHLIEATAAAKPVLGKYYKEPKKSGPFPFYLLGVLQKSMKKDHYVSDTGDIVYYQTDPELN

SEQ ID NO: 4822 - protein, 384 aa, Brassica carinata
MGAGGRMQVSPSPKKSETDTIKRVPCETPPFTVGELKKAIPPHCFKRSIPRSFSYLIWDIIVASCFYYVATTYFPLLPHPLSYIAWPLYWACQGCVLTGVWVIAHECGHHAFSDYQWLDDTVGLIFHSFLLVPYFSWKYSHRRHHSNTGSLERDEVFVPKKKSDIKWYGKYLNNPLGRTVMLTVQFTLGWPLYLAFNVSGRPYPEGFACHFHPNAPIYNDRERLQIYVSDAGILAVCYGLYRYAAAQGVASMVCLYGVPLLIVNAFLVLITYLQHTHPSLPHYDSSEWDWLRGALATVDRDYGILNKVFHNITDTHVAHHLFSTMPHYHAMEATKAIKPILGDYYQFDGTPWVKAMWREAKECIYVEPDRQGEKKGVFWYNNKL

SEQ ID NO: 4823 - protein, 193 aa, Gibberella zeae
DLDMAFVPRTSPKPSLSFRIAGMDVAELIEDTPIAQAVKLIFHQLFGWQVYTFFNASSGKGSKQWEPKSGLASWFRVSHFEPTSAVFRPAEAPFILISDIGLALTGTALYFASKEVGVSTVLYLYLVPYLWVHHWLVAITYLHHHHTELPHYTAEGWTYVKGALATVDREFGFIGKHLFHGIIEKHVIHHLFP

SEQ ID NO: 4824 - protein, 212 aa, Trypanosoma cruzi
MSRVDNLTVAPGSPDVMKAVLKSGRNKENNVIVPSSALTIREIQEKIPVKYFERNTTRSVMFLLRDLAQVALTYAIMYAVALPLATSMEVSAARTVADGGALSLMAGTAMTTAAWLLKGVLWAVFWFVQGLNGTALWVLAHECGHQAFSPMKGLNDTVGMILHSALLVPYHSWRITHGGHHKHTNHLTKDLVFVPEKRNSVWSSWRMHRWCH

SEQ ID NO: 4825 - protein, 375 aa, Prochlorococcus marinus subsp. pastoris str. CCMP1378
MSDIPSMKEFQSVIPNNCFKSQTITSLGYLLQSIIIQAIVVAIGLTIPFSQRMVPIWILYALLSGTTAMGFWVIAHECGHGAFSKNKTLETITGYLLHSLLLVPYFSWQRSHAVHHRFTNHITNGETHVPIVIDGNGISEKVGGEKELSFSSKLGKTKYGILQLVLHLIFGWPAYLLSGSTGGLKYGTSNHFWPRKPFSKTLWPAVWAKKVWISDIGVAAVIVGLIIFIIKHGFFPIIGMYVGPLLVVNCWLVIYTWLHHTDSDVPHLSNSEFSFMRGAFLSIDRPYGKIINILHHNIGSSHVVHHVCPTIPHYHATKATLAIRKAFNKAYLFNPDPIHKALWNIACNCIAVKSDIDEGRYIWQSSYKKKIKTTY

SEQ ID NO: 4826 - protein, 376 aa, Caenorhabditis elegans
MTIATKVNTNKKDLDTIKVPELPSVAAVKAAIPEHCFVKDPLTSISYLIKDYVLLAGLYFAVPYIEHYLGWIGLLGWYWAMGIVGSALFCVGHDCGHGSFSDYEWLNDLCGHLAHAPILAPFWPWQKSHRQHHQYTSHVEKDKGHPWVTEEDYNNRTAIEKYFAVIPISGWLRWNPIYTIVGLPDGSHFWPWSRLFETTEDRVKCAVSGVACAICAYIAFVLCDYSVYTFVKYYYIPLLFQGLILVIITYLQHQNEDIEVYEADEWGFVRGQTQTIDRHWGFGLDNIMHNITNGHVAHHFFFTKIPHYHLLEATPAIKKALEPLKDTQYGYKREVNYNWFFKYLHYNVTLDYLTHKAKGVLQYRSGVEAAKAKKAQ

SEQ ID NO: 4827 - protein, 402 aa, Caenorhabditis elegans
MVAHSSEGLSATAPVTGGDVLVDARASLEEKEAPRDVNANTKQATTEEPRIQLPTVDAFRRAIPAHCFERDLVKSIRYLVQDFAALTILYFALPAFEYFGLFGYLVWNIFMGVFGFALFVVGHDCLHGSFSDNQNLNDFIGHIAFSPLFSPYFPWQKSHKLHHAFTNHIDKDHGHVWIQDKDWEAMPSWKRWFNPIPFSGWLKWFPVYTLFGFCDGSHFWPYSSLFVRNSERVQCVISGICCCVCAYIALTIAGSYSNWFWYYWVPLSFFGLMLVIVTYLQHVDDVAEVYEADEWSFVRGQTQTIDRYYGLGLDTTMHHITDGHVAHHFFNKIPHYHLIEATEGVKKVLEPLSDTQYGYKSQVNYDFFARFLWFNYKLDYLVHKTAGIMQFRTTLEEKAKAK

SEQ ID NO: 4828 - protein, 402 aa, Caenorhabditis elegans
MVAHSSEGLSATAPVTGGDVLVDARASLEEKEAPRDVNANTKQATTEEPRIQLPTVDAFRRAIPAHCFERDLVKSIRYLVQDFAALTILYFALPAFEYFGLFGYLVWNIFMGVFGFALFVVGHDCLHGSFSDNQNLNDFIGHIAFSPLFSPYFPWQKSHKLHHAFTNHIDKDHGHVWIQDKDWEAMPSWKRWFNPIPFSGWLKWFPVYTLFGFCDGSHFWPYSSLFVRNSDRVQCVISGICCCVCAYIALTIAGSYSNWFWYYWVPLSFFGLMLVIVTYLQHVDDVAEVYEADEWSFVRGQTQTIDRYYGLGLDTTMHHITDGHVAHHFFNKIPHYHLIEATEGVKKVLEPLSDTQYGYKSQVNYDFFARFLWFNYKLDYLVHKTAGIMQFRTTLEEKAKAK

SEQ ID NO: 4829 - protein, 384 aa, Lesquerella fendleri
MGAGGRIMVTPSSKKSETEALKRGPCEKPPFTVKDLKKAIPQHCFKRSIPRSFSYLLTDITLVSCFYYVATNYFSLLPQPLSTYLAWPLYWVCQGCVLTGIWVIGHECGHHAFSDYQWVDDTVGFIFHSFLLVPYFSWKYSHRRHHSNNGSLEKDEVFVPPKKAAVKWYVKYLNNPLGRILVLTVQFILGWPLYLAFNVSGRPYDGFASHFFPHAPIFKDRERLQIYISDAGILAVCYGLYRYAASQGLTAMICVYGVPLLIVNFFLVLVTFLQHTHPSLPHYDSTEWEWIRGALVTVDRDYGILNKVFHNITDTHVAHHLFATIPHYNAMEATEAIKPILGDYYHFDGTPWYVAMYREAKECLYVEPDTERGKKGVYYYNNKL

SEQ ID NO: 4830 - protein, 181 aa, Lesquerella fendleri
  unsure (1)..(181): unsure at all Xaa locations
YWHRRHHSNNGSLEKDEVFVPPKKAAVXWYVKYLNNPLGRILVLTVQFILGWPLYLAFNVSGRPYDGFASHFFPHAPIFKDRERLQIYISDAGILAVCYGLYRYAASQGLTAMICVYGVPLLIVNFFLVLVTFLQHTHPSLPHYDSTEWEWIRGALVTVDRDYGILNKVFHNITDTHVAHH

SEQ ID NO: 4831 - protein, 161 aa, Lesquerella fendleri
YRHRRHHSNTGSLERDEVFVPKQKSAIKWYGEYLNNPPGRIMMLTVQFVLGWPLYLAFNVSGRPYNGFASHFFPNAPIYNDRERLQIYISDAGILAVCYGLYRYAVAQGLASMICLNGVPLLIVNFFLVLITYLQHTHPALPHYDSSEWDWLRGALATVDR

SEQ ID NO: 4832 - protein, 359 aa, Nostoc punctiforme
MPSNIITFNNPLGSEKSEDTTKLPFNLQDLKAAIPAECFQPNVKKSLFYFFRDILIIGLLYAVASYLDSWLFFPIFWLMQGTMFWALFVVGHDCGHQSFSKHKWLNDLIGHLSHTPILVPYHGWRISHRTHHKNTGNIDNDESWYPVSESQYKEMPLAQKIGRYYVFLLAYPVYLFKRSPNKEGSHFLPGSSLFKPSEKWDVITSTVLLIGMVGLLGFLTYQWGWMWLLKYYAVPYLVFIVWLDLVTFLHHTEPELPWYRGEDWTFLKGAISSIDRDYGLVNHIHHDIGTHVAHHIFLNIPHYNLLKATEAIKPVMGEYFHKSEEPIWKSLWNSCISCHFVPDTGSRVYYTSNNKLAKD

SEQ ID NO: 4833 - protein, 399 aa, Mortierella alpina
MAPPNTIDAGLTQRHISTSAPNSAKPAFERNYQLPEFTIKEIRECIPAHCFERSGLRGLCHVAIDLTWASLLFLAATQIDKFENPLIRYLAWPVYWIMQGIVCTGVWVLAHECGHQSFSTSKTLNNTVGWILHSMLLVPYHSWRISHSKHHKATGHMTKDQVFVPKTRSQVGLPPKENAAAAVQEEDMSVHLDEEAPIVTLFWMVIQFLFGWPAYLIMNASGQDYGRWTSHFHTYSPIFEPRNFFDIIISDLGVLAALGALIYASMQLSLLTVTKYYIVPYLFVNFWLVLITFLQHTDPKLPHYREGAWNFQRGALCTVDRSFGKFLDHMFHGIVHTHVAHHLFSQMPFYHAEEATYHLKKLLGEYYVYDPSPIVVAVWRSFRECRFVEDQGDVVFFKK

SEQ ID NO: 4834 - protein, 400 aa, Mortierella alpina
MAPPNTIDAGLTQRHISTSAAPTSAKPAFERNYQLPEFTIKEIRECIPAHCFERSGLRGLCHVAIDLTWASLLFLAATQIDKFENPLIRYLAWPAYWIMQGIVCTGIWVLAHECGHQSFSTSKTLNNTVGWILHSMLLVPYHSWRISHSKHHKATGHMTKDQVFVPKTRSQVGLPPKENVAVAVQEEDMSVHLDEEAPIVTLFWMVIQFLFGWPAYLIMNASGQDYGRWTSHFHTYSPIFEPRNFFDIIISDLGVLAALGTLIYASMQLSLLTVTKYYIVPYLFVNFWLVLITFLQHTDPKLPHYREGAWNFQRGALCTVDRSFGKFLDHMFHGIVHTHVAHHLFSQMPFYHAEEATHHLKKLLGEYYVYDPSPIVVAVWRSFRECRFVEDHGDVVFFKK

SEQ ID NO: 4835 - protein, 400 aa, Mortierella alpina
MAPPNTIDAGLTQRHITTTAAPTSAKPAFERNYQLPEFTIKEIRECIPAHCFERSGLRGLCHVAIDLTWASLLFLAATQIDKFENPLIRYLAWPAYWIMQGIVCTGIWVLAHECGHQSFSTSKTLNNTVGWILHSMLLVPYHSWRISHSKHHKATGHMTKDQVFVPKTRSQVGLPPKESAAAAVQEEDMSVHLDEEAPIVTLFWMVIQFLFGWPAYLIMNASGQDYGRWTSHFHTYSPIFEPRNFFDIIISDLGVLAALGALIYASMQLSLLTVTKYYIIPYLFVNFWLVLITFLQHTDPKLPHYREGAWNFQRGALCTVDRSFGKFLDHMFHGIVHTHVAHHLFSQMPFYHAEEATYHLKKLLGEYYVYDPSPIVVAVWRSFRECRFVEDHGDVVFFKK

SEQ ID NO: 4836 - protein, 375 aa, Crepis alpina
MGGGGRGRTSQKPLMERVSVDPPFTVSDLKQAIPPHCFKRSVIRSSYYIVHDAIIAYIFYFLADKYIPILPAPLAYLAWPLYWFCQASILTGLWVIGHECGHHAFSDYQWVDDTVGFILHSFLMTPYFSWKYSHRNHHANTNSLDNDEVYIPKSKAKVALYYKVLNHPPGRLLIMFITFTLGFPLYLFTNISGKKYERFANHFDPMSPIFKERERFQVLLSDLGLLAVLYGVKLAVAAKGAAWVTCIYGIPVLGVFIFFDIITYLHHTHLSLPHYDSSEWNWLRGALSTIDRDFGFLNSVLHDVTHTHVMHHLFSYIPHYHAKEARDAINTVLGDFYKIDRTPILKAMWREAKECIFIEPEKGRGSKGVYWYNKF

SEQ ID NO: 4837 - protein, 437 aa, Vernicia fordii
ERPPGQVTGAVSRTHSSKLRLLHTNKTVKDLKLPFSNGCFRERDWGIKVSAPYRVSSIEGEEEEREEGINGVIGIEGEETEFDPGAPPPFKLSDIREAIPKHCWVKDPWRSMSYVVRDVAVVFGLAAAAAYLNNWIVWPLYWAAQGTMFWALFVLGHDCGHGSFSHNPKLNSVVGHLLHSSILVPYHGWRISHRTHHQNHGHVENDESWQPLSEKIFRSLDYMTRTLRFTVPSPMLAYPFYLWNRSPGKTGSHFHPDSDLFGPNERKDVITSTVCWTAMAALLVGLSLVMGPIQLLKLYGMPYWIFVMWLDFVTYLHHHGHEEKLPWYRGNEWSYLRGGLTTLGRDYGWINNIHHDIGTHVIHHFFPQIPHYHLIDATEASKPVLGKYYREPDKSGPLSFHLIGYLIRSLKKDHYVSDTGDVVYYQTDPQLSGSSSE

SEQ ID NO: 4838 - protein, 451 aa, Vernicia fordii
MAVWALSDCGIRPLPKIYSKPRLAFTSNNPQPTKPPIPRPELRNGSSFKLSSAGLRDKWVVNLSAPLRGGLVEEDEDNFEGNRVISIDESGGEDFDPDAPPPDTLADIRAAIPKHRWTKNPEISLSYVVRNVAVVSGLAAVAAYFNDWAFWSPYWICQGTMLSALFVLGHDCGHGSFSNNPNLDSVVGHLLHYSILVPYHGWRISYRTHYRHHQHAENDESWHPLSEKIYKGLNNVTRTLRLSLPFSLLAYPSYLWSRSPGKKGFHFHPSSDLFVPSEKKDVITSTVCWTAMLALLVGSSFVMGLVQLLKPYGIPYLIFVMWLDLVTYLHHHGHENKIPWYRGEEWSYLRGRLTTVGRDYGWFNKIHHDIGIHVIHHLFPQIPHYHLIEATEAAKPVLGKYYREPKKSGPLPFHLLGSLIRSMKEDHYVSDAGDVVYYQKEPKLSGARCLS

SEQ ID NO: 4839 - protein, 387 aa, Vernicia fordii
MKQQQYKDTPILNGVNGFHAKEEEEEEDFDLSNPPPFNIGQIRAAIPKHCWVKNPWRSLTYVFRDVVVVFALAAAAFYFNSWLFWPLYWFAQGTMFWAIFVLGHDCGHGSFSNNSSLNNVVGHLLHSSILVPYHGWRISHRTHHQNHGNVEKDESWVPLPEKIYKEMDLSTRILRYSVPLPMFALPFYLWWRSPGKEGSHFNPNSDFFAPHERKAVLTSNFCFSIMALLLLYSCFVFGPVQVLKFYGIPYLVFVMWLDFVTYMHHHGHEEKLPWYRGKEWSYLRGGLQTVDRDYGWINNIHHDIGTHVIHHLFPQIPHYHLIEATKAAKPVLGKYYREPKKSGPFPFHLFSNLVRSMSEDHYVSDIGDIVFYQTDPDIYKVDKSKLN

SEQ ID NO: 4840 - protein, 383 aa, Vernonia galamensis
MGAGGRMSNPPKDEKKAEHEALQRVPYQKPPFTVGDIKKAIPPHCLNRSVIKSFSYVVYDLTISFIFYYLATNYIPLLPHPLSYVAWPVYWIFQGCVLTGVWVIAHECGHHAFSDYQWLDDTVGLILHSALLVPYFSWKYSHRRHHSNTGSIEHDEVFVPKLKSNVRSTARYLNNPPGRILTLLVTLTLGWPLYLMFNVSGRYYDRFACHFDPNSPIYSNRERAQIFISDAGILAVFYGLFKLAMAKGLTWVLCMYGGPLLVVNGFLVLITFLQHTHPSLPHYDTTEWDWLRGALATIDRDYGILNKVFHNITDTHVAHHLFSTMPHYHAMEATKVIKPILGEYYQFDGTSIFKAMYRETKECIYVDKDENVKDGVYWYRNKI

SEQ ID NO: 4841 - protein, 383 aa, Vernonia galamensis
MGAGGRMSNPPKDEKKAEHEALQRVPYQKPPFTVGDIKKAIPPHCFNRSVIRSFSYVVYDLTISFIFYYLATNYIPLLPHPLSYVAWPVYWIFQGCVLTGVWVIAHECGHHAFSDYQWLDDTVGLILHSALLVPYFSWKYSHRRHHSNTGSIEHDEVFVPKLKSNVRSTARYLNNPPGRILTLLVTLTLGWPLYLMFNVSGRYYDRFACHFDPNSPIYSNRERAQIFISDAGILAVFYGLFKLAMAKGLTWVLCMYGGPLLVVNGFLVLITFLQHTHPSLPHYDTTEWDWLRGALATIDRDYGILNKVFHNITDTHVAHHLFSTMPHYHAMEATKVIKPILGEYYQFDGTSIFKAMYRETKECIYVDKDENVKDGVYWYRNKI

SEQ ID NO: 4842 - protein, 420 aa, Emericella nidulans
MASDAGKGDLGKMLDTYGNEFKIPDYTIKDIRDAIPSHCYNRSAIRSLSYVFRDLAVLASVFYVFHKYVTPETVPSYPARVALWTLYTVVQGLFGTGIWVLAHECGHQAFSTSKVLNDTVGWILHSALLVPYFSWKISHGKHHKATGNLARDMVFVPKTREVYASRIKKTIYDLNEVMEETPLATATHSILQQLFGWPLYLLTNVTGHDNHERQPEGRGKGKRNGYFTGVNHFNPNSPLFEAKDAKLIILSDIGLAITASILYLIGSKFGWMNLLVWYGIPYLWVNHWLVAITYLQHTDPTLPHYQPESWTFARGAAATIDREFGFIGRHILHGIIETHVLHHYVSTIPFYHADEASEAIKKVMGSHYRSEAHTGPLGFLKALWTSARVCHWVEPTEGTKGENAGVLFFRNTNGIGVPPH

SEQ ID NO: 4843 - protein, 352 aa, Bacillus subtilis subsp. subtilis str. 168
MTEQTIAHKQKQLTKQVAAFAQPETKNSLIQLLNTFIPFFGLWFLAYLSLDVSYLLTLALTVIAAGFLTRIFIIFHDCCHQSFFKQKRYNHILGFLTGVLTLFPYLQWQHSHSIHHATSSNLDKRGTGDIWMLTVNEYKAASRRTKLAYRLYRNPFIMFILGPIYVFLITNRFNKKGARRKERVNTYLTNLAIVALAAACCLIFGWQSFLLVQGPIFLISGSIGVWLFYVQHTFEDSYFEADENWSYVQAAVEGSSFYKLPKLLQWLTGNIGYHHVHHLSPKVPNYKLEVAHEHHEPLKNVPTITLKTSLQSLAFRLWDEDNKQFVSFRAIKHIPVSLPPDSPEKQKLRKNA

SEQ ID NO: 4844 - protein, 444 aa, Betula pendula
MASWVVSECGLKPLPRILNPRLRDGVASSTTFPSKIRPPPICKSHCVGSSLRLSSGLRGNRWWALNVSAPFRVPSVGEEGENRERVNGVEDDGEFDPGSPPPFRLTDIRAAIPKHCWVKDPWKSMSYVVRDVVVVFGLAAIAAYFNNWIVWPLYWIAQGTMFWALFVLGHDCGHGSFSSNLNLNSVVGHLLHSSILVPYHGWRISHRTHHQNHGHVENDESWHPLSEKMYKKLDYVTRSLRFTLPFPMLAYPFYLWVRSPGKKGSHYHPNSDLFVPNERKDVITSTACWTAMAALLVYLSFAMGPVQLLKLYGIPYWIFVVWLDVVTYLHHHGHEDKLPWYRGKEWSYLRGGLTTLDRDYGVINNIHHDIGTHVIHHLFPQIPHYHLVEATEAARPVFGKYYREPKKSGPLPFHLLGTLIRSMKQDRYVSDAGDVVYYQSDKTI

SEQ ID NO: 4845 - protein, 386 aa, Betula pendula
MKEPVLEEMENAGGFGNGFHGVVEKDDFDPSAPPPFKIAEIRAAIPKHCWAKNPWRSLSYALRDVFVVIALAAAAIYFKAWIFWPLYWAAQGTMFWALFVLGHDCGHGSFSDNPELNNLVGHVLHSAILVPYHGWRISHRTHHQNHGNVENDESWVPLTEKLYKSLGYSTRLLRFTVPFPLFAYPIYLWSRSPGKEGSHFNPYSNLFSPNERKDVITSTLCWSLMAALLIYSSCAIGPIQMLKLYGVPHLIFVMWLDLVTYLHHHGYEQKLPWYRGKEWSYLRGGLTTVDRDYGWFNNIHHDIGTHVIHHLFPQIPHYHLVEATNAAKPVLGKYYREPKRSGPFPIHLIKNLVRSISEDHYVNDNGDIVYYQTDPELYKSSNTKSD

SEQ ID NO: 4846 - protein, 329 aa, Brassica napus
MSYVVRELAIVFALAAGAAYLNNWLVWPLYWIAQGTMFWALFVLGHDCGHGSFSNDPRLNSVVGHLLHSSILVPYHGWRISHRTHHQNHGHVENDESWHPMSEKIYKSLDKPTRFFRFTLPLVMLAYPFYLWARSPGKKGSHYHPDSDLFLPKERNDVLTSTACWTAMAVLLVCLNFVMGPMQMLKLYVIPYWINVMWLDFVTYLHHHGHEDKLPWYRGKEWSYLRGGLTTLDRDYGLINNIHHDIGTHVIHHLFPQIPHYHLVEATEAAKPVLGKYYREPDKSGPLPLHLLGILAKSIKEDHFVSDEGDVVYYEADPNLYGEIKVTAE

SEQ ID NO: 4847 - protein, 106 aa, Brassica rapa
RPGAPPPFNLADIRAAIPKHCWVKNPWKSMSYVVRDVAIVFGLAAVAAYFNSWLLWPLYWFAQGTMFWALFVLGHDCGHGSFSNDPKLNSVAGHLLHSSILVPYHG

SEQ ID NO: 4848 - protein, 164 aa, Arachis hypogaea
MGAGGRVTKIEAQKKPLSRVPHSNPPFSVGQLKKAIPPHCFERSLFISFSYVVYDLLMAYLLFYIATTYFHKLPYPFSFLAWPIYWAIQGCILTGVWVIAHECGHHAFSKYQLVDDMVGLTLHSCLLVPYFSWKISHRRHHSNTGSLRPRRSVCPETKIKGIMV

SEQ ID NO: 4849 - protein, 453 aa, Glycine max
MATWVLSECGLRPLPPVFPRSTRPISCQKPSKSRFLSTNKGVPDLNLQARGLTCCSFRDRKWELGVSAPLKVATNEGEEEERTNGANNGVGEEVSEFDPSAPPPFKLADIRAAIPKHCWVKDPWKSMSYVVRDVIVVFGLAAAAAYLNNWVVWPLYWAAQGTMFWALFVLGHDCGHGSFSNNPKLNSVAGHLLHSSILVPYHGWRISHRTHHQNHGHVENDESWHPLPEKIFKSLDNVTRILRFTLPFPLLAYPIYLWSRSPGKTGSHFNPDSDLFVPSERKDVITSTICWTAMAALLVGLGFVMGPVQLLKLYGIPYAIFVMWLDLVTYLHHHGHEDKLPWYRGEEWSYLRGGLTTIDRDYGWINNIHHDIGTHVIHHLFPQIPHYHLIEATEAAKPVLGQYYREPKKSSPLPIYLIGELLRSMKKDHFVSDSGDIVYYQTDPTLSSSSTSQ

SEQ ID NO: 4850 - protein, 454 aa, Glycine max
  unsure (1)..(454): unsure at all Xaa locations
MATWVLSECSLKPLAXPVIPRPRTGAVLSSTSKVGFLETNKVLEGSKFQPLRCNLRERNWGLKVSVPLRIASIEEEEQKSVDVINGSNGVEHEKLPEFDPGAPPPFNLADIRAAIPKHCWVKDPLKSMSYVVRDVIAVFGLASAAAYLNNWLVWPLYWAAQGTMFWALFVLGHDCGHGSFSNNPKLNSVVGHLLHSSILVPYHGWRISHRTHHQHHGHVENDESWHPLPEKLFRSLDTVTRMLRFTAPFPLLAYPVYLWGRSPGKTGSHFDPSSDLFVPNERKDVITSTACWAAMLGLLVGLGFVMGPIQLLKLYGVPYVIFVMWLDLVTYLHHHGHEDKLPWYRGKEWSYLRGGLTTLDRDYGLINNIHHDIGTHVIHHLFPQIPHYHLVEATEAAKPVFGKYYREPKKSSPLPFHLIGELIKSFKTDHFVSDKGDVVYYQTDSEINGSSKSE

SEQ ID NO: 4851 - protein, 452 aa, Glycine max
  unsure (1)..(452): unsure at all Xaa locations
MATWVLSECGLRXSLPPVFPRPKDPFSCQKPSKFRFLSINKGVADLNLQPITCYNSRERKWESGVSAPLKVATTEGEEEEGINGANGVVEEVPEFDPSAPPPFKLADIRASIPKHCWVKDPWKSMSYVVRDVIVVFGLAVAAAYLNNWVVWPLYWAAQGTMFWALFVLGHDCGHGSFSNNPKLNSVAGHLLHSSILVPYHGWRISHRTHHQNHGHVENDESWHPLPEKIFKSLDNVTRILRFTLPFPLLAYPIYLWSRSPGKTGSHFNPDSDLFVPSERKDVITSTVCWTAMAALLVGLGFVMGPVQLLKLYGIPYVIFVMWLDLVTYLHHHGHEDKLPWYRGEEWSYLRGGLTTIDRDYGWINNIHHDIGTHVIHHLFPQIPHYHLIEATEAAKPVLGLYYREPKKSSPLPIYLIGELLRSMKKDHFVSNTGDIVYYQTXDPTLSSSSTSQ

SEQ ID NO: 4852 - protein, 453 aa, Glycine max
MATWYHQKCGLKPLAPVIPRPRTGAALSSTSRVEFLDTNKVVAGPKFQPLRCNLRERNWGLKVSAPLRVASIEEEQKSVDLTNGTNGVEHEKLPEFDPGAPPPFNLADIRAAIPKHCWVKDPWRSMSYVVRDVIAVFGLAAAAAYLNNWLVWPLYWAAQGTMFWALFVLGHDCGHGSFSNNSKLNSVVGHLLHSSILVPYHGWRISHRTHHQHHGHAENDESWHPLPEKLFRSLDTVTRMLRFTAPFPLLAFPVYLFSRSPGKTGSHFDPSSDLFVPNERKDVITSTACWAAMLGLLVGLGFVMGPIQLLKLYGVPYVIFVMWLDLVTYLHHHGHEDKLPWYRGKEWSYLRGGLTTLDRDYGWINNIHHDIGTHVIHHLFPQIPHYHLVEATEAAKPVFGKYYREPKKSAAPLPFHLIGEIIRSFKTDHFVSDTGDVVYYQTDSKINGSSKLE

SEQ ID NO: 4853 - protein, 526 aa, Glycine max
  unsure (1)..(526): unsure at all Xaa locations
MTKYFSVLGLDILLLVAIFLFSFWFSSFVFFFVSHLSEDFSILVPGGTRNPDQINKPFFSSNFSEVSFFSPMATWXYYQNVGLKPLAPVIPRPRTGAALSSTSRVEFLDTNKVVAGPKFQPLRCNLRERNWGLKVSAPLRVASIEEEQKSVDLTNGTNGVEHEKLPEFDPGAPPPFNLADIRAAIPKHCWVKDPWRSMSYVVRDVIAVFGLAAAAAYLNNWLVWPLYWAAQGTMFWALFVLGHDCGHGSFSNNSKLNSVVGHLLHSSILVPYHGWRISHRTHHQHHGHAENDESWHPLPEKLFRSLDTVTRMLRFTAPFPLLAFPVYLFSRSPGKTGSHFDPSSDLFVPNERKDVITSTACWAAMLGLLVGLGFVMGPIQLLKLYGXVPYVIFVMWLDLVTYLHHHGHEDKLPWYRGKEWSYLRGGLTTLDRDYGWINNIHHDIGTHVIHHLFPQIPHYHLVEATEAAKPVFGKYYREPKKSAAPLPFHLIGEIIRSFKTDHFVSDTGDVVYYQTDSKINGSSKLE

SEQ ID NO: 4854 - protein, 380 aa, Glycine max
MVQAQPLQHVGNGAGKEDQAYFDPSAPPPFKIANIRAAIPKHCWEKNTLRSLSYVLRDVLVVTALVAAAIGFNSWFFWPLYWPAQGTMFWALFVLGHDCGHGSFSNSPLLNSIVGHILHSSILVPYHGWRISHRTHHQNHGHVEKDESWVPLTEKVYKNLDNMTRMMRFTLPFPIFAYPFYLWSRSPGKEGSHFNPYSNLFSPGERRDVLTSTLCWGIMLSVLLYLSLTMGPLFMLKLYGVPYLIFVMWLDFVTYLHHHGYKQKLPWYRGQEWSYLRGGLTTVDRDYGWINNIHHDIGTHVIHHLFPQIPHYHLIEATKAAKAVLGKYYREPQKSGPLPLHLIKYLLHSISQDHFVSDSGDIVYYQTDSQLHKDSWTQSN

SEQ ID NO: 4855 - protein, 380 aa, Glycine max; identical to SEQ ID NO: 4854

SEQ ID NO: 4856 - protein, 376 aa, Glycine max
MVKDTKPLAYAANNGYQKEAFDPSAPPPFKIAEIRVAIPKHCWVKNPWRSLSYVLRDVLVIAALMAAASHFNNWLLWLIYWPIQGTMFWALFVLGHDCGHGSFSDSPFLNSLVGHILHSSILVPYHGWRISHRTHHQNHGHIEKDESWVPLTEKIYKNLDSMTRLIRFTVPFPLFVYPIYLFSRSPGKEGSHFNPYSNLFPPSERKGIAISTLCWATMFSLLIYLSFITSPLLVLKLYGIPYWIFVMWLDFVTYLHHHGHHQKLPWYRGKEWSYLRGGLTTVDRDYGWINNIHHDIGTHVIHHLFPQIPHYHLVEATQAAKPVLGEYYREPERSAPLPFHLIKYLIQSMRQDHFVSDTGDVVYYQTDSLLLHSQRD

SEQ ID NO: 4857 - protein, 376 aa, Glycine max
MVKDTKPLAYAANNGYQKEAFDPSAPPPFKIAEIRVAIPKHCWVKSPWRSLSYVLRDVLVIAALMAAASHFNNWLLWLIYWPIQGTMFWALFVLGHDCGHGSFSDSPFLNSLVGHILHSSILVPYHGWRISHRTHHQNHGHIEKDESWVPLTEKIYKNLDNMTRLVRFTVPFPLFVYPIYLFSRSPGKEGSHFNPYSNLFPPSERKGIAISTLCWVTMFSMLIYLSFITSPVLLLKLYGIPYWIFVMWLDFVTYLHHHGHHQKLPWYRGKEWSYLRGGLTTVDRDYGWINNIHHDIGTHVIHHLFPQIPHYHLVEATQAAKSVLGEYYREPERSAPLPFHLIKYLIQSMRQDHFVSDTGDVVYYQTDSLHLHSHRD

SEQ ID NO: 4858 - protein, 376 aa, Glycine max
  unsure (1)..(376): unsure at all Xaa locations
MVKDTKPLAYAANNGYQKEAFDPSAPPPFKIAEIRVAIPKHCWVKNPWRSLSYVLRDVLVIAALMAAASHFNNWLLWLIYWPIQGTMFWALFVLGHDCGHGSFSDSPFLNSLVGHILHSSILVPYHGWRISHRTHHQNHGHIEKDESWVPLTEKIYKNLDNMTRLIRFTVPFPLFVYPIYLFSRSPGKEGSHFNPYSNLFPPSERKGIAISTLCWATMFSLLIYLSFITSPLLVLKLYGIPYWIFVMWLDFVTYLHHHGHHQKLPWYRGKEWSYLRGGLTTVDRDYGWINNIHHDIGTHVIHHLFPQIPHYHLVEAXXAAKSVLGEYYREPERSAPLPFHLIKYLIQSMRQDHFVSDTGDVVYYQTDSLLLHSQRD

SEQ ID NO: 4859 - protein, 380 aa, Glycine max
MVKDTKPLAYAANNGYQQKGSSFDFDPSAPPPFKIAEIRASIPKHCWVKNPWRSLSYVLRDVLVIAALVAAAIHFDNWLLWLIYCPIQGTMFWALFVLGHDCGHGSFSDSPLLNSLVGHILHSSILVPYHGWRISHRTHHQNHGHIEKDESWVPLTEKIYKNLDSMTRLIRFTVPFPLFVYPIYLFSRSPGKEGSHFNPYSNLFPPSERKGIAISTLCWATMFSLLIYLSFITSPLLVLKLYGIPYWIFVMWLDFVTYLHHHGHHQKLPWYRGKEWSYLRGGLTTVDRDYGWINNIHHDIGTHVIHHLFPQIPHYHLVEATQAAKPVLGDYYREPERSAPLPFHLIKYLIQSMRQDHFVSDTGDVVYYQTDSLLLHSQRD

SEQ ID NO: 4860 - protein, 380 aa, Glycine max
MVKDTKPLAYAANNGYQQKGSSFDFDPSAPPPFKIAEIRASIPKHCWVKNPWRSLSYVLRDVLVIAALVAAAIHFDNWLLWLIYCPIQGTMFWALFVLGHDCGHGSFSDSPLLNSLVGHILHSSILVPYHGWRISHRTHHQNHGHIEKDESWVPLTEKIYKNLDSMTRLIRFTVPFPLFVYPIYLFSRSPGKEGSHFNPYSNLFPPSERKGIAISTLCWATMFSLLIYLSFITSPLLVLKLYGIPYWIFVMWLDFVTYLHHHGHHQKLPWYRGKEWSYLRGGLTTVDRDYGWIYNIHHDIGTHVIHHLFPQIPHYHLVEATQAAKPVLGDYYREPERSAPLPFHLIKYLIQSMRQDHFVSDTGDVVYYQTDSLLLHSQRD

SEQ ID NO: 4861 - protein, 236 aa, Glycine max
  unsure (1)..(236): unsure at all Xaa locations
XHEGNPCSCLEKLFRSLDTVTRMLRFTAPFPLLAFPVYLFSRSPGKTGSHFDPSSDLFVPNERKDVITSTACWAAMLGLLVGLGFVMGPIQLLKLYGVPYVIFVMWLDLVTYLHHHGHEDKLPWYRGKEWSYLRGGLTTLDRDYGWINNIAHDIGTHVIHHLFPPIPHYHLVEATEAGKPVFGKYYREPKKSAAPFPFHLIGEIIRSFKTDPFVSDTGDVVFYQTDFKINGSSQLE

SEQ ID NO: 4862 - protein, 161 aa, Glycine max
  unsure (1)..(161): unsure at all Xaa locations
XLSFITSPVLLLKLYGIPYWIFVMWLDFVTYLHHHGHHQKLPWYRGKVTKINRKXEWSYLRGGLTTVDRDYGWINNIHHDIGTHVIHHLFPQIPHYHLVEATQAAKSVLGEYYREPERSAPLPFHLIKYLIQSMRQDHFVSDTGDVVYYQTDSLHLHSHRD

SEQ ID NO: 4863 - protein, 136 aa, Glycine max
  unsure (1)..(136): unsure at all Xaa locations
XKIFVMWLDLVTYLHHHGHEDKLPWYRGKEWSYLRGGLTTLDRDYGWINNIHHDIGTHVIHHLFPQIPHYHLVEATEAAKPVFGKYYREPKKSSPLPFHLIGELIKSFKTDHFVSDKGDVVYYQTDSEINGSSKSE

SEQ ID NO: 4864 - protein, 158 aa, Glycine max
  unsure (1)..(158): unsure at all Xaa locations
MVKDTKPLAYAANNGYQQKGSSFDFDPSAPPPFKIAEIRASIPKHCWVKNPWRSLSYVLRDVLVIAALVAAAIHFDNWLLWLIYCPIQGTMFWALFVLGHDCGHGSFSDSPLLNSLVGHILHSSILVPYHGWRISHRTHHQNHGHIEKDESWVPLTEX

SEQ ID NO: 4865 - protein, 361 aa, Rhizobium leguminosarum bv. viciae
MVLAQRDYSLVGRGSRAAVASGLAAAEWYHTDVPRKEMKALMQRSDAPAIRDTALWLGSMAVFAGLGIYFWGSWIALPFFLAYGVLYGSASDSRWHECGHGTAFKTRWMNAIVYQIACFMIMRNPVTWRWSHARHHTDTVIVGRDPEIAVMRPPDLLRLILDFFGILDVWHAVVDTLRNSAGNVSEEEKTFIPETEQRKVVRVARIWLASYAGTIALSMWLGSVLPLLLIGLPRLYGAWHAAMTGLLQHGGLADNVTDYRLNSRTVYMNPISRFIYWNMNYHVEHHMFPMVPYHALPKLHALIKHDLPAPNTSIIDGYREMIPAFIRQLRYEDYYVKRELPPTAKPYHEELHGAQRVSAAE

SEQ ID NO: 4866 - protein, 481 aa, Neurospora crassa
MASVSSALPEGNKPALRRTQTEATSDSYPGTADASPFDSPLERSASNTSLSSQASDNVKTDKAEFGKLLDTYGNEFEVPDFTIKDIRDAIPAHCFERSALHSLAHVVRDIIYLTVTFYVWNKYVTPEYIPMKAARVVLWGLYTFMQGLFGTGLWVLAHECGHQAFSPSRLINDTVGWVLHSALLVPYFSWKFSHSKHHKATGNIERDMVFVPRTREQFASRIGRFVHEISELTEETPIYTLIHLIGQQLIGWPNYLMTNVTGHNFHERQREGRGKGKKNGWFTGVNHFNPSSPLYEEREAPWIIVSDIGIAIAATALIYLGNTFGWSNMFVWYFLPYLWVNHWLVAITYLQHTDPSLPHYTPDQWNFVRGAAATIDREFGFIGRHLLHGIIETHVLHHYVSTIPFYHADEASEAIKKVMGRHYRADVQDGPIGFIKAMWKAARWCQWVEPTEGAEGKGKGVLFYRNQNGLGVKPAKLPKTN

SEQ ID NO: 4867 - protein, 429 aa, Neurospora crassa
MTVTTRSHKAAAATEPEVVSTGVDAVSAAAPSSSSSSSSQKSAEPIEYPDIKTIRDAIPDHCFRPRVWISMAYFIRDFAMAFGLGYLAWQYIPLIASTPLRYGAWALYGYLQGLVCTGIWILAHECGHGAFSRHTWFNNVMGWIGHSFLLVPYFSWKFSHHRHHRFTGHMEKDMAFVPATEADRNQRKLANLYMDKETAEMFEDVPIVQLVKLIAHQLAGWQMYLLFNVSAGKGSKQWETGKGGMGWLRVSHFEPSSAVFRNSEAIYIALSDLGLMIMGYILYQAAQVVGWQMVGLLYFQQYFWVHHWLVAITYLHHTHEEVHHFDADSWTFVKGALATVDRDFGFIGKHLFHNIIDHHVVHHLFPRIPFYYAEEATNSIRPMLGPLYHRDDRSFMGQLWYNFTHCKWVVPDPQVPGALIWAHTVQSTQ

SEQ ID NO: 4868 - protein, 421 aa, Chlamydomonas sp. W80
MAMAMPKLGGLRMRPAAPSAAGVPVLGARRCAVKVRTAAPAMTVSDPTKAGFMSDEDRAALAKELGYRQLGKELPDHVTLNTIVQSMPKEVFEIDHGKAWRAVLTSITAMAGCLYLISVSPWYLLPFAWALAGTAFTGFFVVGHDAGHRSFHKNNLIEDIVGTIMFAPLIYPFEPWRIKHNHHHAHTNKLEEDTAWVPIEQEKMKDWNGVTSALFKFFLGTPLKLWASVGHWAIWHFDLNKYTEKQRPRVIVSLLACAAFACTVLPWLVINHGVWGLVKYWLMPWLGYHFWMSTFTVIHHTAPHIPFKPAAEWNAAKAQLSGTVHCDFPAWVEFLTHDISVHVPHHVSSKIPWYNLRKAHASLKENWGEHMCETTFNWRMLKNIFTELHVYDEKTFGYKPFDWKKEEPLFAAQRAAYPNSM

SEQ ID NO: 4869 - protein, 395 aa, Punica granatum
MGADGTMSPVLTKRRPDQEINKLDIKPNHEVDIARRAPHSKPPFTLSDLRSAIPPHCFHRSLLMSSSYLIRDFALAFLFYHSAVTYIPLLPKPLACMAWPVYWFLQGSNMLGIWVIAHECGHQAFSNYGWVNDAVGFFLHTSLLVPYFPFKYSHRRHHSNTNSVEHDEVFVPRHKDGVQWYYRFFNNTPGRVLTLTLTLLVGWPSYLAFNASGRPYDGFASHYNPNAQIFNLRERFWVHVSNIGILAIYYILYRLATTKGLPWLLSIYGVPVLILNAFVVLITFLQHSHPALPHYNSDEWDWLRGALATVDRDYGFLNEVFHDITDTHVIHHLFPTMPHYNAKEATVSIRPILKDYYKFDRTPIWRALWREAKECLYVEADGTGSKGVLWFKSKF

SEQ ID NO: 4870 - protein, 374 aa, Punica granatum
MGADGTMSPVLTKRRPDQEINKLDIKPNHEVDIARRAPHSKPPFTLSDLRSAIPPHCFHRSLLMSSSYLIRDFALAFLFYHSAVTYIPLLPKPLACMAWPVYWFLQGSNMLGIWVIAHECGHQAFSNYGWVNDAVGFFLHTSLLVPYFPFKYSHRRHHSNTNSVEHDEVFVPRHKDGVQWYYRFFNNTPGRVLTLTLTLLVGWPSYLAFNASGRPYDGFASHYNPNAQIFNLRERFWVHVSNIGILAIYYILYRLATTKGLPWLLSIYGVPVLILNAFVVLITFLQHSHPALPHYNSDEWDWLRGALATVDRDYGFLNEVFHDITDTHVIHHLFPTMPHYNAKEATVSIRSILKDYYKFDRTPIWRALWREAKE

SEQ ID NO: 4871 - protein, 387 aa, Punica granatum
MGAGGRMTVPNKWEGEGDEKSQKPVQRVPSAKPPFTLSEIKKAIPPHCFKRSLLKSFSYVLYDLTLVAIFYYVATTYIDALPGPLRYAAWPVYWALQGCVLTGVWVIAHECGHHAFSDYQWVDDCVGLVLHSALLVPYFSWKYSHRRHHSNTGSLERDEVFVPKPKSKMPWFSKYLNNPPGRVMTLIVTLTLGWPLYLALNVSGRPYDRFACHFDPYGPIYTDRERLQIYISDVGIMAATYTLYKIAAARGLAWLVCVYGVPLLIVNAFLVTITYLQHTHPALPHYDSSEWDWLRGALATADRDYGILNKVFHNITDTHVAHHLFSTMPHYHAMEATKAIKPILGDYYQFDGTPVYKAMWREARECLYVEPDDGANSKGVFWYKKNL

SEQ ID NO: 4872 - protein, 387 aa, Punica granatum
  unsure (1)..(387): unsure at all Xaa locations
MGAGGRMTVPNKWEGEGDEKSQKPVQRVPSAKPPFTLSEIKKAIPPHCFKRSLLKSFSYVLYDLTLVAIFYYVATTYIDALPGPLRYAAWPVYWALQGCVLTGVWVIAHECGHHAFSDYQWVDDCVGLVLHSALLVPYFSWKYSHRRHHSNTGSXERDEVFVPKPKSKMPWFSKYLNNPPGRVMTLIVTLTLGWPLYLALNVSGWPYDRFACHFDPYGPIYTDRERLQIYISDVGIMAATYTLYKIAAARGLAWLVCVYGVPLLIVNAFLVTITYLQHTHPALPHYDSSEWDWLRGALATADRDYGILNKVFHNITDTHVAHHLFSTMPHYHAMEATKAIKPILGDYYQFDGTPVYKAMWREARECLYVEPDDGANSKGVFWYKKNL

SEQ ID NO: 4873 - protein, 396 aa, Mucor circinelloides
MATKRNVTSNAPAAEDISISNKAVIDEAIERNWEIPNFTIKEIRDAIPAHCFRRDTFRSFTHVLHDIIIMSILAIGASYIDSIPNTYARIALWPLYWIAQGIVGTGVWVIGHECGHQAFSPSKTINNSVGYVLHTALLVPYHSWRFSHSKHHKATGHMSKDQVFVPSTRKEYGLPPREQDPEVDGPHDALDEAPIVVLYRMFLQFTFGWPLYLFTNVSGQDYPGWASHFNPKCAIYDENQFWDVMSSTAGVLGMIGFLAYCGQVFGSLAVIKYYVIPYLNVNFWLVLITYLQHTDPKLPHYRENVWNFQRGAALTVDRSYGFLLDYFHHHISDTHVAHHFFSTMPHYHAEEATVHIKKALGKHYHCDNTPVPIALWKVWKSCRFVEDEGDVVFFKN

SEQ ID NO: 4874 - protein, 384 aa, Gossypium hirsutum
MGAGGRMSVPPSQRKQESGSMKRVPISKPPFTLSEIKKAIPPHCFQRSLIRSFSYLVYDFILVSIFYYVATTYFHNLPQPLSFVAWPIYWTLQGSVLTGVWVIAHECGHHAFSDYQWIDDTVGLILHSSLLVPYFSWKYSHRRHHSNTGSLERDEVFVPKKRSSIRWWAKYLNNPPGRFVTVTIQLTLGWPLYLAFNVAGRPYEGLACHYNPYGPIYNDRERLQIYISDVGVLAVTYGLYRLVLAKGLAWVICVYGVPLLIVNAFLVMITYLQHTHPALPHYDSSEWDWLRGALATVDRDYGILNKVFHNITDTHVAHHLFSTMPHYHAMEATKAIKPILGEYYSFDGTPVYKAIFREAKECIYVEPDEGEQSSKGVFWFRNKI

SEQ ID NO: 4875 - protein, 385 aa, Gossypium hirsutum
MGAGGRMPIDGIKEENRGSVNRVPIEKPPFTLGQIKQAIPPHCFRRSLLRSFSYVVHDLCLASFFYYIATSYFHFLPQPFSYIAWPVYWVLQGCILTGVWVIAHEWGHHAFRDYQWVDDTVGLILHSALLVPYFSWKISHRRHHSNTGSMERDEVFVPKPKSKLSCFAKYLNNPPGRVLSLVVTLTLGWPMYLAFNVSGRYYDRLASHYNPYGPIYSDRERLQVYISDTGIFAVIYVLYKIAATKGLAWLLCTYGVPLLIVNAFLVLITYLQHTHSALPHYDSSEWDWLRGALSTMDRDFGVLNKVFHNITDTHVAHHLFSTMPHYHAMEATKAIKPILGKYYPFDGTPIYKAMWREAKECLYVEPDVGGGGGGSKGVFWYRNKF

SEQ ID NO: 4876 - protein, 383 aa, Gossypium hirsutum
MGAGGRMSVPTSPKKPEFNSLKRVPYSKPPFTLSEIKKAIPPHCFQRSVLRSFSYLLYDFILASLFYHVATNYFPNLPQALSNVAWPLYWAMQGCILTGVWVIAHECGHHAFSDYQWLDDTVGLILHSSLLVPYFSWKYSHRRHHSNTGSLERDEVFVPKKKSGLRWWAKHFNNPPGRFLSITIQLTLGWPLYLAFNVAGRPYDRFACHYDPYGPIFSDRERLQIYISDAGVLAVAYALYRLVLAKGVGWVISVYGVPLLVVNAFLVMITYLQHTHPSLPHYDSSEWDWMRGALSTVDRDYGILNKVFHNITDTHVAHHLFSTMPHYHAMVATKAIKPILGEYYQFDGMPVYKAIWREAKECLYVEPDEGDKDKGVFWFRNKL

SEQ ID NO: 4877 - protein, 182 aa, Gossypium hirsutum
YEGLACHYNPYGPIYNDRERLQIYISDVGVLAVTYGLYRLVLAKGLAWVICVYGVPLLIVNAFLVMITYLQHTHPALPHYDSSEWDWLRGALATVDRDYGILNKVFHNITDTHVAHHLFSTMPHYHAMEATKAIKPILGEYYSFDGTPVYKAIFREAKECIYVEPDEGEQSSKGVFWFRNKI

SEQ ID NO: 4878 - protein, 377 aa, Calendula officinalis
MGAGGRMSDPSEGKNILERVPVDPPFTLSDLKKAIPTHCFERSVIRSSYYVVHDLIVAYVFYYLANTYIPLIPTPLAYLAWPVYWFCQASILTGLWVIGHECGHHAFSDYQLIDDIVGFVLHSALLTPYFSWKYSHRNHHANTNSLDNDEVYIPKRKSKVKIYSKLLNNPPGRVFTLVFRLTLGFPLYLLTNISGKKYGRFANHFDPMSPIFNDRERVQVLLSDFGLLAVFYAIKLLVAAKGAAWVINMYAIPVLGVSVFFVLITYLHHTHLSLPHYDSTEWNWIKGALSTIDRDFGFLNRVFHDVTHTHVLHHLISYIPHYHAKEARDAIKPVLGEYYKIDRTPIFKAMYREAKECIYIEPDEDSEHKGVFWYHKM

SEQ ID NO: 4879 - protein, 383 aa, Calendula officinalis
MGAGGRMQDPTNGGNKTEPEPIQRVPHEKPPFTVGDIKKAIPPHCFNRSVIRSFSYVFYDLTIASILYYIANNYISTLPSPLAYVAWPVYWAVQGCVLTGVWVIAHECGHHAFSDHQWLDDTVGLVLHSFLLVPYFSWKYSHRRHHSNTGSIEHDEVFVPKLKSGVRSTARYLNNPPGRILTLLVTLTLGWPLYLTFNVSGRYYDRFACHFDPNSPIYSKRERAQIFISDAGILAVVFVLFRLAMTKGLTWVLTMYGGPLLVVNGFLVLITFLQHTHPSLPHYDSTEWDWLRGALTTIDRDYGILNKVFHNITDTHVAHHLFSTMPHYHAMEATKVIKPILGDYYQFDGTSIFKAMYRETKECIYVDKDEEVKDGVYWYRNKI

SEQ ID NO: 4880 - protein, 374 aa, Calendula officinalis
MGKGASNKKVLERVPITKPPFEYNDLKKAVPPHCFSRPLFRSFYFLLHDIIVTCILFYVASNYIPMLPGFLSYIVWPVYWISQGVFLGRLWMIGHECGHHSFSNYRWVDDSVGFLIHTATLTPYFSFKYSHRNHHAHTNSMEYDEVHIPKRKSEALDLYFEFLGNNPMGLMITMLCKLTFGYAAYIMFNYTGKKHKSGGLASHFYPQSPLFNDSERNHVLFSDVGICIVLYACYRIVMVTGAMSAFYVYGIPWVIMSAILFAATYLQHTHPSIPHYDTTEWNWLRGALSTIDRDLGFFNMNKTHYHVIHHLFPVIPEYHAQEATEAIKPILGQYYKYDGTPFLKALWREMKDCIYVESDQGQKKQGIYWFKNKI

SEQ ID NO: 4881 - protein, 372 aa, Calendula officinalis
MGKAASAKKVLERVPISKPPFEYNDLKKAVPPHCFSRPLSRSLYFLFHDIIVTCILFYVASNYIHMLPRFLSCIVWPVYWISQGVFLGRLWMIGHECGHHSFSNYRWVDDTVGFLIHTATLTPYFSFKYSHRNHHAHTNSMEYDEVHIPKRKSEALYFEFLGNNPIGLMITMLCKLTFGYAAYIMFNYTGKKHKSGGLASHFYPQSPLFNDSERNHVLFSDIGICIVLYACYRIVTVTGAMPAFYVYGIPWVIMSAILFAATYLQHTHPSIPHYDTTEWNWLRGALSTIDRDLGFFNMNKTHYHVIHHLFPVIPEYHAQEATEAIKPILGQYYKYDGTPFLKALWREMKECIYVESDEGQKKQGIYWFKNKT

SEQ ID NO: 4882 - protein, 382 aa, Helianthus annuus
MGAGGRMSSPNGKEKDGPKPLERALHEKPPFTVGDIKKVIPPHCFKRSVIRSFSYVVYDLTIASIFYYLANNYIPLLPNSLAYVAWPVYWIFQGCVLTGVWVIAHECGHHAFSDYQWLDDTVGLILHSALLVPYFSWKYSHRRHHSNTGSIEHDEVFVPKLKSSVRSTAKYLNNPPGRILTLLVTLTMGWPLYLMFNVSGRYYDRFACHFDPNSPIYSNRERAQIFISDAGILTVFYILFRLASTKGLVWVLTMYGGPLLVVNGFLVLITFLQHTHPSLPHYDSTEWDWLRGALATVDRDYGILNKVFHNITDTHVTHHLFSTMPHYHAMEATKAIKPILGDYYQFDGTSIFKAMYRETKECIYVDKDEDVKDGVYWYRNKI

SEQ ID NO: 4883 - protein, 383 aa, Helianthus annuus
MGAGGRMSNPVNGEKKPNPDPLQRVPYQKPPFTVGDVKKAIPPHCFNRSVIRSFSYVVYDLTIASIFYYLANNYIALLPSPLAYVAWPVYWICQGCVLTGVWVIAHECGHHAFSDYQWLDDTVGLVLHSALLVPYFSWKYSHRRHHSNTGSIEHDEVFVPKLKSGVRSTARLLNNPPGRILTLLVTLTMGWPLYLMFNVSGRYYDRFACHFDPNSPIYSNRERAQIFISDAGILTVLFVLFRVAMTKGLTWVLTMYAGPLLVVNGFLVLITFLQHTHPSLPHYDSTEWDWLRGALATIDRDYGVLNKVFHNITDTHVAHHLFSTMPHYHAMEATKVIKPILGEYYQFDGTSIFKAMYRETKECIYVDKDEEVKDGVYWYRNKI

SEQ ID NO: 4884 - protein, 378 aa, Helianthus annuus
MGAGEYTSVTNENNPLDRVPHAKPPFTIGDLKKAIPPHCFQRSLTRSFSYVLSDLTITAVLYHIATTYFHHLPTPLSSIAWASYWVVQGCVLTGVWVIAHECGHHAFSDYQWVDDTVGFVLHSSLLVPYFSWKYSHHRHHSNTGSLERDEVFVPKSRSKVPWYSKYFNNTVGRIVSMFVTLTLGWPLYLAFNVSGRPYDRFACHYVPTSPMYNERKRYQIVMSDIGIVITSFILYRVAMAKGLVWVICVYGVPLMVVNAFLVLITYLQHTHPGLPHYDSSEWEWLKGALATVDRDYGVLNKVFHHITDTHVVHHLFSTMPHYNAMEAQKALRPVLGEYYRFDKTPFYVAMWREMKECLFVEQDDEGKGGVFWYKNKMN

SEQ ID NO: 4885 - protein, 786 aa, Dictyostelium discoideum
MGKGSGAPLKEKVYPSVMYGNIKPIRKQPKSLPKELTIDQILQSLPKEVFETSNFKSACSLLITILFIGLSATFITLMPSYLTPIGWMLMGASVTGLMVIGNDCIHKTFSKNPLVNSIIGTIVMLPLLYPFQSYKISEKNNAEKKSTAVLNGEQFKINAHTTTESTNPIRQWATGKFFWILSIINWSENYFSTKNLSDKKDKTKAIVSIAIVYIFGFIFFPMMFKFVGVSGFLNYWFAPWLVLHFLLSTASLLPSIPFYEELQVASKLEKSNNNNNNNKGDKKSSEVEKYLVHITYPQWFEFIVKDINFSLPRQIAVSIPHYNLRKAYNSFKKSWGEYIYECTFETELFKELIIRSENFSNEIFSPFDSAPLVPDQEKKAEATAEAVSNSRTSRTVKEFLKSINWLHVIILIGIPFIGLYGLINVECSLKTFIWSFIYYHFTGMGITAGYHRLWAHKAYSAVLPVRIILLLFGAGAVEGSCRWWSRDHRAHHRYLDTDKDPYSASLGFWHSHFIWLMFKQDPKKIGRANIDDLNADPWVMWQHKHYIKIATFMGLVFPTLVAGLGWGDWAGGYFYSGVLRLVTVQHSTFLVNSLAHYLGDSPYDDEHTPKDSVVTAILTFGEGYHNFHHEFPNDYRNAYKFYQYDPTKWLISAMYYLGLAYDLKTFSKNEIEKGMIQMHQKHLDAKKQSIYWGINKEDLPSMTIDEFNNLVEKENKKLMIINKTVLDVESFVNDHPGGLAYIKMGIGKDATSMFTGEVYAHSNAAKNLLCQFSIAKIVDNHDKKQQ

SEQ ID NO: 4886 - protein, 383 aa, Impatiens balsamina
MGEVGPTNRTKTKLDKQQESENRVPHEPPPFTLSDLKKAIPPHCFERSLVKSFYHVIHDIIILSFFYYVAANYIPMLPQNLRYVAWPIYWAIQGCVQLGILVLGHECGHHAFSDYQWVDDMVGFVLHSSQLIPYFSWKHSHRRHHSNTASIERDEVYPPAYKNDLPWFAKYLRNPVGRFLMIFGALLFGWPSYLLFNANGRLYDRFASHYDPQSPIFNNRERLQVIASDVGLVFAYFVLYKIALAKGFVWLICVYGVPYVILNGLIVLITFLQHTHPNLPRYDLSEWDWLRGALSTVDRDYGMLNKVFHNVTDTHLVHHLFTTMPHYRAKEATEVIKPILGDYYKFDDTPFLKALWKDMGKCIYVESDVPGKNKGVYWYNNDI

SEQ ID NO: 4887 - protein, 374 aa, Crepis palaestina
MGAGGRGRTSEKSVMERVSVDPVTFSLSELKQAIPPHCFQRSVIRSSYYVVQDLIIAYIFYFLANTYIPTLPTSLAYLAWPVYWFCQASVLTGLWILGHECGHHAFSNYTWFDDTVGFILHSFLLTPYFSWKFSHRNHHSNTSSIDNDEVYIPKSKSKLARIYKLLNNPPGRLLVLIIMFTLGFPLYLLTNISGKKYDRFANHFDPMSPIFKERERFQVFLSDLGLLAVFYGIKVAVANKGAAWVACMYGVPVLGVFTFFDVITFLHHTHQSSPHYDSTEWNWIRGALSAIDRDFGFLNSVFHDVTHTHVMHHLFSYIPHYHAKEARDAIKPILGDFYMIDRTPILKAMWREGRECMYIEPDSKLKGVYWYHKL

SEQ ID NO: 4888 - protein, 379 aa, Crepis palaestina
MGAGGRMQDPSNDKTTTERVPYQKPPFTVGELKKAIPPHCFNRSVIRSFSYVVYDLTIASIFYYIATNYIHTLPQPLTYFAWPIYWALQGCVLTGVWVIAHECGHHAFSDHQWLDDTVGLILHSFLLVPYFSWKYSHRRHHSNTGSIEHDEVFVPKLKSDLRSTAKYLNNPPGRILTLLVTLTLGWPLYLMFNVSGRYYDRFACHFDPNSPIYSNRERAQIFISDAGIFAVLYGLFRLATIKGLGWVLAMYGGPLLVVNGFLVLITFLQHTHASLPHYDSTEWDWLRGALATIDRDYGILNKVFHNITDTHVTHHLFSTMPHYHAMEATKAIKPILGDYYQFDGTSVFKAMYRETKECIYVDKDAEVKDGVYWYRNKIE

SEQ ID NO: 4889 - protein, 347 aa, Synechococcus sp.
MTSVTVRPSATTLLEKHPNLRLRDILDTLPRSVYEINPLKAWSRVLLSVAAVVGCYALLAIAPWYLLLPVWFLTGTTLTGFFVIGHDCGHRSFSRKNWVNNLVGHLAFLPLIYPFHSWRILHNHHHRYTNNMDEDNAWAPFTPELYDDSPAFIKAVYRAIRGKLWWLASVIHQLKLHFNWFAFEGKQREQVRFSALFVIIAGAIAFPVMFYTLGVWGVVKFWLMPWLGYHFWMSTFTLVHHTVPEIPFSYRDKWNEAIAQLSGTVHCDYPKWVEVLCHDINVHVPHHLSTGIPSYNLRKAYASIKQNWGEYLYETKFSWELMKAITEQCHLYDAEHNYISFAQHQKR

SEQ ID NO: 4890 - protein, 351 aa, Spirulina platensis
MTLSIVKSEDSSSRPSAVPSDLPLEEDIINTLPSGVFVQDRYKAWMTVIINVVMVGLGWLGIAIAPWFLLPVVWVFTGTALTGFFVIGHDCGHRSFSRNVWVNDWVGHILFLPIIYPFHSWRIGHNQHHKYTNRMELDNAWQPWRKEEYQNAGKFMQVTYDLFRGRAWWIGSILHWASIHFDWTKFEGKQRQQVKFSSLLVIGAAAIAFPTMILTIGVWGFVKFWVIPWLVFHFWMSTFTLLHHTIADIPFREPEQWHEAESQLSGTVHCNYSRWGEFLCHDINVHIPHHVTTAIPWYNLRTPTPVYRKIGGEYLYPECDFSWGLMKQVVDHAICMMRITIISQSLTTKRV

SEQ ID NO: 4891 - protein, 349 aa, Oceanobacillus iheyensis HTE831
MSKQKQAQLRKSVSAFAKSDKRTSIIQLINSILPFFLLWFLAYQSLSISIWLSLGVSVIAAGFVVRIFIIFHDCTHMSFFKNAKANRIVGTITGIITHFAFEKWKRDHAIHHATSSNLDKRGTGDVWVMTVDEYTEASFWGRLSYRLYRNPIIMFGLGPAYLFLISNRFNRKGAKRKERWNTYLINFSIVAIYGLLIWAIGWQAFLIVQLPILFIAGAAGIWLFYVQHQFEDSYFENEDEWDYVKAAVDGSSYYKLPKAIEWITGSIGYHHVHHLSPRVPNYHLEKAHESTPPLHKATTITLLTSLQSLRFRLYDENSKSFVSFKQFKQMENKKKLMHQSKPSRTSLQK

SEQ ID NO: 4892 - protein, 424 aa, Chlamydomonas reinhardtii
MAFALRSPGAVRAPACAQRASGVRAAKPGFLRSAAVARPQVQTNAAALSVPVNQLTDEERANLARELGYKSIGRELPDNVSLTDIIKSMPAEVFKLDHGKAWRACLTTIAACSACWYLISISPWYLLPAAWALAGTAFTGCFVIGHDCGHRSFHENNLIEDIVGHIFFAPLIYPFEPWRIKHNHHHAHTNKLVEDTAWHPVTEADMAKWDSTSAMLYKVFLGTPLKLWASVGHWLVWHFDLNKYTPKQRTRVVISLAVVYGFMATAFPALLYFGGPWAFVKYWLMPWLGYHFWMSTFTVVHHTAPHIPFKKAEEWNAAKAQLSGTVHCDFPNWVEFLTHDISWHVPHHVAPKIPWYNLRKATESLRENWGQYMTECTFNWRVVKNICTECHVYDEKVNYKPFDYKKEEALFAVQRRVLPDSAAF

SEQ ID NO: 4893 - protein, 376 aa, Chlorella vulgaris
MAATRRAPSAEGWTRQPVNTKPAFSVSTLRKAIPAHCWQRSLPRSCAYLAADLLALAALVWASTFIDAAPVPAAVRWLALWPAYWYLAGAVATGIWVIAHECGHQAFSDYQAVNDGVGLVLHSLLLVPYYSWKHSHRRHHSNTGNVVKDEVFVPPTREEVSDKWELEQAWPIRLVKLFITLTLGWPLYLAFNVASRPYEKSWVNHFDPWSPIFSKRELVEVAVSDAALVAVLCGLRQLAASFGWAWLVKTWLVPYLVVNFWLVTITMLQHSHPELPHYGEDEWDWLRGALTTVDRDYGWLLNSLHHHIADTHVAHHLFSQMPHYHAQEATEALKPVLGDYYRSDSRPLLQAIWQDFGSCRYVAPDTPGDGVLWFRK

SEQ ID NO: 4894 - protein, 387 aa, Trichosanthes kirilowii
MGGGEGIEVRSGSSSTKLAFGERITHAKPPFSISQIKKAIPPHCFQRSLYRSFSYVIFDFIFASTFYHIAATNFHRLPHPLHYLAWPLYWFCQGSVFTGLWVIAHECGHRAFSDYQLVDDVVGFLLHTSFLIPYFSFKISHRRHHSNTASLERDEVFVPKPKAKMPWYFKHLTNPPARVLIIFITLTLGWPMYLAFNISGRFYERFTSHFDPNSPIFSENEWLQVHISNAGIVAVWYLLYKLAAAKGIAWVIRMYVVPVTIMNAFVVLITSLQHTHPSFPYYDSTEWNWLRGNLVTLDRDYGILNKVFHNITDTHVVHHLFPSMPHYNAMEATRAVKQVLGEYYHFDGTPIFKAAWREFRECIYVEPDNDEGASSSSKGVFWFRNKL

SEQ ID NO: 4895 - protein, 369 aa, Trichosanthes kirilowii
MEKGVQERVPHAKPPFTLSQIKKVVPPHCFHRSLLRSFSYLLSDLAFVSLFFYLAIAYFPLLPHPFPYIAWPLYWIFQGCSLTGVWVIAHECGHHAFSDYQLIDDIVGLFFHSALLVPYFSWKYSHRRHHSNTGSLERDEVFVPKPKSQIPWYLKYFNNPPGRLISLIGTLTLGWPLYLAFNMSGRPYDRFACHYDPYSPIFTKREWIQVYISDAGILGMAFMLYRIGVEKGSFWVMRIYGIPLVIVNGFLVLITYLQHTHPALPHYESSEWDWLRGALATVDRDYGVLNRVFHNITDTHVVHHLFSTMPHYHAKEATEAVKPVLGEYYRLDRTPVLKAIWREAKECVYVEPDEDADSDKGVVWYRKKL

SEQ ID NO: 4896 - protein, 383 aa, Arabidopsis thaliana
MGAGGRMPVPTSSKKSETDTTKRVPCEKPPFSVGDLKKAIPPHCFKRSIPRSFSYLISDIIIASCFYYVATNYFSLLPQPLSYLAWPLYWACQGCVLTGIWVIAHECGHHAFSDYQWLDDTVGLIFHSFLLVPYFSWKYSHRRHHSNTGSLERDEVFVPKQKSAIKWYGKYLNNPLGRIMMLTVQFVLGWPLYLAFNVSGRPYDGFACHFFPNAPIYNDRERLQIYLSDAGILAVCFGLYRYAAAQGMASMICLYGVPLLIVNAFLVLITYLQHTHPSLPHYDSSEWDWLRGALATVDRDYGILNKVFHNITDTHVAHHLFSTMPHYNAMEATKAIKPILGDYYQFDGTPWYVAMYREAKECIYVEPDREGDKKGVYWYNNKL

SEQ ID NO: 4897 - protein, 383 aa, Arabidopsis thaliana
  unsure (1)..(383): unsure at all Xaa locations
MGAGGRMPVPTSSKKSETDTTKRVPCEKPPFSVGDLKKAIPPHCFKRSIPRSFSYLISDIIIASCFYYVATNYFSLLPQPLSYLAWPLYWACQGCVLTGIWVIAHECGHHAFSDYQWLDDTVGLIFHSFLLVPYFSWKYSHRRHHSNTGSLERDEVFVPKQKSAIKWYGKYLNNPLGRIMMLTVQFVLGWPLYLAFNVSGRPYDGFACHFFPNAPIYNDRERLQIYLSDAGILAVCFGLYRYAAAQGMASMICLYGVPLLIVNAFLVLITYLQHTHPSLPHYDSSEWDWLRGALATVDRDYXILNKVFHNITDTHVAHHLFSTMPHYNAMEATKAIKPILGDYYQFDGTPWYVAMYREAKECIYVEPDREGDKKGVYWYNNKL

SEQ ID NO: 4898 - protein, 384 aa, Brassica juncea
MGAGGRMQVSPSPKKSETDTLKRVPCETPPFTVGELKKAIPPHCFKRSIPRSFSYLIWDIIVASCFYYVATTYFPLLPHPLSYVAWPLYWACQGVVLTGVWVIAHECGHHAFSDYQWLDDTVGLIFHSFLLVPYFSWKYSHRRHHSNTGSLERDEVFVPKKKSDIKWYGKYLNNPLGRTVMLTVQFTLGWPLYWAFNVSGRPYPEGFACHFHPNAPIYNDRERLQIYVSDAGILAVCYGLYRYAAAQGVASMVCLYGVPLLIVNAFLVLITYLQHTHPSLPHYDSSEWDWLRGALATVDRDYGILNKVFHNITDTHVAHHLFSTMPHYHAMEVTKAIKPILGDYYQFDGTPWVKAMWREAKECIYVEPDRQGEKKGVFWYNNKL

SEQ ID NO: 4899 - protein, 377 aa, Brassica napus
MVVAMDQRSNANGDERFDPSAQPPFKIGDIRAAIPKHCWVKSPLRSMSYVARDIFAVVALAVAAVYFDSWFFWPLYWAAQGTLFWAIFVLGHDCGHGSFSDIPLLNTAVGHILHSFILVPYHGWRISHRTHHQNHGHVENDESWVPLPEKLYKNLSHSTRMLRYTVPLPMLAYPLYLWYRSPGKEGSHYNPYSSLFAPSERKLIATSTTCWSIMLATLVYLSFLVGPVTVLKVYGVPYIIFVMWLDAVTYLHHHGHDDKLPWYRGKEWSYLRGGLTTIDRDYGIFNNIHHDIGTHVIHHLFPQIPHYHLVDATKSAKHVLGRYYREPKTSGAIPIHLVESLVASIKKDHYVSDTGDIVFYETDPDLYVYASDKSKIN

SEQ ID NO: 4900 - protein, 383 aa, Brassica napus
MVVAMDQRSNVNGDSGARKEEGFDPSAQPPFKIGDIRAAIPKHCWVKSPLRSMSYVTRDIFAVAALAMAAVYFDSWFLWPLYWVAQGTLFWAIFVLGHDCGHGSFSDIPLLNSVVGHILHSFILVPYHGWRISHRTHHQNHGHVENDESWVPLPEKLYKNLPHSTRMLRYTVPLPMLAYPIYLWYRSPGKEGSHFNPYSSLFAPSERKLIATSTTCWSIMLATLVYLSFLVDPVTVLKVYGVPYIIFVMWLDAVTYLHHHGHDEKLPWYRGKEWSYLRGGLTTIDRDYGIFNNIHHDIGTHVIHHLFPQIPHYHLVDATRAAKHVLGRYYREPKTSGAIPIHLVESLVASIKKDHYVSDTGDIVFYETDPDLYVYASDKSKIN

SEQ ID NO: 4901 - protein, 384 aa, Brassica napus
MGAGGRMQVSPPSKKSETDTIKRVPCETPPFTVGELKKAIPPHCFKRSIPRSFSYLIWDIIIASCFYYVATTYFPLLPHPLSYFAWPLYWACQGCVLTGVWVIAHECGHHAFSDYQWLDDTVGLIFHSFLLVPYFSWKYSHRRHHSNTGSLERDEVFVPKKKSDIKWYGKYLNNPLGRTVMLTVQFTLGWPLYLAFNVSGRPYDGGFACHFHPNAPIYNDRERLQIYISDAGILAVCYGLFRYAAAQGVASMVCFYGVPLLIVNGLLVLITYLQHTHPSLPHYDSSEWDWLRGALATVDRDYGILNKVFHNITDTHVAHHLFSTMPHYHAMEATKAIKPILGEYYQFDGTPVVKAMWREAKECIYVEPDRQGEKKGVFWYNNKL

SEQ ID NO: 4902 - protein, 384 aa, Brassica rapa
MGAGGRMQVSPPSKKSETDNIKRVPCETPPFTVGELKKAIPPHCFKRSIPRSFSYLIWDIIIASCFYYVATTYFPLLPHPLSYFAWPLYWACQGCVLTGVWVIAHECGHHAFSDYQWLDDTVGLIFHSFLLVPYFSWKYSHRRHHSNTGSLERDEVFVPKKKSDIKWYGKYLNNPLGRTVMLTVQFTLGWPLYLAFNVSGRPYDGGFACHFHPNAPIYNDRERLQIYISDAGILAVCYGLYRYAAVQGVASMVCFYGVPLLIVNGFLVLITYLQHTHPSLPHYDSSEWDWLRGALATVDRDYGILNKVFHNITDTHVAHHLFSTMPHYHAMEATKAIKPILGEYYQFDGTPVVKAMWREAKECIYVEPDRQGEKKGVFWYNNKL

SEQ ID NO: 4903 - protein, 312 aa, Brassica rapa
IWDIIIASCFYYVATTYFPLLPHPLSYFAWPLYWACQGCVLTGVWVIAHECGHHAFSDYQWLDDTVGLIFHSFLLVPYFSWKYSHRRHHSNTGSLERDEVFVPKKKSDIKWYGKYLNNPLGRTVMLTVQFTLGWPLYLAFNVSGRPYDGGFACHFHPNAPIYNDRERLQIYISDAGILAVCYGLYRYAAVQGVASMVCFYGVPLLIVNGFLVLITYLQHTHPSLPHYDSSEWDWLRGALATVDRDYGILNKVFHNITDTHVAHHLFSTMPHYHAMEATKAIKPILGEYYQFDGTPVVKAMWREAKECIYVEP

SEQ ID NO: 4904 - protein, 206 aa, Brassica oleracea
SFLLVPYFSWKYSHRRHHSNTGSLERDEVFVPKKKSDIKWYGKYLNNPLGRTVMLTVQFTLGWPLYLAFNVSGRPYDGGFACHFHPNAPIYNDRERLQIYISDAGILAVCYGLYRYAAAQGVASMVCFYGVPLLIVNGFLVLITYLQHTHPSLPHYDSSEWDWLRGALATVDRDYGILNKVFHNITDTHVAHHLFSTMPHYHAMEA

SEQ ID NO: 4905 - protein, 222 aa, Brassica oleracea
  unsure (1)..(222): unsure at all Xaa locations
KQIGQDLPDNVTLKDIMDTLPKEVFEIDDVKAWKSVLISVTSYALGLFMIAKAPWYLLPLAWAWTGTAVTGFFVIGHDCAHKSFSKNKLVEXIVGTLAFLPLVYPYEPWRFKHDRHHAKTNMLVHDTAWQPVPPEEFDSSPVLRKAIIFGYGPIRPWLSIAHWVNWHFNLRKFRPSEVNRVKISLACVFAFMAVGWPLIIYKVGVLGWVKFWLMPWLGYHFW

SEQ ID NO: 4906 - protein, 387 aa, Glycine max
MGLAKETIMGGGGRVAKVEIQQKKPLSRVPNTKPPFTVGQLKKAIPPHCFQRSLLTSLSYVVYDLSLAFIFYIATTYFHLLPHPFSLIAWPIYWVLQGCILTGVWVIAHECGHHAFSKYPWVDDVMGLTVHSALLVPYFSWKISHRRHHSNTGSLDRDEVFVPKPKSKVAWYTKYLNNPLGRAASLLITLTIGWPLYLAFNVSGRPYDGFASHYHPYAPIYSNRERLLIYVSDVALFSVTYLLYRVATMKGLVWLLCVYGVPLLIVNGFLVTITYLQHTHYALPHYDSSEWDWLRGALATMDRDYGILNKVFHHITDTHVAHHLFSTMPHYHATEATNAMKPILGEYYRFDDTPFYKALWREARECLYVEPDEGTSEKGVYWYRNKY

SEQ ID NO: 4907 - protein, 387 aa, Glycine max
MGLAKETTMGGRGRVAKVEVQGKKPLSRVPNTKPPFTVGQLKKAIPPHCFQRSLLTSFSYVVYDLSFAFIFYIATTYFHLLPQPFSLIAWPIYWVLQGCLLTGVWVIAHECGHHAFSKYQWVDDVVGLTLHSTLLVPYFSWKISHRRHHSNTGSLDRDEVFVPKPKSKVAWFSKYLNNPLGRAVSLLVTLTIGWPMYLAFNVSGRPYDSFASHYHPYAPIYSNRERLLIYVSDVALFSVTYSLYRVATLKGLVWLLCVYGVPLLIVNGFLVTITYLQHTHFALPHYDSSEWDWLKGALATMDRDYGILNKVFHHITDTHVAHHLFSTMPHYHAMEATNAIKPILGEYYQFDDTPFYKALWREARECLYVEPDEGTSEKGVYWYRNKY

SEQ ID NO: 4908 - protein, 387 aa, Glycine max; identical to SEQ ID NO: 4907

SEQ ID NO: 4909 - protein, 383 aa, Glycine max
MGAGGRTAVPPANRKSEADPLKRVPFEKPQFSLSQIKKAIPPHCFQRSVLRSFSYVVYDLTIAFCLYYVATHYFHLLPGPLSFVAWPIYWAVQGCILTGVWVIAHECGHHAFSDYQLLDDIVGLILHSALLVPYFSWKYSHRRHHSNTGSLERDEVFVPKQKSSIMWYSKYLNNPPGRVLTLAVTLTLGWPLYLAFNVSGRPYDRFACHYDPYGPIYSDRERLQIYISDAGVLAVCYGLFCLAMAKGLAWVVCVYGVPLLVVNGFLVLITFLQHTHPALPHYTSSEWDWLRGALATVDRDYGILNKVFHNITDTHVAHHLFSTMPHYHAMEATKAIKPILGEYYRFDGTPFVKAMWREARECIYVEPDQSTQSKGVFWYNNKL

SEQ ID NO: 4910 - protein, 383 aa, Glycine max
MGAGGRTDVPPANRKSEVDPLKRVPFEKPPFSLSQIKKVIPPHCFQRSVFRSFSYVVYDLTIAFCLYYVATHYFHLLPSPLSFLAWPIYWAVQGCILTGVWVIAHECGHHAFSDYQLLDDIVGLVLHSGLLVPYFSWKYSHRRHHSNTGSLERDEVFVPKQKSCIKWYSKYLNNLPGRVLTLAVTLTLGWPLYLALNVSGRPYDRFACHYDPYGPIYSDRERLQIYISDAGVLAVCYGLFRLAMAKGLAWVVCVYGVPLLVVNGFLVLITFLQHTHPALPHYTSSEWDWLRGALATVDRDYGILNKVFHNITDTHVAHHLFSTMPHYHAMEATKAIKPILGEYYRFDETPFVKAMWREARECIYVEPDQSTESKGVFWYNNKL

SEQ ID NO: 4911 - protein, 383 aa, Glycine max
MGAGGRTDVPPANRKSEVDPLKRVPFEKPPFSLSQIKKVIPPHCFQRSVFRSFSYVVYDLTIAFCLYYVATHYFHLLPSPLSFLAWPIYWAVQGCILTGVWVIAHECGHHAFSDYQLLDDIVGLVLHSGLLVPYFSWKYSHRRHHSNTGSLERDEVFVPKQKSCIKWYSKYLNNPPGRVLTLAVTLTLGWPLYLALNVSGRPYDRFACHYDPYGPIYSDRERLQIYISDAGVLAVCYGLFRLAMAKGLAWVVCVYGVPLLVVNGFLVLITFLQHTHPALPHYTSSEWDWLRGALATVDRDYGILNKVFHNITDTHVAHHLFSTMPHYHAMEATKAIKPILGEYYRFDETPFVKAMWREARECIYVEPDQSTESKGVFWYNNKL

SEQ ID NO: 4912 - protein, 383 aa, Glycine max
MGAGGRTDVPPANRKSEVDPLKRVPFEKPQFSLSQIKKAIPPHCFQRSVLRSFSYVVYDLTIAFCLYYVATHYFHLLPGPLSFRGMAIYWAVQGCILTGVWVIAHECGHHAFSDYQLLDDIVGLILHSALLVPYFSWKYSHRRHHSNTGSLERDEVFVPKQKSCIKWYSKYLNNPPGRVLTLAVTLTLGWPLYLALNVSGRPYDRFACHYDPYGPIYSDRERLQIYISDAGVLAVVYGLFRLAMAKGLAWVVCVYGVPLLVVNGFLVLITFLQHTHPALPHYTSSEWDWLRGALATVDRDYGILNKVFHNITDTHVAHHLFSTMPHYHAMEATKAIKPILGEYYRFDETPFVKAMWREARECIYVEPDQSTESKGVFWYNNKL

SEQ ID NO: 4913 - protein, 383 aa, Glycine max; identical to SEQ ID NO: 4912

SEQ ID NO: 4914 - protein, 387 aa, Ricinus communis
MGGGGRMSTVITSNNSEKKGGSSHLKRAPHTKPPFTLGDLKRAIPPHCFERSFVRSFSYVAYDVCLSFLFYSIATNFFPYISSPLSYVAWLVYWLFQGCILTGLWVIGHECGHHAFSEYQLADDIVGLIVHSALLVPYFSWKYSHRRHHSNIGSLERDEVFVPKSKSKISWYSKYSNNPPGRVLTLAATLLLGWPLYLAFNVSGRPYDRFACHYDPYGPIFSERERLQIYIADLGIFATTFVLYQATMAKGLAWVMRIYGVPLLIVNCFLVMITYLQHTHPAIPRYGSSEWDWLRGAMVTVDRDYGVLNKVFHNIADTHVAHHLFATVPHYHAMEATKAIKPIMGEYYRYDGTPFYKALWREAKECLFVEPDEGAPTQGVFWYRNKY

SEQ ID NO: 4915 - protein, 362 aa, Oryza sativa (japonica cultivar-group)
MQRSPVDKPPFTLGDIKKAIPPHCFHRSVIKSFSYLLHDLAIAAGLLYFALVGIPALPSILRLVAWPLYWAAQGSVLTGVWVIGHECGHHAFSDYLLLDNLVGLVLHSALLTPFFSWKYSHRRHHANTGSMEKDEVYVAKKKSALPWYTPYVFGNPVGRLVYIALQLTLAWPLYLAFNLSGQPYPRLVTCHYDPYSPLFSDQERVQVLVSDAAILAVLLALHRLTAAYGLWWVVRVYGVPVMIVGALFVLITYLHHTHRALPHYDSSEWEWLRGSLATVDRDYGVLNRVLHNVTDTHVLHHLFPSMPHYHAMEATRAARPVLGEYYKFDRTPIIEATWREAKECMYVEPRERDGIYWYNNKF

SEQ ID NO: 4916 - protein, 390 aa, Oryza sativa (japonica cultivar-group)
MGTSSRPTTVKEGKKLEAPRRAGSHAAVKRSPVDKPPFTLGDIRKAIPPHCFHRSVIKSFSYLLHDLAIAAGLLYFALVVIPALPGVLRLVAWPFYWAAQGCFLFGVWIIAHECGHHAFSGHALLDDTLGLVLHSWLLAPYFSWKYTHQRHHSNTSSQERDEVFVPRFKSDLPWYSPYVYKYNNPVARLLLLVVQLTVGWPMYLVFNTWGRQYPRFASHFDPSGPIYKGRERVFIAISDIGMLAVSLALYRLAEGYGFWWVVRVYGVPLLVVNAWLVVVTYLHHTHRAIPHYDSSEWDWLRGALATVDRDYSFLNRVFHNITDTHVVHHLFPTIPHYHAVEATKAIRPILGEYYQFDPTPIVKAIWREAKECIYIQSEDHKGVFWYSNKF

SEQ ID NO: 4917 - protein, 382 aa, Petroselinum crispum
MGAGGRMPINPQGKNSEEVLQRVPVSKPPFTVGDIKKAIPPHCFKRSVIRSFSYVVYDLVIASILYFVATNYIQLLPHPLSYIAWPIHGFVQGCFLTGIWVIAHECGHHAFSDYQWLDDTVGLILHSSLLVPYFSWKYSHRRHHSNTGSLERDEVFVPKPKSELQSVAKYTNNPPGRVLTLLVTLTLGWPLYLLFNVSGRHYERFACHYDPKSPIYSDRERAQILVSDAGVLAVSYGLYRLAVAKGLTWVLCVYGGPLLVVNGFLVLITFLQHTHPALPHYNSSEWDWLRGALATVDRDYGILNKVLHNITDTHVAHHLFSTMPHYNAMEATKAIKPILGDYYRFDDTPVVKAMWREAKECLYVEPDEGDQGKGIFWYNNKL

SEQ ID NO: 4918 - protein, 383 aa, Petroselinum crispum
MGAGGRMSAPSNGKKTEAEALRRAPHEKPPFTIGDLKKAIPAHCFEKSLVTSFRYLIQDLIMAYALFYVATNYIDQYLPHPLNYLGWAAYIAVQGCVLTGAWVVGHECDHDAFSDYGWVNDLVGLVVHSSLMVPYFSWKISHRRHHANTQSLENDEVYVPRFKSSIRNYYKIMNNPPGRVLVWLITLLIGFPLYLMFNVSGHKYERWTSHYDPHSPLYTERERKQIIVSDIAILAVLYGLYNLVLAKGFAWVFCFYGGPLLVVNGWFTLITILNHTHPSLPYYDSSEWDWLRGALCTVDRDYGILNKVFHNVCNAHVCHHIFSMIPHYHGLEATEAMKPILGNYYQYDGTPILKAMYREMKECIYVEKDAGETKGVYWYRKEF

SEQ ID NO: 4919 - protein, 382 aa, Petroselinum crispum
MGAGGRMSAPNGKKTEAEALRRAPHEKPPFTIGDLKKAIPAHCFEKSLITSFRYLIQDLIMAYAIYYVATNYIDQYLPHPLNYLGWAAYIAVQGCVLTGAWVVGHECDHDAFSDYGWINDLVGLVVHSSLLVPYFSWKISHRRHHANTQSLENDEVYVPRFKSNIRNYYKMMNNPPGRVLIWLITLLVGFPLYLMFNVSGHKYERWTSHYDPHSPLYTERERTQIIVSDVAILAVLYGLYNLVLAKGFAWVFCVYGGPLLVVNMWFTLITILNHTHPSLPYYDSTEWDWLRGALCTVDRDYGILNKVFHNVCNAHVCHHIFSMIPHYHGLEATEAMKPLLGNYYQYDGTPIIKAMYREMKECIYVQKDEGETKGVYWYRKEF

SEQ ID NO: 4920 - protein, 384 aa, Petroselinum crispum
MGAGGRMSTAPPNGKKTQAEALKRAPHEKPPFTIGDLKKSIPAHCFEKSLVTSFRYLIQDLLMAYALYYVATNYIDQYLPHPINYLGWAAYIAVQGCVLTGAWVVGHECDHDAFSDYGWINDLVGLVVHSSLMVPYFSWKISHRRHHANTQSLENDEVYVPRFKSNIRNYYKILNNPPGRVLVWVITLLVGFPLYLMFNVSGHKYERWTSHYDPHSPLYTECERKQIIVSDVAILAVIYGLYRLVLIKGFAWVFCVYGGPLLVVNMWFTLITILNHTHPSVPYYDSTEWDWLRGALCTVDRDYGILNKVFHNVCNAHVCHHIFSMIPHYHGLEATEAMKPVLGDYYQYDGTPILKAMYREMKECIYVEKDEGETKGVYWYRKEI

SEQ ID NO: 4921 - protein, 384 aa, Petroselinum crispum
MGAGGRMSTAPSNGKKTQAEALKRAPHEKPPFTIGDLKKSIPAHCFEKTLVTSFRYLIQDLIMAYALYYVATNYIDQYLPHPINYLGWAAYIAVQGCVLTGAWVVGHECDHDAFSDYGWINDLVGLVVHSSLMVPYFSWKISHRRHHANTQSLENDEVYVPRFKSNIRNYYKILNNPPGRVLVWVITLLVGFPLYLMFNVSGHKYERWTSHYDPHSPLYTERERKQIIVSDVAILAVIYGLYRLVLIKGFAWVFCVYGGPLLVVNMWFTLITILNHTHPSVPYYDSTEWDWLRGALCTVDRDYGILNKVFHNVCNAHVCHHIFSMIPHYHGLEATEAMKPLLGDYYQYDGTPILKAMYREMKECIYVEKDEGETKGVYWYRKEI

SEQ ID NO: 4922 - protein, 384 aa, Petroselinum crispum
MGAGGRMSTAPPNGKKTQAEALKRAPHDKPPFTIGDLKKSIPAHCFEKSLVTSFRYLIQDLLMAYALYYVATNYIDQYLPHPVNYLGWAAYIAVQGCVLTGAWVVGHECDHDAFSDYGWINDLVGLVVHSSLMVPYFSWKISHRRHHANTQSLENDEVYVPRFKSNIRNYYKILNNPPGRVLVWVITLLVGFPLYLMFNVSGHKYERWTSHYDPHSPLYTERERKQIIVSDVAILAVIYGLYRLVLIKGFAWVFCVYGGPLLVVNMWFTLITILNHTHPSVPYYDSTEWDWLRGALCTVDRDYGILNKVFHNVCNAHVCHHIFSMIPHYHGLEATEAMKPVLGDYYQYDGTPILKAMYREMKECIYVEKDEGETKGVYWYRKEI

SEQ ID NO: 4923 - protein, 383 aa, Petroselinum crispum
MGAGGRMSDPPSGKKTAAEALKRAPHEKPPFTIGDLKKAIPAHCFQKSLVTSFRYLIQDLFMAYALFYVATNYIDQYLPTPFNYVAWAAYIAVQGCVLTGAWVVGHECDHDAFSNYNWINDLVGLVVHSSLLVPYFSWKISHRRHHANTQSLENDEVYVPRFKSNIRNYYKLLNNPPGRVLVWLTTLLIGFPLYLMFNVSGHKYERWTSHYDPHSPLYSDRERKEIIVSDIAILAVIYDLYQLVLAKGFAWVFCVYGGPLLVVNGWFVLYTILNHTHPSLPYYDSTEWDWLRGALCTVDRDYGILNKVFHNVCNAHVCHHIFSMIPHYHGLESTEAMKPILGEYYQYDGTPILKAMYREMKECIYVEKDEGETKGVYWYRNKF

SEQ ID NO: 4924 - protein, 383 aa, Petroselinum crispum
MGAGGRMSAPSNAKKSQAEALRRAPHEKPPFTIGDLKKAIPAHCFEKSLITSFRYLIQDLLMAYALYYVATNYINQYLPHPVNYLGWAAYIAVQGCVLTGAWVVGHECDHDAFSDYGWVNDLVGLVVHSSLMVPYFSWKISHRRHHANTQSLENDEVYVPRFRSNIRNYYKILNNPPGRVLVWVITLLVGFPLYLMFNVSGHKYERWTSHYDPHSPLYTERERKQIIVSDVAILAVIYGLYRLVLIKGFAWVFCVYGGPLLVVNMWFTLITILNHTHPSVPYYDSTEWDWLRGALCTVDRDYGILNKVFHNVCNAHVCHHIFSMIPHYHGLEATEAMKPLLGDYYQYDGTPIIKAMYREMKECIYVEKDEGETKGVYWYRKDI

SEQ ID NO: 4925 - protein, 384 aa, Petroselinum crispum
MGAGGRMSTAPSNGKKTQAEALKRAPHEKPPFTIGDLKKSIPAHCFEKSLVTSFRYLIQDLIMAYALYYVATNYIDQYLPHPINYLGWAAYIAVQGCVLTGAWVVGHECDHDAFSDYGWINDLVGLVVHSSLMVPYFSWKISHRRHHANTQSLENDEVYVPRFKSNIRNYYKILNNPPGRVLVWVITLLVGFPLYLMFNVSGHKYERWTSHYDPHSPLYTERERKQIIVSDVAILAVIYGLYRLVLIKGFAWVFCVYGGPLLVVNMWFTLITILNHTHPSVPYYDSTEWDWLRGALCTVDRDYGILNKVFHNVCNAHVCHHIFSMIPHCHGLEATEAMKPLLGDYYQYDGTPILKTMYREMKECIYVEKDEGETKGVYWYRKEI

SEQ ID NO: 4926 - protein, 376 aa, Petroselinum crispum
SAPSNTKKTQAEALRRAPHEKPPFTIGDLKKAIPAQCFEKSILTSFRYLIQDLIMAYALYYVATNYIDQYLPHPLNYLGWAAYIAVQGCVLTGAWVVGHECDHDAFSDYGWVNDLVGLVVHSSLMVPYFSWKISHRRHHANTQSLENDEVYVPRFRSSIRNYYKILNNPPGRVLVWVTTLLIGFPLYLMFNVSGHKYERWTSHYDPHSPLYTERERKQISVSDVAILAVIYGLYRLVLIKGFAWVFCVYGGPLLVVNGWFTLITILNHTHPSVPYYDSTEWDWLRGALCTVDRDYGILNKLFHNVCNAHVCHHIFSMIPHYHGLEATEAMKPLLGDYYQYDGTPILKAMYREMKECIYVEKDEGDTKGVYWYRKDI

SEQ ID NO: 4927 - protein, 383 aa, Petroselinum crispum
MGAGGRMSAPSNAKKSQAEALRRAPHEKPPFTIGDLKKAIPAHCFEKSLITSFRYLIQDLLMAYALYYVATNYINQYLPHPVNYLGWAAYIAVQGCVLTGAWVVGHECDHDAFSDYGWVNDLVALVVHSSLMVPYFSWKISHRRHHANTQSLENDEVYVPRFRSNIRNYYKILNNPPGRVLVWVITLLVGFPLYLMFNVSGHKYERWTSHYDPHSPLYTERERKQIIVSDVAILAVIYGLYRLVLIKGFAWVFCVYGGPLLVVNMWFTLITILNHTHPSVPYYDSTEWDWLRGALCTVDRDYGILNKVFHNVCNAHVCHHIFSMIPHYHGLEATEAMKPLLGDYYQYDGTPIIKAMYREMKECIYVEKDEGETKGVYWYRKDI

SEQ ID NO: 4928 - protein, 333 aa, Lycopersicon esculentum
MGGGGNMSAMTSKNEQKKNPLERVPSSKPPFTLGDVKKAIPPHCFERSLVKSFSFLIQDLILVYIFYYIANTYIHLIPTPYRYVAWTTYWIAQGCVCTGIWVIGHECGHHGFSDYQWVDDIVGLILHSALLTPYFAWKHSHRRHHANTGSLENDEIYIPRLKSKLRGKKYDRFACHYDPYSPIYSNRERLQIYISDVGVIATTYLLYRVTLTQGLAGFIVLITLMHHTHSSLPHYDSSEWDHLRGALATVDRDYGLLNKVFHNVTDTHVLHHIFSYISHYHAMEAKKAIKPLLGEYYKYDDTPILKAMWRDTKECIFVEKDKDKGVYWYKNKL

SEQ ID NO: 4929 - protein, 379 aa, Nicotiana tabacum
MGSLGISEIYDKNSFNEMEFEFDPSAPPPFRLAEIRNVIPKHCWVKDPLRSLSYVVRDVIFVATLIGIAIHLDSWLFYPLYWAIQGTMFWAIFVLGHDCGHGSFSDSQLLNNVVGHILHSAILVPYHGWRISHKTHHQNHGNVETDESWVPMPEKLYNKVGYSTKFLRYKIPFPLLAYPMYLMKRSPGKSGSHFNPYSDLFQPHERKYVVTSTLCWTVMAALLLYLCTAFGSLQMFKIYGAPYLIFVMWLDFVTYLHHHGYEKKLPWYRGKEWSYLRGGLTTVDRDYGLFNNIHHDIGTHVIHHLFPQIPHYHLREATKAAKPVLGKYYREPKKSGPIPFHLVKDLTRSMKQDHYVSDSGEIVFYQTDPHIFRSAPKDE

SEQ ID NO: 4930 - protein, 383 aa, Sesamum indicum
MGAGGRMSDPTTKDEQKKNPLQRVPYAKPPFTLGDIKKAIPPHCFERSVSRSFSYVVYDLVIVFLLYYIATSYFHLLPSPYCYLAWPIYWAVQGCVCTGIWVIAHECGHHAFSDYQWLDDTVGLILHSALLVPYFSWKYSHRRHHSNTGSLERDEVFVPKPKSRVSWYSKYLNNPLGRVITLVVTLTLGWPLYLLFNVSGRPYNRFACHFDPYGPIYNDRERLQIFISDAGIIAAVCVLYRVALVKGLAWLVCVYGVPLLIVNGFLVLITFLQHTHPSLPHYDSSEWDWLRGALATVDRDYGVLNKVFHNITDTHVTHHLFSTMPHYHAMEATKAIKPILGQYYQFDGTPFYKAMWREAKECLYVEPDESTPDKGVFWYKNKF

SEQ ID NO: 4931 - protein, 381 aa, Oryza sativa
MGAGGRMTEKEREEQQKRAAVQRSPTDKPPFTLGQIKKAIPPHCFQRSVIKSFSYVVHDLVIVAALLYFALVMIPVLPSGMEFAAWPLYWIAQGCVLTGVWVIAHECGHHAFSDYSVLDDIVGLVLHSSLLVPYFSWKYSHRRHHSNTGSLERDEVFVPKQKSAMAWYTPYVYHNPIGRLVHIFVQLTLGWPLYLAFNVSGRPYPRFACHFDPYGPIYNDRERVQIFISDVGVVSAGLALFKLSSAFGFWWVVRVYGVPLLIVNAWLVLITYLQHTHPALPHYDSSEWDWLRGALATVDRDYGILNKVFHNITDTHVAHHLFSTMPHYHAMEATKAIRPILGEYYQFDPTPVAKATWREAKECIYVEPEDNKGVFWYNNKF

SEQ ID NO: 4932 - protein, 332 aa, Oryza sativa
  unsure (1)..(332): unsure at all Xaa locations
MGAGGRMTEKEREEQQKRAAVQRSPTDKPPFTLGQIKKAIPPHCFQRSVIKSFSYVVHDLVIVAALLYFALVMIPVLPSGMEFAAWPLYWIAQGCVLTGVWVIAHECGHHAFSDYSVLDDIVGLVLHSSLLVPYFSWKYSHRRHHSNTGSLERDEVFVPKQKSAMAWYTPYVYHNPIGRLVHIFVQLTLGWPLYLAFNVSGRPYPRFACHFDPYGPIYNDRERVQIFISDHTHPALPHYDSSEWDWLRGALATVDRDYGILNKVFHNITDTHVAHHLFSTMPHYHAMEATKAIRPILGEYYQFDPTPVAKATWREAKECIYVEPEDNKGVFX

SEQ ID NO: 4933 - protein, 382 aa, Triticum aestivum
  unsure (1)..(382): unsure at all Xaa locations
MGAGGRMTEKEREKQELLGPYQRSPTDKPPFTLGQIKKAIPPHCFQRSIIKSFSYVVHDLVIVAALLYAALVWIPTLPTVLQLGAWPLYWVVQGCVMTGVWVIAHECGHHAFSDYSLLDDTVGLVLHSWLLVPYFSWKYSHRRHHSNTGSLERDEVFVPKQKEALAWYTPYIYNNXPVGRLVHIVVQLTLGWPLYLALNASGRPYPRFACHFDPYGPIYNDRERAQIFISDVGVLAVSLALLKLVSSFGFWWVVRVYGVPLLIVNAWLVLITYLQHTHPALPHYDSTEWDWLRGALATMDRDYGILNRVFHNITDTHVAHHLFSTMPHYHAMEATKAIKPILGEYYQFDPTPVAKATWREAKECIYVEPEDRKGVFWYSNKF

SEQ ID NO: 4934 - protein, 410 aa, Triticum aestivum
  unsure (1)..(410): unsure at all Xaa locations
MPPPPLPTHSYLSSRRPAQRGRSTARRVRALASVPSRRPAPPPSRRVVPPPSAAQAPRREDDGRAPVGAGGARAFPRSRXPSPARPTAKPVSPLGQTKKARAPQGYLRRVIGSFSLXCARDRLSRRSLLYAALRRCRRLAPGLPSGTWPPSWFVAGCATRRCWVIEDECAPPPFSDHSLLDDTIGRCLHXGLLVPYSSWKYSDRRRHSNTGSLERDEXVFVPKQKDALSWYTPYIYGXHFDPYGPIXDAGQRPGAFISDVGVLAVSLALLKLVSSFGFWWVVRVYGVPLLIVNGWLVLITYLQHTHPALPHYDSTEWDWLRGALATMDRDYGILNRVFHNITDTHVAHHLFSTMPHYHAMEATKAIKPILGEYYQFDPTPVAKATWREAKECIYVEPEDRKGVFWYSNKF

SEQ ID NO: 4935 - protein, 138 aa, Triticum aestivum
  unsure (1)..(138): unsure at all Xaa locations
MGAAARRAPEQEQSCKATEDFDAAKPPPFRIGDVRAAVPAHCWRKSPLRSLSYVARDVAVVAALAGAAWWLNSWAVWPLYWAAQGTMFWALFVLGHDCGHGSFSDSGTLNSVVGHLLHTFILVPYNGWRISHRTHHQX

SEQ ID NO: 4936 - protein, 283 aa, Triticum aestivum
  unsure (1)..(283): unsure at all Xaa locations
XPAGLGIKEIYNAIPKHCFQRSALKGYGYILRDIVLLATTFSIWYNYVTPEYIPSTPARAGLWAVYTVLQGLFGTGLWVIAHECGHGAFSDSRLINDITGWVLHSSLLVPYFSWQISHRKHHKATGNMERDMVFVPRTREQQATRLGKMTHELAHLTEETPVFTLIMLVLQQLVGWPNYLMTNVTGHNYHERQKEGRGKGKHNGLGGGVNHFDPRSPLYEHSDAKLIVLSDIGIGLMGTALYFLVQKFGFXHMXIWYFVPYLXVXHWLVAITFXQXHDPTFPT

SEQ ID NO: 4937 - protein, 196 aa, Triticum aestivum
  unsure (1)..(196): unsure at all Xaa locations
MGAGGRMTEKERXAARPRRRRRDLXQRSPTDKPPFTLAQIKKAIPPHCFERSVIKSFSYLVHDLVIVATLLYAALVWIPTLPSVLQLGAWPLYWVVQGCVMTGVWVIAHECGHHAFSDSSLLDDIVGLVLHSWLLVPYFSWKYSHRRHHSNTGSLERDEVFVPKQKEALAWYTPYIYNNPIGRLVHIVVQLTLGWX

SEQ ID NO: 4938 - protein, 229 aa, Triticum aestivum
  unsure (1)..(229): unsure at all Xaa locations
MGAGGRMTEKEREKQELREIFQRAPTDKPAFTLAQIKKAIPPHCFQRSVIKSFSYVVYDLVIIASLLYAALVWIPALPAMQQLGAWPLYWAAQGCVMTGVWVLAHECGHHAFSDYLLLDNILGLVLHSCLFVPYFSWKYSHRRHHANTGSLEHDEVYVPKKKEALPWYTPYIYNNXPVGRLGYIVVQLTPRWAMYLXLNTSGAPYPRFVCHYDPLXPMYSELERAQVFX

SEQ ID NO: 4939 - protein, 168 aa, Triticum aestivum
  unsure (1)..(168): unsure at all Xaa locations
MGAGGRMTEKEREKQEQRGAAYQRSPTDKPPFTLGQIKKAIPPHCFQRSIIKSFSYVVHDLVIVAALLYAALVWIPTLPTVLQLGAWPLYWIVQGCVMTGVWVIAHECGHHAFSDYSLLDDTVGLVLHSWLLVPYFSWKYSHRRHHSXNTGSLERDEVFVPKQKEALX

SEQ ID NO: 4940 - protein, 145 aa, Triticum aestivum
  unsure (1)..(145): unsure at all Xaa locations
XLMTVSRXSNSTLVREEPLIHTIGHRXXWLKSQSRSYLRGGLTTVDRDYGWINNIHHDIGTHVIHHLFPQIPHYHLVEATKAARPVLGRYYREPEKSGPLPVHLITVLLKSLRVDHFVSDVGDVVFYQTDPSLSGDKWTGADKQK

SEQ ID NO: 4941 - protein, 87 aa, Triticum aestivum
  unsure (1)..(87): unsure at all Xaa locations
XRDYGILNRVFHNITDTHVAHHLFSNMPHYHAMEATKAIKPILGEYYHFDATPFAKATWREAKECIYVEPXXDRKGVFWYSNKFSAP

SEQ ID NO: 4942 - protein, 186 aa, Zea mays
  unsure (1)..(186): unsure at all Xaa locations
DKYVRLEISSPQTKLPYPKTEELPFTLQELRNAIPADCFEPSVVRSLGYFFLDVGLIAGFYALAAYLDSWFFYPIFWLIQGTLFWSLFVVGHDCGHGSFSKSKTLNNWIGHLSHTPILVPYHGWRISHRTHHANTGNIDTDESWYPVSEQKYNQMAWYEKLLRFYLPLIAYPXIYLFRDPRYRDIX

SEQ ID NO: 4943 - protein, 381 aa, Zea mays
MGAGGRMTEKEREKQEQLAPMQRSPVEKPPFTLGQIKKAIPPHCFERSVLKSFSYVVHDLVIAAALLYFALAIIPALPSPLRYAAWPLYWIAQGCVCTGVWVIAHECGHHAFSDYSLLDDVVGLVLHSSLMVPYFSWKYSHRRHHSNTGSLERDEVFVPKKKEALPWYTPYVYNNPVGRLVHIVVQLTLGWPLYLATNASGRPYPRFACHFDPYGPIYNDRERAQIFVSDAGVVAVAFGLYKLAAAFGVWWVVRVYAVPLLIVNAWLVLITYLQHTHPSLPHYDSSEWDWLRGALATMDRDYGILNRVFHNITDTHVAHHLFSTMPHYHAMEATKAIRPILGDYYHFDPTPVAKATWREARECIYVEPEDRKGVFWYNKKF

SEQ ID NO: 4944 - protein, 381 aa, Zea mays
MGAGGRMTEKEREKQEQLAPMQRSPVEKPPFTLGQIKKAIPPHCFERSVLKSFSYVVHDLVIAAALLYFALAIIPALPSPLRYAAWPLYWIAQGCVCTGVWVIAHECGHHAFSDYSLLDDVVGLVLHSSLMVPYFSWKYSHRRHHSNTGSLERDEVFVPKKKEALPWYTPYVYNNPVGRVVHIVVQLTLGWPLYLATNASGRPYPRFACHFDPYGPIYNDRERAQIFVSDAGVVAVAFGLYKLAAAFGVWWVVRVYAVPLLIVNAWLVLITYLQHTHPSLPHYDSSEWDWLRGALATMDRDYGILNRVFHNITDTHVAHHLFSTMPHYHAMEATKAIRPILGDYYHFDPTPVAKATWREARECIYVEPEDRKGVFWYNKKF

SEQ ID NO: 4945 - protein, 381 aa, Zea mays; identical to SEQ ID NO: 4944

SEQ ID NO: 4946 - protein, 433 aa, Zea mays
  unsure (1)..(433): unsure at all Xaa locations
HWVPRGRPGLPSSILKASGCPKQSHLLFVAPNSWSNQLLNRQQDSRARRGEGCRMEQPTQQEGKGLTTMQRSIVDKPPFTLADLRKAIPPHCFQRSLIRSCSYLAHDLAIAAGLLYLALAVIPALPGVLLRAAAWPLYWAAQGSIMFGVWVIAHECGHSSFSRYGLLNDALGLVLHSCLLAPYFSWKYSHQRHHANTASLERDEVFVPKQRPEMPWYSPLVXQARQPPSRLVLLAVQLTVGWPMYLAFNTWGRRYSXRFACHFDPYSPIYGDRERAQIAVSDAGVLAVSFALYRLAAAHGLWPVVSVYGVPLLVTNAWLVVVTYLHHTHRALPHYDSSEWDWMRGALATVDRDYGVLNRVFHHIADTHIAHHLFPAIPHYHAMEATRAIRPVLGDYYRSDSTPIAEALWREAKECIYVQRDDQKGVFWYKNVF

SEQ ID NO: 4947 - protein, 384 aa, Zea mays
  unsure (1)..(384): unsure at all Xaa locations
MGAGGRMTEKEREEQEQEQAVQRSPVEKPPFTLGQIKKAIPPHCFERSVLRSFSYVAHDLATAAALLYLAVAVIPALPSPLRYAAWPLYWVAQGCVCTGVWVIAHECGHHAFSDHALLDDAVGLALHSALLVPYFSWKYSHRRHHSNTGSLERDEVFVPRTKEALPWYAPYVHGSPAGRLAHVAVQLTLGWPLYLATNASGRPYPRFACXHFDPYGPIYGDRERAQIFVSDAGVAAVAFGLYKLAAAFGLWWVVRVYAVPLLIVNAWLVLITYLQHTHPALPHYDSGEWDWLRGALATVDRDYGVLNRVFHHITDTHVAHHLFSTMPHYHAVEATRAIRPVLGDYYQFDPTPVAKATWREARECIYVEPEIRNSKGVFWYNSKF

SEQ ID NO: 4948 - protein, 385 aa, Zea mays
  unsure (1)..(385): unsure at all Xaa locations
MGAGGRMTEKEREKQEQLAPMQRSPVEKPPFTLGQIKKAIPPHCFERSVLKSFSYVVHDXLVIAAALLYFALAIIPALPSPLGYAAWPLYWIAQGCVCTGVWVIAHECGHHAFSDYSLLDDVVGLVLHSSLMVPYFSWKYSHRRHHSNTGSXLERDEVFVPKKKEALPWYTPYVYNNPVGRLVALVVQLTLGWPLYLATNASGRPYPRFACXHFXDPYGPIYNDRERAQIFVSDAGVVAVAFGLYKLAAAFGVWWVVRVYAVPLLIVNAWLVLITYLQHTHPSLPHYDSSEWDWLRGALATMDRDYGILNRVFHNITDTHVAHHLFSTMPHYHAMEATKAIRPILGDYYHFDPTPVAKATWREAGECIYVEPEDRKGVFWYNKKF

SEQ ID NO: 4949 - protein, 434 aa, Zea mays
MATTLRQRTAPATQSKKERRDSDVLSTSSDEDTSPVSHLENTFPPFEVPNFTTKEVLGAIPAECFERSAAISFAYVARDFAFVAALGYAASFIEPAPGFAAKWAAWAAYWTVQGWVMTGIWILGHECGHQAFSTSKTLNNTVGLFLHSFVLVPYHSWRISHAKHHAATGHLTRDEVFVPRTLSERKFKENPKKVEVDRSHELLEDAPIYRLGWLIVQQLFGWPAYLFTNASGQLSYPAWTNHFDPKSLIFDARHRADVLITDAFLIGMLTLLTLFGQKVGGLEVVKYYGIPYLAVNHWLVCITYLQHTDPSLPHYDATEWNFVRGALCTMDRNLLGPVGPYLMHGICETHVAHHLCSRIPHHNAYAATEALKKFLGPHYASTDESMFVSLWKSYKQCRYVDDEGSVRMYRDAYGRARRTVAPVEVPSDSGVDFE

SEQ ID NO: 4950 - protein, 388 aa, Zea mays
  unsure (1)..(388): unsure at all Xaa locations
MGAGGRMTEKEREKHEQEQVVQRSPVEKPPFTLGQIKKAIPPHCFERSVLRSFSYVAHDLSLAAALLYLAVAXVIPALPCPXLRYAAWPLYWVAPGVRVHGRVWVIAHECGHHAFSDHALLXDDAVGLALHSXALLVPYFSWKYSHRRHHSNTGSLERDEVFVPRTKGAVPWYAPYVHGSPAGRLAHVAVQLTLGWPLYLATNASGRPYPRFACHFDPYGPIYGDRERAQIFVSDAGVAAVAFGLYKLAAAFGLWWVVRVYAVPLLIVNAWLVLITYLQHTHPALPHYDSGEWDWLRGALATVDRDYGVLNRVFHHITDTHVAHHLFSTMPHYHAVEATRAIRPVLGEYYQFDPTPVAKATWREARECIYVEPENRNRKGVFWYNSKF

SEQ ID NO: 4951 - protein, 389 aa, Zea mays
  unsure (1)..(389): unsure at all Xaa locations
MRAGARLIETEEQDPSRRQPLQRAPVEKPPFTLGQIKKAIPPHCFERSVLKSFSYVLRDLVTAATLLYLALVTIPALPSPLQYAAWPLYWIAQGCVCTGLWVIGHECGHNAFSEYPLLDDIVGLVLHSSLMVPYFSWKYSHRRHHSNIGSLERDEVFVPKKKEALPWYTPYVCNSPVGRLLQIVVQLXTLGWPLYLATNASGSPXYPRFAXCHYDPXYGPIYSDRERAQVFVSDAGVVAAWFGLYKLAATFGFLXWVVRVYAVPLVIVNAWLVIVTFLQHTHPALPRYDSSEWGLGXLRGALATMXDRDYGAXLNRVFHNITDTHVVHHLLPTVPHYHAVEATKAIKPILGEYYQFDPPPIAKAMWREARECIYVEPENGRGILWYNKF

SEQ ID NO: 4952 - protein, 365 aa, Zea mays
  unsure (1)..(365): unsure at all Xaa locations
CMPAGWSSRRRRRHSKRAKASPPCSAARSXXRSCSYLAHDLAIAAGLLYLALAVIPALPGVLLRAAAWPLYWAAQGSIMFGVWVIAHECGHSSFSRYGLLNDALGLVLHSCLLAPYFSWKYSHQRHHANTASLERDEVFVPKQRPEMPWYSPLVYKRDNPVARLVLLAVQLTVGWPMYLAFNTWGRRYSRFACHFDPYSPIYGDRERAQIAVSDAGVLAVSFALYRLAAAHGLWPVVSVYGVPLLVTNAWLVVVTYLHHTHRALPHYDSSEWDWMRGALATVDRDYGVLNRVFHHIADTHIAHHLFPAIPHYHAMEATRAIRPVLGDYYRSDSTPIAEALWREAKECIYVQRDDQKGVFWYRNVF

SEQ ID NO: 4953 - protein, 283 aa, Zea mays
  unsure (1)..(283): unsure at all Xaa locations
GAVSXHASARSALPRRSCYDDVVGLVLHSSLMVPYFSWKYSHRRHHSNTGSLERDEVFVPKKKEALPWYTPYVYNNPVGRLVHIVVQLTLGWPLYLATNASGRPYPRFACHFDPYGPIYNDRERAQIFVSDAGVVAVAFGLYKLAAAFGVWWVVRVYAVPLLIVNAWLVLITYLQHTHPSLPHYDSSEWDWLRGALATMDRDYGILNRVFHNITDTHVAHHLFSTMPHYHAMEATKAIRPILGDYYHFDPTPVAKATWREARECIYVEPXXDRKGVFWYNKKF

SEQ ID NO: 4954 - protein, 391 aa, Perilla frutescens
MAVSSGARLSKSGADGEVFDGQQQYEGIGKRAADKFDPAAPPPFKIADIRAAIPAHCWVKNPWRSLSYVVWDVAAVFALLAAAVYINSWAFWPVYWIAQGTMFWALFVLGHDCGHGSFSDNTTLNNVVGHVLHSSILVPYHGWRISHRTHHQNHGHVEKDESWVPLPENLYKKLDFSTKFLRYKIPFPMFAYPLYLWYRSPGKTGSHFNPYSDLFKPNERGLIVTSTMCWAAMGVFLLYASTIVGPNMMFKLYGVPYLIFVMWLDTVTYLHHHGYDKKLPWYRSKEWSYLRGGLTTVDQDYGFFNKIHHDIGTHVIHHLFPQIPHYHLVEATREAKRVLGNYYREPRKSGPVPLHLIPALLKSLGRDHYVSDNGDIVYYQTDDELFPSKKI

SEQ ID NO: 4955 - protein, 390 aa, Perilla frutescens
MAVSSGARLSKSGADGEVFDGQQQYEGIGKRAADKFDPAAPPPFKIADIRAAIPAHCWVKSPWRSLSYVVWDVAAVSARPAAVYINSWAFWPVYWIAQGTMFWALFVLGHDCGHGSFSDNTTLNNVVGHVLHSSILVPYHGWRISHRTHHQNHGHVEKDESWVPLPENLYKKLDFSTKFLRYKIPFPMFAYPLYLWYRSPGKTGSHFNPYSDLFKPNERGLIVTSTMCWAAMGVFLHYATTIVGPNMMFKLYGVPYLIFVMWLDTVTYLHHHGYDKKLPWYRSKEWIYLRGGLTTVDQDYGFFNKIHHDIGTHVIHHLFPQIPHYHLVEATREAKRVLGNYYREPRKSGPVPLHLIPALLKSLGRDHYVSDNGDIVYYHTVDELFPSKKI

SEQ ID NO: 4956 - protein, 383 aa, Vernicia fordii
MGAGGRMSVPPPPKKLESEVLKRVPHSKPPFTLGQLKKAIPPHCFQRSVLRSFSYVVYDLTVAFIFYYIATNYFHLLPQPLSYVAWPIYWALQGCVLTGVWVIAHECGHHAFSDYQLLDDIVGLVLHSCLLVPYFSWKHSHRRHHSNTASLERDEVFVPKKKSSIRWFSKYLNNPPGRLFTLTITLTLGWPLYLAFNVSGRPYDRFACHYDPYGPIYTDRERTEIYISDAGVLAVTFGLYRLAAAKGLAWVICVYGVPLLIVNAFLVMITYLQHTHPSIPHYDSSEWDWLRGALATVDRDYGILNKVFHNITDTHVAHHLFSTMPHYHAMEATKAIKPILGEYYQFDGTPFYKAMWREAKECIYVEADDGDESKGVYWYNKKF

SEQ ID NO: 4957 - protein, 386 aa, Vernicia fordii
MGAGGRMSVAPNNSKCEKKESRSVKRVPHTKPPFTLGQLKQAIPSHCFKRSLLRSFSYVVYDLSLSFIFYSIATTYFHLLPSPITYIAWPVYWAFQGCILTSVWVLGHECGHHAFSEYNWLDDTIGLILHSSLLVPYFSFKISHRRHHSNIASLERDEVFVPRLKSAIPWYSKYLNNPPGRALTLVATLFIGWPLYLAFNVSGRYYDRFACHYDPYSPIYSDRERLQIYISDAMIFVAAYVLYKIAMAKGLAWLVCIYGVPLLIVNALVVTITSLQHTHVALPHYDSSEWDWLRGGLATVDRDYGVFNKIFHNATDTHVIHHLFSSMPHYHGVEATRAIKPILGDYYLFDDTPIHVALWREAKECLFVEPDEGDNNNGVFWYSNKF

SEQ ID NO: 4958 - protein, 255 aa, Vernicia fordii
KAIPPHCFQRSVLRSFSYVVYDLTVAFIFYYIATNYFHLLPQPLSYVAWPIYWALQGCVLTGVWVIAHECGHHAFSDYQLLDDIVGLVLHSCLLVPYFSWKHSHRRHHSNTASLERDEVFVPKKKSSIRWFSKYLNNPPGRLFTLTITLTLGWPLYLAFNVSGRPYDRFACHYDPYGPIYTDRERTEIYISDAGVLAVTFGLYRLAAAKGLAWVICVYGVPLLIVNAFLVMITYLQHTHPSIPHYDSSEWDWLRG

SEQ ID NO: 4959 - protein, 255 aa, Vernicia fordii
KAIPPHCFKRSLLRSFSYVVYDLSLSFIFYSIATTYFHLLPSPITYIAWPVYWAFQGCILTSVWVLGHECGHHAFSEYNWLDDTIGLILHSSLLVPYFSFKISHRRHHSNIASLERDEVFVPRLKSAIPWYSKYLNNPPGRALTLVATLFIGWPLYLAFNVSGRYYDRFACHYDPYSPIYSDRERLQIYISDAMIFVAAYVLYKIAMAKGLAWLVCIYGVPLLIVNALVVTITSLQHTHVALPHYDSSEWDWLRG

SEQ ID NO: 4960 - protein, 227 aa, Nilaparvata lugens
MSSVITFLLAFCMILLVECQNANDRCSIDMDDTLEKVEWKTMHSNCTLEVKDQIKMEYNAAMIYLSLGVHFSRDFVNRPGFAKFFFESASEERQHAIKLIEYLSMRGESVTDIAKLVKLDPETMPGMASVSLNGKEALEKALQQEVLVTNNILKVMKACENEEVKDAAWTLPNDYHLVDWLTAEFLDEQYKGQRDIAGKLSTLLKMGSSNYHLGEFLFDKKLLSNEA

SEQ ID NO: 4961 - protein, 137 aa, Hordeum vulgare subsp. vulgare
VEFNASYAYHSLFAYFDRDNVALKGFAKFFKESSDEERGHAEKLMEYQNKRGGRVRLQSIVTPLTEFDHPEKGDALYAMELALALEKLVNEKLHNLHSVATRCNDPQLTDFVESEFLQEQVDAIKKISEYVAQLRRV

SEQ ID NO: 4962 - protein, 173 aa, Thermoanaerobacter tengcongensis
MLSERMLEELNKQLNYEIYSAYLYVAMENYFQEKNLEGFANFFKVQMEEELSHARIFYEYIYRMGGKVTLYPIEKPEENFESILDVFKKALEHEKTVTQRIHKLVDLAIEERDHATNAFLQWFVNEQVEEEESFQKIINKLELIGDSMQPIFMLDSELAKRTFVLPAPLAKSE

SEQ ID NO: 4963 - protein, 223 aa, Liolophura japonica
MKVLLVLAFVGLAFVAAEDKRLTCTAFSDSLIEKMNDQINLELHASYLYHGYARYFDRDDVALSGFADFFKHASSEEKDHADKLMEYMNTRGCRFLLKDITYKDVCDKINEKKPAELSSACICEFTAAATGGDPSSCSANRPEWFNGKQAMENALTIEHHVNDELLKLHRSTNDPHFEKFLEDNYLDEQVNAIKELSDYITILKRTGDGLGEYLFDKDLDSKY

SEQ ID NO: 4964 - protein, 250 aa, Malus xiaojinensis
MALAPSKVSTFSGFSPKPSVGGAQKNPTCSVSLSFLNEKLGSRNLRVCASTVPLTGVIFEPFEEVKKSELAVPTAPQVSLARQNYADECESAINEQINVEYNASYVYHSLFAYFDRDNVALKGFAKFFKESSEEEREHAEKLMKYQNTRGGRVVLHAIKNVPSEFEHVEKGDALYAMELALSLEKLVNEKLLNVHSVADRNNDPQMADFIESEFLSEQVESIKKISEYVAQLRRVGKGHGVWHFDQRLLD

SEQ ID NO: 4965 - protein, 142 aa, Clostridium sordellii
AYFVENNLDGFANFFNVQVKEERDHAYKFFNYISRAGGKIVLQAIEKPKSDFESPLDVFEAALEHEKIISNSIHELVDLAISEKDHTTSSFLRWFVDEQSEEEENMEKVVRKLRLLKNDPAGLLIIDQELAQRAYVPPVQNA

SEQ ID NO: 4966 - protein, 134 aa, Branchiostoma belcheri tsingtaunese
MAVSQVRQNFHEDSEAGINKQINLELYASYVYHSMATYFDRDDVALKGFAKFFRHQSDEEREHAEKLMKYQNMRGGRVVLQHIQKPDHDEWGTGLDAMQAALALEKSVNQSLLDLHKTADTCSDPRRSPTTSPT

SEQ ID NO: 4967 - protein, 212 aa, Apriona germari
MKFFAFAVFVVCSIAFVSAEIECRGENVNVPTDWLDMQQFCVSSVRNQIEEELKAAMQYMAMGAHFSKDIVNRPGFAKMFFEAASEERQHAIKLISYLLMRGELTSKVSELIRSRKLVPQKTYWDSGVEALKDALNLEASVTKKIRKVIKNCEEDSFNDYHIVDYLTGDFLTEQYQGQRDIAGKVSTLEKLKVKHGALGEFLFDKKLLNGEL

SEQ ID NO: 4968 - protein, 166 aa, Staphylococcus aureus subsp. aureus Mu50
MLSKNLLEALNDQMNHEYFAAHAYMAMAAYCDKESYEGFANFFIQQAKEERFHGQKIYNYINDRGAHAEFRAVSAPKIDFSSILETFKDSLSQEQEVTRRFYNLSEIARQDKDYATISFLNWFLDEQVEEESMFETHINYLTRIGDDSNALYLYEKELGARTFDEE

SEQ ID NO: 4969 - protein, 166 aa, Staphylococcus epidermidis ATCC 12228
MLSKELLAALNEQMNQEYFAAHAYMAMAAYCDKESYDGFANFYIEQAKEERFHGKKIYDYINDRGEHAIFDTIKAPKVEFSSILETFKDSLAQERDVTQRFYNLSELARNDKDYATISFLNWFLDEQVEEESTFETHIDYLTRIGDDCNTLYLYEKELAARSFNEQ

SEQ ID NO: 4970 - protein, 168 aa, Anopheles gambiae str. PEST
MISTKVESLINEQIAKEQYAAQYYLAMSAWFETQDLEGLANYFRVQSKEELMHADKMFDYLNDVGGKVILQTIPAPPSEFADALNIFEKALAHEKEVTKSIFNIVKVATEENDFATTSFLQWFINEQVEEEATASQYVSKIKMVKDNPSALYLFDQELGQRVFNADAE

SEQ ID NO: 4971 - protein, 217 aa, Anopheles gambiae str. PEST
EMMKSIFFGIVALMFAAVVMQQDQASAQVTDTDAPSSTDEWNYMNRSCSAKLQDQINKEFDAAIFYMQYGAYFAQYQVNLPGFEKFFFNAASEEREHGMKLIEYALMRGQKPIDRNTFSLNFANPAARVDAEQGSVALTALKAALAKEQEVTKSIRELIKICEEDHNDYHLVDYLTGEFLEEQHQGQRDLAGKITMLSKLLRTNPKLGEFMFDKQNM

SEQ ID NO: 4972 - protein, 172 aa, Araneus ventricosus
MSKGSQIRQNYHEESEAGVNKQINMELYASYVYAAMAFHFDRDDVALPNISQFFKENSDEEKEHANKLMKFQNQRGGTIVLKDIKAPPKAKWGSPLEAFQDALELEKTVNQALLDLHKVASSHDDAQMCDFLESEYLTEQVEAIKKLGDYVTNLKRVGSGLGEFIFDKEFKS

SEQ ID NO: 4973 - protein, 174 aa, Pyrococcus furiosus DSM 3638
MLSERMLKALNDQLNRELYSAYLYFAMAAYFEDLGLEGFANWMKAQAEEEIGHALRFYNYIYDRNGRVELDEIPKPPKEWESPLKAFEAAYEHEKFISKSIYELAALAEEEKDYSTRAFLEWFINEQVEEEASVKKILDKLKFAKDSPQILFMLDKELSARAPKLPGLLMQGGE

SEQ ID NO: 4974 - protein, 206 aa, Yersinia pestis KIM
MFFINNNVNRASLFCFYLGIIHQVNYFLPISKSKGIIMLKKEMAQKLNEQLNLEFYSANLYLQMSAWCSDKGFEGAAAFLKKHSQEEMQHMERLFEYLSGTGSMPVLGTITAPPVDFASLADVFKLTYEHEQLITTQINELAHVAMTTHDYSTFNFLQWYVAEQHEEEKLFKSILDKLALVGNSGNSLFFVDKDLKTMAAQGYTSA

SEQ ID NO: 4975 - protein, 171 aa, Methanothermobacter thermautotrophicus str. Delta H
MVSERMQEALNRQLNAELYSAYLYLSMAAYYEASDLPGFANWMRVQAQEELSHAMKFYDYLVQRGARVVLDEIEKPPFEWESPLEVAKHVLEHEKKVTGLINDLVDLAISERDHATNNFLQWFVAEQVEEEESAGSLLQRVRLASDSPSGLLMLDAELAKRVYNPPADKGE

SEQ ID NO: 4976 - protein, 167 aa, Methanosarcina acetivorans C2A
MLNEKMEEALNEQINKELYSSYLYLSMAAYSSSIGLPGFAHWFKVQVKEETIHGMKIFDYVNEGGRARLKEIKEPPMEFGTPMEMFQKTLQHEQFITRSINDLVELAHSEKDEATASFLQWYVEEQVEEEENDNEIIDKLKIVGENKDALSTLDAELAKRLPPDDEE

SEQ ID NO: 4977 - protein, 168 aa, Bacillus anthracis str. A2012
MLSKKLHDALNDQMNFEFYSAHAYMAMAAYCTAESYDGFANFFLVQAEEERFHAMKLYNYINDRGERAIITGFDNPNNEYESVLNAFEVALEHEREVTKRIYNLSDIAWDEREHATITFLKWFVDEQVEEEASFDSIIQKLKRITSDSNALFMLDAELEKRTFTPPAE

SEQ ID NO: 4978 - protein, 170 aa, Clostridium perfringens str. 13
MLSENLLQRLNEQVNFEFYSSYTYLAMAAYAESVDLSGFANFFRVQAQEELFHAMKFYDYIFQKNGVVELEQIDKPKFNFANIIEAFEKGYEHEQLVTSKIYGLADVAFEEKEHATMSLLKWFIDEQVEEENNFHSLLKKVRRSDGNPAALYMMDDELAARVFTPPTTTK

SEQ ID NO: 4979 - protein, 172 aa, Clostridium thermocellum ATCC 27405
MKDTNKGYREDEKMSKLYDNLNEQMNFELESAYIYATMSAYLDSLNMKGMTHFFDEQVKEEMEHAGKIKKFLQDTGYGIKYRPLNPGDGKFDSIEDVFKKALAHEKTVTSRINDLVKQAREEGDQRVLNLLAWFVDEQIEEENMFGVLVERLERINGHWNGLYILDKELGER

SEQ ID NO: 4980 - protein, 178 aa, Shewanella oneidensis MR-1
MLSATMIEKLNEQINMEFFSSNLYLQMSAWCEDQGFEGAAKFMREHADEEMGHMRRLFTYVSETGGLPLLGAIEAPQSQFNSLLALFELTYEHEQLITRQINALAHTAFSNQDYSTFNFLQWYVAEQHEEEKLFKSIVDKIRLVGEDGKALFFIDKDLAKLASKGGESIMNAQSQPQA

SEQ ID NO: 4981 - protein, 169 aa, Clostridium tetani E88
MISEKLNKAINDQINFEMESENIYLAMRAYCKSIDLDGFANFFDAQVKEERFHCMKFFDYVNQVGGRVEIGAIKGPKNDFDSLVDVFEAAYAHEQIVTKKIYALMDLAMDERDHATISFLKWFIDEQVEEEDTFSTLVSRLERVKDNPTAIYMLDKELEQRVFTAPVVE

SEQ ID NO: 4982 - protein, 169 aa, Yersinia pestis CO92
MLKKEMAQKLNEQLNLEFYSANLYLQMSAWCSDKGFEGAAAFLKKHSQEEMQHMERLFEYLSGTGSMPVLGTITAPPVDFASLADVFKLTYEHEQLITTQINELAHVAMTTHDYSTFNFLQWYVAEQHEEEKLFKSILDKLALVGNSGNSLFFVDKDLKTMAAQGYTSA

SEQ ID NO: 4983 - protein, 164 aa, Methanosarcina barkeri
MLSEKMEEALNEQINKEMYSSYLYLAMSAYSSSVGLSGFAHWFRVQVEEENIHAMKLFDYVNNQGGKVKLKEIKEPPMGFGTAMDMFQQTLKHEQFITRSIHELVELANAEKDKATASFLQWYVEEQVEEEENDNEVIAKLRGVDKNEYVISSVDQELAKRSPP

SEQ ID NO: 4984 - protein, 173 aa, Archaeoglobus fulgidus DSM 4304
MASISEKMVEALNRQINAEIYSAYLYLSMASYFDSIGLKGFSNWMRVQWQEELMHAMKMFDFVSERGGRVKLYAVEEPPSEWDSPLAAFEHVYEHEVNVTKRIHELVEMAMQEKDFATYNFLQWYVAEQVEEEASALDIVEKLRLIGEDKRALLFLDKELSLRQFTPPAEEEK

SEQ ID NO: 4985 - protein, 168 aa, Bacillus cereus ATCC 14579
MLSKKLHDALNEQMNFEFYSAHAYMAMAAYCTAESYDGFANFFLVQAEEERFHAMKLYNYINDRGERAIITGFDNPNNEYESVLNAFEVALEHEREVTKRIYNLSDIAWDEREHATITFLKWFVDEQVEEEASFDSIIQKLKRITSDSNALFMLDAELEKRTFTPPAE

SEQ ID NO: 4986 - protein, 164 aa, Thermotoga maritima
MMVISEKVRKALNDQLNREIYSSYLYLSMATYFDAEGFKGFAHWMKKQAQEELTHAMKFYEYIYERGGRVELEAIEKPPSNWNGIKDAFEAALKHEEFVTQSIYNILELASEEKDHATVSFLKWFVDEQVEEEDQVREILDLLEKANGQMSVIFQLDRYLGQRE

SEQ ID NO: 4987 - protein, 249 aa, Chlamydomonas reinhardtii
MALCARVFGAPAKLAKQQVITPRRTSAPRAVARHATVDKITGIVVQPAVQFSEVQSELATVDKTNQNIQSLARVDFHPACEAAINEQVNIEYNVSYLYHALWAYFDRDNVALPGLAAFFKAGSEEEREHAELLMEYQNRRGGRVVLGAISMPDLDLSASEKGDALYAMELALSLEKLNFQKLRQLHSVADEHGDASMADFVEGELLNEQVEAVKKVSEYVSQLRRVGQGLGVYQFDKQLAAEVAAGAAA

SEQ ID NO: 4988 - protein, 256 aa, Auxenochlorella protothecoides
MSTIATPRVMLARPTTSHTRAPRRAVIRAAGGKDKTEAITGVVFQPFEEVAPVLKDTSKSGALNDPRPEHSFARYSTWTETVEAAVNEQINVEYNISYVYHAISTYFDRDNVSLHGIAEYFRNESEEEKSHAQYLIDLQNTRGGRVKFNALVPPEANYDHPEKGDALYAFELALALEKLNYSKLLGLWEVADKNFRTRRPPSSFEDMLHEQVKDIKQVSDYVAQLRRIGKGHAVWHWDRALAEGKVDHRAVESPKA

SEQ ID NO: 4989 - protein, 132 aa, Pinus taeda
ASDEERGHAEKLMKYQNIRGGKVKLQSILLPAVMEFDNAEKGDALYAMELTLSLEKLTNQKLLNLHAVAQEANDGQDDGFHRGRFSHRQVEAIKKYQICVSVRGLEGHAVWHFDQMLLNGDNVADAGALAAA

SEQ ID NO: 4990 - protein, 253 aa, Paragonimus westermani
MVRKNSRILVPFSSFTDFLACTVKPCSEVFTWMSSGPYPSCNMHSARINYTPETEHAVNKAIQLHQQAVLTYDHLAATCATEEISMPGFCKFFRLCSQRHRELVEHWINFQTMRGGKLNVPEVKPLVQVNDLSKTDLEKIVVIALKTEKTVEQYLRELHKIARSKEDVAMSEYIEKKLILPQLHVIKMMVNHVNGLRVSGNEYLYDRTTMLPLAKKLHCEIIRREGSEYCEETREKKFHPHTSTGVAAFIYPF

SEQ ID NO: 4991 - protein, 253 aa, Arabidopsis thaliana
MLLKASPALSLLSSGSTGGGNLFPPSRNSSNRLFSPSGSKFSVQAAKGTNTKSLTGVVFEPFEEVKKELDLVPTTPFVSLARHKFSDDAESAINDQINVEYNVSYVYHALYAYFDRDNVGLKGFAKFFNDSSLEERGHAEMFMEYQNKRGGRVKLQSILMPVSEFDHEEKGDALHAMELALSLEKLTNEKLLKLQSVGVKNNDVQLVDFVESEFLGEQVEAIKKISEYVAQLRRIGKGHGVWHFDQMLLNDEV

SEQ ID NO: 4992 - protein, 259 aa, Arabidopsis thaliana
MLLKTVSSSSSSALSLVNFHGVKKDVSPLLPSISSNLRVSSGKSGNLTFSFRASKSSTTDALSGVVFEPFKEVKKELDLVPTSSHLSLARQKYSDECEAAINEQINVEYNVSYVYHAMYAYFDRDNIALKGLAKFFKESSLEEREHAEKLMEYQNKRGGRVKLQSIVMPLSEFEHVDKGDALYGMELALSLEKLVNEKLLNLHSVASKNNDVHLADFIESEFLTEQVEAIKLISEYVAQLRRVGKGHGTWHFNQMLLEG

SEQ ID NO: 4993 - protein, 253 aa, Arabidopsis thaliana
MLHKASPALSLLSSGYTGGGNLFPPSRNSSNLLFSPSGSRFSVQAAKGTNTKSLTGVVFEPFEEVKKEMELVPTTPFVSLARHKFSDDSESAINDQINVEYNVSYVYHALYAYFDRDNVGLKGFAKFFNDSSLEERGHAEMFMEYQNKRGGRVKLQSILMPVSEFDHEEKGDALHAMELALSLEKLTNEKLLKLQSVGVKNNDVQLVDFVESEFLGEQVEAIKKISEYVAQLRRIGKGHGVWHFDQMLLNDEV

SEQ ID NO: 4994 - protein, 259 aa, Arabidopsis thaliana
MLLKAASTFSLLNIHGEKKDISPLFSSSSSISSPVSSGKSGNLSFPLRASKSSTTTTSTLSGVVFEPFEEVKKEMDLVPSGQQLSLARHLYSPECEAAVNEQINVEYNVSYVYHALYAYFDRDNVALKGLAKFFKESSVEEREHAELLMEYQNKRGGRVKLQPMVLPQSEFDHPEKGDALYAMELALSLEKLVNEKLLNLHSVASKNDDVQLADFIESVFLNEQVEAIKKISEYVSQLRRLGKGHGTWHFDQELLGAAA

SEQ ID NO: 4995 - protein, 255 aa, Arabidopsis thaliana
MASNALSSFTAANPALSPKPLLPHGSASPSVSLGFSRKVGGGRAVVVAAATVDTNNMPMTGVVFQPFEEVKKADLAIPITSHASLARQRFADASEAVINEQINVEYNVSYVYHSMYAYFDRDNVAMKGLAKFFKESSEEERGHAEKFMEYQNQRGGRVKLHPIVSPISEFEHAEKGDALYAMELALSLEKLTNEKLLNVHKVASENNDPQLADFVESEFLGEQIEAIKKISDYITQLRMIGKGHGVWHFDQMLLN

SEQ ID NO: 4996 - protein, 255 aa, Arabidopsis thaliana
MASNALSSFTAANPALSPKPLLPHGSASPSVSLGFSRKVGGSRAVVVAAATVDTNNMPMTGVVFQPLEEVKKADLAIPITSHASLARQRFADASEAVINEQINVEYNVSYVYHSMYAYFDRDNVAMKGLAKFFKESSEEERGHAEKFMEYQNQRGGRVKLHPIVSPISEFEHAEKGDALYAMELALSLEKLTNEKLLNVHKVASENNDPQLADFVESEFLGEQIEAIKKISDYITQLRMIGKGHGVWHFDQMLLN

SEQ ID NO: 4997 - protein, 160 aa, Arabidopsis thaliana
MSRSMLSITCRMCITLCMHISIVTTLPSRVSPSFFKESSVEEREHAELLMEYQNKRGGRVKLQPMVLPQSEFDHPEKGDALYAMELALSLEKLVNEKLLNLHSVASKNDDVQLADFIESVFLNEQVEAIKKISEYVSQLRRLGKGHGTWHFDQELLGAAA

SEQ ID NO: 4998 - protein, 217 aa, Arabidopsis thaliana
MELVPGYSGSKSLRVKLEWRQKDLEDSAFPRYNVYAENVKSTDLRPRKVLEKPRSETVFLGVAHVPSYYIAELVVESDVKGVRFVFKPVLKMLRFTYHGGAGRNRNCHFLLSMILLVGIDVEYNVSYVYHALDAYIERDNVGLKGFNANRFFNDSSLEERGYAEKFMEYQMHCLVGVKNNDVKLVDFVESEFLGELVEAIKKISEYIDGTKIRSMQW

SEQ ID NO: 4999 - protein, 254 aa, Brassica napus
MASKALSSFTAKPAVSLLPHGVSSSASPSVMSLSFSRHTGGRGVVAASSTVDTNNMPMTGVVFQPFEEVKKADLAIPITSNASLARQRYADSSEAAINEQINVEYNVSYVYHSMYAYFDRDNVALKGLAKFFKESSDEEREHAEKFMEYQNQRGGRVTLHPIVSPISDFEHAEKGDALYAMELALSLEKLTNEKLLNLHRVASENNDPQLADFVESEFLGEQIEAIKKISDFITQLRMVGKGHGVWHFDQMLLN

SEQ ID NO: 5000 - protein, 256 aa, Glycine max
MLLRTASSFSLLKANADHILPLPNSSSSGIIRYSQSLGKNLVPCATKDTNNRPLTGVVFEPFEEVKKELDLVPTVPQASLARQKYTDDCEATINEQINVEYNVSYVYHAMFAYFDRDNVALKGLAKFFKESSEEEREHAEKLMEYQNKRGGKVKLQSIVMPLTEFDHEEKGDALYAMELALSLEKLTNEKLLNLHSVASKNNDVQLADFIESEFLGEQVEAIKKISEYVAQLRRVGKGHGVWHFDQMLLHEEGVAA

SEQ ID NO: 5001 - protein, 256 aa, Glycine max
MLLRTASSFSLLKANADHILPLPNSSSSGIIRYSQSLGKNLVPCATKDTNNRPLTGVVFEPFEEVKKELDLVPTVPQASLARQKYTDDCEATINEQINVEYNVSYVYHAMFAYFDRDNVALKGLAKFFKESSEEEREHAEKLMEYQNKRGGKVKLQSIVMPLSEFDHEEKGDALYAMELALSLEKLTNEKLLNLHSVASKNNDVQLADFIESEFLGEQVEAIKKISEYVAQLRRVGKGHGVWHFDQMLLHEEGVAA

SEQ ID NO: 5002 - protein, 256 aa, Glycine max
  unsure (1)..(256): unsure at all Xaa locations
MLLRTASSFSLLKANADHILPLPNSSSSGIIRYSQSLGKNLVPCATKDTNNRPLTGVVFEPFEEVKKELDLVPTVPQASLARQKYTDDCEATINEQINVEYNVSYVYHAMFAYFDRDNVALKGLAKFFKESSEEEREHAEKLMEYQNKRGGKVKLQSIVMPLSEFDHEEKGDALYAMELALSLEKLTNEKLLNLHSVASKNNDVQLAXFIESEFLGEQVEAIKKISEYVAQLRRVGKGHGVWHFDQMLLHEEGVAA

SEQ ID NO: 5003 - protein, 249 aa, Glycine max
MLLRTAASAASASSLSLFSPTSEPLRSVPARGLVVRAAKGSTNHRALTGVIFEPFEEVKKELDLVPTVPQASLARQKYVDESEAAVNEQINVEYNVSYVYHAMFAYFDRDNVALRGLAKFFKESSEEEREHAEKLMEYQNKRGGRVKLQSIVMPLSEFDHADKGDALHAMELALSLEKLTNEKLLNLHSVATKNGDVQLADFVETEYLGEQVEAIKRISEYVAQLRRVGKGHGVWHFDQILLHEGGDAA

SEQ ID NO: 5004 - protein, 248 aa, Glycine max
MLLRTASSFSLFNANGDHILLPSSVRYSQGKHLVPCATKNSNNRPLTGVVFEPFEEVKKELDLVPTVPQASLARQKYTDESEATINEQINVEYNVSYVYHAMFAYFDRDNVALKGLAKFFKESSEEEREHAEKLMEYQNKRGGKVKLQSIVMPLTEFDHEEKGDALYAMELALSLEKLTNEKLLNLHSVASKNNDVQLADFIESEFLGEQVEAIKKISEYVAQLRRVGKGHGVWHFDQMLLHEEGVAA

SEQ ID NO: 5005 - protein, 248 aa, Glycine max; identical to SEQ ID NO: 5004

SEQ ID NO: 5006 - protein, 247 aa, Glycine max
MLLRTAAASASSLSLFSPNAEPPRSVPARGLVVRAAKGSTNHRALTGVIFEPFEEVKKELDLVPTVPQASLARQKYVDESESAVNEQINVEYNVSYVYHAMFAYFDRDNVALRGLAKFFKESSEEEREHAEKLMEYQNKRGGKVKLQSIVMPLSDFDHADKGDALHAMELALSLEKLTNEKLLNLHSVATKNGDVQLADFVETEYLGEQVEAIKRISEYVAQLRRVGKGHGVWHFDQMLLHEGGDAA

SEQ ID NO: 5007 - protein, 247 aa, Glycine max
MLLRTAAASASSLSLFSPNAEPPRSVPARGLVVRAAKGSTNHRALTGVIFEPFEEVKKELDLVPTVPQASLARQKYVDESESAVNEQINVEYNVSYVYHAMFAYFDRDNVALRGLAKFFKESSEEEREHAEKLMEYQNKRGGKVKLQSIVMPLSDFDHADKGDALHAMELALSLEKLTNEKLLNLHSVATKNGDVQLADFVETEYLGEQVEAIKRISEYVAQLRKSWQGHGVWHFDQMLLHEGGDAA

SEQ ID NO: 5008 - protein, 250 aa, Glycine max
MALAPSKVSSFSGFSPKPSVGDALKNPTCSVSLSFANVKLGSRNLRVCASTVPLSGVIFEPFEEVKKGELAVPTAPQVSLARQNYADECESAINEQIKVEYNASYAYHSLFAYFDRDNVALKGFAKFFKESSEEEREHAEKLMKYQNTRGGRVVLHAIKNVPSEFEHVEKGDALYAMELALSLEKLVNEKLLNVHSVADRNNDPQLADFIESEFLSEQVESIKKISEYVAQLRRVGKGHGVWHFDQRLLD

SEQ ID NO: 5009 - protein, 250 aa, Glycine max
MALAPSKVSTFSGFSPKPSVGGAQKNPTCSVSLSFLNEKLGSRNLRVCASTVPLTGVIFEPFEEVKKSELAVPTAPQVSLARQNYADECESAINEQINVEYNASYVYHSLFAYFDRDNVALKGFAKFFKESSEEEREHAEKLMKYQNTRGGRVVLHPIKNAPSEFEHVEKGDALYAMELALSLEKLVNEKLLNVHSVADRNNDPQMADFIESEFLSEQVESIKKISEYVAQLRRVGKGHGVWHFDQRLLD

SEQ ID NO: 5010 - protein, 250 aa, Glycine max
MALAPSKVSTFSGFSPKPSVGGAQKNPTCSVSLSFLNEKLGSRNLRVCASTVPLTGVIFEPFEEVKKSELAVPTAPQVSLARQNYADECESAINEQINVEYNASYVYHSLFAYFDRDNVALKGFAKFFKESSEEEREHAEKLMKYQNTRGGRVVLHPIKNVPSEFEHVEKGDALYAMELALSLEKLVNEKLLNVHSVADRNNDPQMADFIESEFLSEQVESIKKISEYVAQLRRVGKGHGVWHFDQRLLD

SEQ ID NO: 5011 - protein, 250 aa, Glycine max
GALAPSKVSTFSGFSPKPSVGGAQKNPTCSVSLSFLNEKLGSRNLRVCASTVPLTGVIFEPFEEVKKSELAVPTAPQVSLARQNYADECESAINEQINVEYNASYVYHSLFAYFDRDNVALKGFAKFFKESSEEEREHAEKLMKYQNTRGGRVVLHPIKNVPSEFEHVEKGDALYAMELALSLEKLVNEKLLNVHSVADRNNDPQMADFIESEFLSEQVESIKKISEYVAQLRRVGKGHGVWHFDQRLLD

SEQ ID NO: 5012 - protein, 256 aa, Glycine max
  unsure (1)..(256): unsure at all Xaa locations
MALAPSKVSSXFSGFSPKPSVGDALKNPTCSVSLSXFANVKLGSRNXLRVCASTVPLSGVIFEPFEEVKKGELAVPTAPQVSLARQNYADECESAINEQINVEYNASYAYHSLFAYFDRDNVALKGFAXKFFKESSEEEREHAEKXLMKYQNTRGGRVVLHAIKNVPSEFEHVEKGDALYAMELALSLEKLVNEKLLNVHSVXADRNNDPQLADFIESEFLSEQVESIKKISEYVAQLRRVGKGHGVWHFDQRLLD

SEQ ID NO: 5013 - protein, 257 aa, Glycine max
  unsure (1)..(257): unsure at all Xaa locations
MALSCSKVLSFYLSPVVGGGDVPKKLTFSSFLGLSKGVGGSRSSRVCAASNAPAPLAGVIFEPFQELKKDYLAVPIAHNVSLARQNYADDSESAINEQINVEYNVSYVYHALFAYFDRDNIALKGLAKFFKESSEEEREHAEQLIKYQNIRGGRVVLHPITSPPSEFEHSEKGDALYAMELALSLEKLTNEKLLHVHSVAERNNDPQXADFIESEFLYEQVKSIKKIAEYVAQLRLVGKGHGVWHFDQKLLHDEDHV

SEQ ID NO: 5014 - protein, 254 aa, Glycine max
  unsure (1)..(254): unsure at all Xaa locations
MALAPSKVSTFSGFSPKPSVGGAQKNPTCSVSLSFLNEKLGSRNLRVCASTVPLTGVIFXNPFEEVKKSEXLAVPTAPQVSLXARQNYADECESAINEQIXNVEYNASYVYHSLFAYFDRDNVALKGFAKFFKESSEEEREHAEKLMKYQNTRGGRVVLHPIKNVPSEFEHVEKGDALYAMELALSLEKLVNEKLLNVHSVADRNNDPQMADFIESEFLSEQVESIKKISEYVAQLRRVGKGHGVWHFDQRLLD

SEQ ID NO: 5015 - protein, 257 aa, Glycine max
  unsure (1)..(257): unsure at all Xaa locations
MALSCSKVLSFYLSPVVGGGDVPKKLTFSSFLGLSKGVGGSRSSRVCAASNAPAPLAGVIFEPFQELKKDYLAVPIAHNVXLARQNYADDSESAINEQINVEYNVSYVYHALFAYFDRDNIALKGLAKFFKESSEEEREHAEQLIKYQNIRGGRVVLHPITSPPSEFEHSEKGDALYAMELALSLEKLTNEKLLHVHSVAERNNDPQXADFIESEFLYEQVKSIKKIAEYVAQLRLVGKGHGVWHFDQKLLHDEDHV

SEQ ID NO: 5016 - protein, 249 aa, Glycine max
MALAPSKVSSFSGFSPKPSVGDALKNPTCSVSLSFANVKLGSRNLRVCASTVPLSGVIFEPFEEVKKGELAVPTAPQVSLARQNYADECESAINEQINVEYNASYAYHSLFAYFDRDNVALKGIWQSSSKDEEEREHAEKLMKYQNTRGGRVVLHAIKNVPSEFEHVEKGDALYAMELALSLEKLVNEKLLNVHSVADRNNDPQMADFIESEFLSEQVESIKKISEYVAQLRRVGKGHGVWHFDQRLLD

SEQ ID NO: 5017 - protein, 249 aa, Glycine max; identical to SEQ ID NO: 5016

SEQ ID NO: 5018 - protein, 233 aa, Glycine max
  unsure (1)..(233): unsure at all Xaa locations
MALAPSKVSTFSGFSPKPSVGGAQKNPTCSVSLSFLNEKLGSRNLRVCASTVPLTGVIFEPFEEVKKSELAVPTAPQVSLARQNYADECESAINEQIXXDNVALKGFAKFFKESSEEEREHAEKLMKYQNTRGGRVVLXPIKNVPSEFEHVEKGDALYAMELALSLEKLVNEKLXNVXSVADXNNDPQMADFIESEFLXEQVESIKKISEYVAQXRRVGKGXGVWXFDQRLXD

SEQ ID NO: 5019 - protein, 189 aa, Glycine max
GALAPSKVSTFSGFSPKPSVGGAQKNPTCSVSLSFLNEKLGSRNLRVCASTVPLTGVIFEPFEEVKKSELAVPTAPQVSLARQNYADECESAINEQINVEYNASYVYHSLFAYFDRDNVALKGFAKFFKESSEEEREHAEKLMKYQNTRGGRVVLHPIKNVPSEFEHVEKGDALYAMELALSLEKLVNE

SEQ ID NO: 5020 - protein, 128 aa, Glycine max
KESSEEEREHAEKLMEYQNKRGGKVKLQSIVMPLTEFDHEEKGDALYAMELALSLEKLTNEKLLNLHSVASKNNDVQLADFIESEFLGEQVEAIKKISEYVAQLRRVGKGHGVWHFDQMLLHEEGVAA

SEQ ID NO: 5021 - protein, 151 aa, Glycine max
  unsure (1)..(151): unsure at all Xaa locations
STAQTKSHSHNFRNSKRAAAAAVGQLSGAGLTAGSVRLPVPSAAGSAVCCRAAAKGKEVLSGVMFQPFEELKGELSLVPQGKDQSLARHKFVDECEAALNEQINVEYNASYAYHSLFAYFDRDNVALKGFAKFFKESSDEERGHAEKLMEX

SEQ ID NO: 5022 - protein, 175 aa, Glycine max
MLLRTASSFSLFNANGDHILLPSSVRSSQGKHLVPCASKDTNDRPLTGVVFEPFQDVKKELHLVPTVPHASLARQRYTDDCEAAMNEQINVEYNVSYVYHAMFAYFDRDNVALKGLAKFFKESSEEDRKHAEKLMGYHVTRGVEVKWLCMVKPFAECDHEENGDALDAMEPSFGL

SEQ ID NO: 5023 - protein, 250 aa, Medicago sativa
MALSASKVSIFSPSPIVGHFSKNTTFSSLNLPMDGDKRKNVKVHAAAANAPTALTGVIFEPFEEVKKDVLAVPIAHNVSLARQNYQDEVESAINEQINVEYNVSYVYHSLFAYFDRDNVALKGLAKFFKESSEEEREHAEKLMKYQNIRGGRVVLHPIVSPPSEFDHAEKGDALYAMELALSLEKLVNEKLLNVHSVADRNNDPQLANFIESEFLVEQVESIKKISEYVTQLRLVGKGHGVWHFDQTLLH

SEQ ID NO: 5024 - protein, 254 aa, Phaseolus vulgaris
MALAPSKVSPFSGFSLSDGVGAVRNPTCSVSLSFLNKKVGSRNLGVSASTVPLTGVIFEPFEEVKKEELAVPTAGQVSLARQYYADECESAINEQINVEYNASYVYHSLFAYFDRDNVALKGFARFFKESSEEEREHAEKLMKYQNTRGGRVVLHPIKNVPSEFEHVEKGDALYAMELALSLEKLVNEKLRSVHSVADRNKDPQLADFIESEFLSEQVEAIKKISEYVAQLRMVGKGHGVWHFDQSLLHDGHAA

SEQ ID NO: 5025 - protein, 254 aa, Phaseolus vulgaris
  unsure (1)..(254): unsure at all Xaa locations
MALAPSKVSPFSGFSLSDGVGAVRNPTCSVSLSFLNKKVGSRNLGVSASTVPLTGVIFEPFEEVKKEELXVPTAGQVSLARQYYADECESAINEQINVEYNASYVYHSLFAYFDRDNVALKGFARXFKESSEEEREHAEKLMKYQNTRGGRVVLHPIKNVPSEFEHVEKGDALYAMELALSLEKLVNEKLRSVHSVADRNKDPQLADFIESEFLSEQVEAIKKISEYVAQLRMVGKGHGVWHFDQSLLHDGHAA

SEQ ID NO: 5026 - protein, 206 aa, Pisum sativum
TTAPLTGVIFEPFEEVKKDYLAVPSVPLVSLARQNFADECESVINEQINVEYNASYVYHSLFAYFDRDNVALKGFAKFFKESSEEHREHAEKLMKYQNTRGGRVVLHPIKDVPSEFEHVEKGDALYAMELALSLEKLTNEKLLNVHSVAERNNDLEMTHFIEGEYLAEQVEAIKKISEYVAQLRRVGKGHGVWHFDQRLLHGVHGA

SEQ ID NO: 5027 - protein, 253 aa, Pisum sativum
MALSSSKFSSFSGFSLSPVSGNGVQKPCFCDLRVGEKWGSRKFRVSATTAPLTGVIFEPFEEVKKDYLAVPSVPLVSLARQNFADECESVINEQINVEYNASYVYHSLFAYFDRDNVALKGFAKFFKESSEEHREHAEKLMKYQNTRGGRVVLHPIKDVPSEFEHVEKGDALYAMELALSLEKLTNEKLLNVHSVAERNNDLEMTHFIEGEYLAEQVEAIKKISEYVAQLRRVGKGHGVWHFDQRLLHGVHGA

SEQ ID NO: 5028 - protein, 253 aa, Pisum sativum
MALSSSKFSSFSGFSLSPVSGNGVQKPCFCDLRVGEKWGSRKFRVCATTAPLTGVIFEPFEEVKKDYLAVPSVPLVSLARQNFADECESVINEQINVEYNVSYVYHSMFAYFDRDNVALKGFAKFFKESSEEEREHAEKLMKYQNTRGGRVVLHPIKDVPSEFEHVEKGDALHAMELALSLEKLTNEKLLNVHSVAERNNDLEMTHFIEGEYLAEQVEAIKKISEYVAQLRRVGKGHGVWHFDQRLLHGVHGA

SEQ ID NO: 5029 - protein, 250 aa, Vigna unguiculata
MLLRTAAASSLSLFNPNAEPSRSVPVLANNASRLVVRAAKGSTNHRALTGVIFEPFEEVKKELDLVPTVPQASLARQKYVDESEAAVNEQINVEYNVSYVYHALFAYFDRDNVALRGLAKFFKESSEEEREHAEKLMEYQNRRGGKVKLQSIVMPLSEFDHADKGDALHAMELALSLEKLTNEKLLHLHSVATKNGDVQLADFVESEFLGEQVESIKRISEYVAQLRRVGKGHGVWHFDQMLLHEGGHLA

SEQ ID NO: 5030 - protein, 256 aa, Vigna unguiculata
MALSCSKVLTFSLSSVVGGDDAKKKLSLCSSSSLSASVNGGGSRNMRVCAAASNAPAPLTGVIFEPFQELKKDYLAVPIAPNVSLSRQNYSDEAEAAINEQINVEYNVSYVYHSLFAYFDRDNIALKGLAKFFKESSEEEREHAEKLIKYQNIRGGRVVLHPITSPPSEFEHPEKGDALYAMELALSLEKLTNEKLLYVHSVADRNNDAQLADFIESEFLNEQVESIKKIAEYVTQLRLVGKGHGVWHFDQRLLHD

SEQ ID NO: 5031 - protein, 71 aa, Vigna unguiculata
FEPFEEVKKEELAVPTAPQVSLARQYYADECESAINEQINVEYNASYVYHSLFAYFDRDNVALKGFAKFFK

SEQ ID NO: 5032 - protein, 72 aa, Vigna unguiculata
FEPFEEVKKEELNVPTAPQVSLARQYYADECESAINEQINVEYNASYVYHSLFAYFDRDNVRLKGFAKFFKE

SEQ ID NO: 5033 - protein, 71 aa, Vigna unguiculata
FEPFEEVKKELDLVPTVPQASLARQKYVDESEAAVNEQINVEYNVSYVYHALFAYFDRDNVALRGLAKFFK

SEQ ID NO: 5034 - protein, 72 aa, Vigna unguiculata
FEPFEEVKKELDLVPTVPQVSLARQKYVDESEAAVNEQINVEYNVSYVYHALFAYFDRDNVRLRGLAKFFKE

SEQ ID NO: 5035 - protein, 72 aa, Vigna unguiculata
FEPFEEVKKELLVIPTELHASLARQKYTDQSEAALNAQINVEYNVSYVYHAMYAYFDRDNVRLKGLAKFFKE

SEQ ID NO: 5036 - protein, 71 aa, Vigna unguiculata
FEPFEEVKKELLVIPTELHASLARQKYTDQSEAALNAQINVEYNVSYVYHAMYAYFDRDNVALKGLAKFFK

SEQ ID NO: 5037 - protein, 251 aa, Oryza sativa (japonica cultivar-group)
MLPPRVAPAAAAAAPTYLAAAASTPASVWLPVPRGAGPGAVCRAAGKGKEVLSGVVFQPFEELKGELSLVPQAKDQSLARQKFVDECEAAINEQINVEYNASYAYHSLFAYFDRDNVALKGFAKFFKESSDEERDHAEKLIKYQNMRGGRVRLQSIVTPLTEFDHPEKGDALYAMELALALEKLVNEKLHNLHSVASRCNDPQLTDFVESEFLEEQVEAIKKISEYVAQLRRVGKGHGVWHFDQKLLEEEA

SEQ ID NO: 5038 - protein, 255 aa, Oryza sativa (japonica cultivar-group)
MLPPRVAPSSLAAAAAAAPTYLAAAASTPASVWLPVPRGAGAVAVCRAAGKGKEVLSGVVFQPFEELKGELSLVPQAKDQSLARQKFVDECEAAISEQINVEFNASYAYHSLFAYFDRDNVALKGFAKFFKESSDEERDHAEKLMKYQNMRGGRVRLQSIVTPLTEFDHPEKGDALYAMELALALEKLVNEKLHNLHSVASRCNDPQLTDFVESEFLEEQVEAIKKISEYVAQLRRVGKGHGVWHFDQKLLEEEA

SEQ ID NO: 5039 - protein, 251 aa, Nicotiana tabacum
MLLKAAPAFALLNTQGENLSPLFSSSKSFSPKNGNRFVVSASKATNHKPLTGVVFEPFEELKKELMLVPAVPDTSLCRQKYSDDCEAAINEQINVEYNNSYVYHAMFAYFDRDNVALKGLAKFFKESSLEEREHAEKLMEFQNKRGGRVKLLSICAPPTEFDHCEKGDALYAMELALCLEKLTNQRLLNLHAVASRSNDVHLADFLESEFLVEQVDAIKKISEYVAQLRRVGQGHGVWQFDQMLLNEGAAA

SEQ ID NO: 5040 - protein, 259 aa, Nicotiana tabacum
MLLKLAPAFTLLNSHGENLSPMLSTSSQGFVLKNFSTKSRNGLLVVCASKGSNTKPLTGVVFEPFEEVKKELMLVPTVPQVSLARHKYSDQCEAAVNEQINVEYNVSYVYHGMYAYFDRDNVALKGLARFFKESSEEERGHAEKLMEYQNKRGGKVKLQSILMPLSEFDHAEEGDALYAMELALSLAKLTNQKLLNLHAVATRNNDVQLADFVESKYLREQVEAIKMISEYVAQLRRVGKGHGVWHFDQMLLQEEEVVA

SEQ ID NO: 5041 - protein, 86 aa, Nicotiana tabacum
QINVEYNNSYVYHAMFAYFDRDNVALKGLAKFFKESSLEEREHAEKLMEFQNKRGGRVKLLSICAPPTEFDHCEKGDALYAMELAL

SEQ ID NO: 5042 - protein, 205 aa, Solanum tuberosum
HEATSDVSLTGVVFEPFDEVNKDEFMVPITPHTSLARQRYADECEGAINEQINVEYNISYVYHAMFAYFDRDNVALKGLAKFFKESSEEEKEHAEKLMHYQNIRGGRVKLHSIMMPPSEFDHVDKGDALYAMELALSLEKLTKEKLLTLHSVADRNNDSEMQDFVEREFLAEQVEAIKKIAEYVSQLRRVGKGHGVWHFDQMLLH

SEQ ID NO: 5043 - protein, 251 aa, Oryza sativa; identical to SEQ ID NO: 5037

SEQ ID NO: 5044 - protein, 254 aa, Oryza sativa
MLPPRVAPSSLAAAAAAPTYLAAAASTPASVWLPVPRGAGAGAVCRAAGKGKEVLSGVVFQPFEELKGELSLVPQAKDQSLARQKFVDECEAAINEQINVEFNASYAYHSLFAYFDRDNVALKGFAKFFKESSDEERDHAEKLIKYQNMRGGRVRLQSIVTPLTEFDHPEKGDALYAMELALALEKLVNEKLHNLHSVASRCNDPQLTDFVESEFLEEQVEAIKKISEYVAQLRRVGKGHGVWHFDQKLLEEEA

SEQ ID NO: 5045 - protein, 255 aa, Oryza sativa
  unsure (1)..(255): unsure at all Xaa locations
MLPPRVAPSSLAAAAAAAPTYLAAAASTPASVWLPVPRGAGAVAVCRAAGKGKEVLSGVVFQPFEELKGELSLVPQAKDQSLARQKFVDECEAAINEQINVEFNASYAYHSLFAYFDRDNVALKGFAKFFXESSDEERDHAEKLXKYQNMRGGRVRLQSIVTPLTEFDHPEKGDALYAMELALALEKLVNEKLHNLHSVASRCNDPQLTDFVESEFLEEQVEAIKKISEYVAQLRRVGKGHGVWYFDQKLLEEEA

SEQ ID NO: 5046 - protein, 255 aa, Oryza sativa
  unsure (1)..(255): unsure at all Xaa locations
MLPPRVAPSSLAAAAAAAPTYLAAAASTPASVWLPVPRGAGAVAVCRAAGKGKEVLSGVVFQPFEELKGELSLVPQAKDQSLARQKFVDECEAAINEQINVEFNASYAYHSLFAYFDRDNVALKGFAKFFXESSDEERDHAEKLXKYQNMRGGRVRLQSIVTXLTEFDHPEKGDALYAMELALALEKLVNEKLHNLHSVASRCNDPQLTDFVESEFLEEQVEAIKKISEYVAQLRRVGKGHGVWYFDQKLLEEEA

SEQ ID NO: 5047 - protein, 253 aa, Triticum aestivum
  unsure (1)..(253): unsure at all Xaa locations
MLLRIASSPAAVAAASQLSASSPAHGYARLXXPLAKVSSTACRAAGKGKKVLSGVMFQPFEELKGELSLVPQAEGQSLARQKFVDECEAAINEQINVEYNASYAYHSLYAYFDRDNVALKGFAKFFRESSDEEREHAEMLMEYQNRRGGRVRLQSIVTPLTEFDHSEKGDALYAMELALALEKLVNEKLHNLHSVATRCNDPQLSDFVESQFLXEEQVDAVNKVSKYVAQLRRVGNKGHGVWHFDQMLLQEGA

SEQ ID NO: 5048 - protein, 282 aa, Triticum aestivum
VRPPAPHKPNPAPTISGIASAPPPFGFEMLPRVAPSPATAAAAAAVGQLSGAGLTAGSVRLPVPSAAGSAVCCRAAAKGKEVLSGVMFQPFEELKGELSLVPQGKDQSLARHKFVDECEAALNEQINVEYNASYAYHSLFAYFDRDNVALKGFAKFFKESSDEERGHAEKLMEYQNKRGGRVRLQSIVTPLTEFDHPEKGDALYAMELALALEKLVNEKLHNLHSVATRCNDPQLTDFVESEFLQEQVDAIKKISEYVSQLRRVGKGHGVWHFDQMLLEEAA

SEQ ID NO: 5049 - protein, 276 aa, Triticum aestivum
PHKPNPAPTISGIASAPPPFGFEMLPRVAPSPATAAAAAVGQLSGAGLTAGSVRLPVPSAAGSAVCCRAAAKGKEVLSGVMFQPFEELKGELSLVPQGKDQSLARHKFVDECEAALNEQINVEYNASYAYHSLFAYFDRDNVALKGFAKFFKESSDEERGHAEKLMEYQNKRGGRVRLQSIVTPLTEFDHPEKGDALYAMELALALEKLVNEKLHNLHSVATRCNDPQLTDFVESEFLQEQVDAIKKISEYVSQLRRVGKGHGVWHFDQMLLEEAA

SEQ ID NO: 5050 - protein, 255 aa, Triticum aestivum
MLPRVAPSPATAAAAAAAVGQLSGAGLTAGSVRLPVPSAAGSAVCCRAAAKGKEVLSGVMFQPFEELKGELSLVPQGKDQSLARHKFVDECEAALNEQINVEYNASYAYHSLFAYFDRDNVALKGFAKFFKESSDEERGHAEKLMEYQNKRGGRVRLQSIVTPLTEFDHPEKGDALYAMELALALEKLVNEKLHNLHSVATRCNDPQLTDFVESEFLQEQVDAIKKISEYVSQLRRVGKGHGVWHFDQMLLEEAA

SEQ ID NO: 5051 - protein, 254 aa, Triticum aestivum
MLPRVAPSPATAAAAAAVGQLSGAGLAAGSVRLPVPSAAGSAVCCRAAAKGKEVLSGVMFQPFEELKGELSLVPQGKDQSLARHKFVDECEAALNEQINVEYNASYAYHSLFAYFDRDNVALKGFAKFFRESSDEERGHAEKLMEYQNKRGGRVRLQSIVTPLTEFDHAEKGDALYAMELALALEKLVNEKLHNLHSVATRCNDPQLTDFVESEFLQEQVDAIKKISEYVSQLRRVGKGHGVWHFDQMLLEEAA

SEQ ID NO: 5052 - protein, 260 aa, Triticum aestivum
  unsure (1)..(260): unsure at all Xaa locations
HSPPSSSLRELLRIASSPAAVAAASQLSAPGPAHGSARLPPLAKVSSTACRAAGKGKKVLSGVMFQPFEELKGELSLVPQAEGQSLARQKFVDECEAAINEQINVEYNASYAYHSLYAYFDRDNVALKGFAKFFRESSDEEREHAEMLMEYQNRRGGRVRLQSIVTPLTEFDHSEKGDALYAMELALALEKLVNEKLHNLHSVATRCNDPQLSDFVESQFLQEQVVAXVKKISEYVTQLRRIGKGHGVWHFDRMLLEEEA

SEQ ID NO: 5053 - protein, 234 aa, Triticum aestivum
  unsure (1)..(234): unsure at all Xaa locations
XYYSAPDAQNSRERTRPPPPPVPIQMMLRVSASPAAAVANQLSGGAAAXXAPARVTAQRSGVSLSAAAAGKGKEVLSGVVFQPFEEIKGELALVPQSPDRSLARHKFVDDCEAAINEQINVEYNASYAYHSLFAYFDRDNVALKGFAKFFKESSDEEREHAEKLMEYQNKRGGRVRLQSIVAPLTEFDHPEKGDALYAMELXLCLIQLFWTSLHSLHYMGNACDDTQVLXVLIV

SEQ ID NO: 5054 - protein, 218 aa, Triticum aestivum
  unsure (1)..(218): unsure at all Xaa locations
XVRNPTPTISGIASAPPPFGFEMFQPFEELKGELSLVPQGKDQSLARHKFVDECEAALNEQINVEYNASYAYHSLFAYFDRDNVALKGFAKFFKESSDEERGHAEKLMEYQNKRGGRVRLQSIVTPLTEFDHPEKGDALYAMELALALEKLVNEKLPNLHSVATRCNDPQLTDFVESQFLQEQVDAVKKISEYVTQLRRIGKGHGVWHFDRMLLEEEA

SEQ ID NO: 5055 - protein, 170 aa, Suberites domuncula
MADNVRQNYAASSEEGVNKQINLEFYAMYSYLSMANYFERHDVALHGFAKYFRKAGHEELEHAEKLQKFQIQRGGRVVLQDIKKPSKDDWEGPLEAMEAALALERMVNQALLDLHKIADDNGDFQMSDFIEGNYLHEQVEAIKEISDHITNIKRVGTGHGIYHFDKCLGE

SEQ ID NO: 5056 - protein, 168 aa, Suberites domuncula
MSACRQNYHQDCEDGVNAQINLELYAMYVYQSLATYFERHDVALPNIAATFRKASKEELGHAELLMRFQNDRGGKVVLSDIKAPANTEWGSALKAMEAASDLEKTVNQALLDLHKISDKHNDSQMSDFIENNFLTEQVEAIKELGDHITNLKRVGPGHGEYHFDKELK

SEQ ID NO: 5057 - protein, 176 aa, Encephalitozoon cuniculi
MDPKTKQASSDEWNVEAGLLLSSQLLLEYNAYYFYSACAAHFSRSDVCLKGLASFFRKKSLDENAQAQKIIGFMNMRELDIEFRAIEAPDIKKYGKTSGVLKACKEFEQTVLSNISTISEIARKAGDGAIVQFLEDFIAEQVRSISELSDLCANCARCGDGGVGLFLFDQSLISQH

SEQ ID NO: 5058 - protein, 173 aa, Schistosoma japonicum
MSLCRQNYHEECEAGINKQINMELYASYVYMTMAFHFHRDDVALNGFYKFFLNESEEERQHAIKLMTYQNMRGGRIVLQDISAPPQLSWTSGLHAMQDALELEKKVNQSLMDLVAVGERHRDTHFCDFIGNEYLETQIQSMKKLADYITNLNRVGTGLGEYTFDKETLHGESD

SEQ ID NO: 5059 - protein, 173 aa, Schistosoma japonicum
MSLCRQNYHEECEAGINKQIIMELYASYVYMTMASHSHRDDVALNGFYKLSLNESEEERQHAIKLMTPQNMRGGRIVLQDISAPPQLSWTSGLHAMQDALELEKKVNQSLMDLVAVGERHRDTHFCDFIGNEYLETQIQSMKKLADYITNLNRVGTGLGEYTFDKETLHGESD

SEQ ID NO: 5060 - protein, 192 aa, Schistosoma japonicum
MKIMMLMTVLATWILAVYAPIQTNGEVRDPLALHSQIEEGLNDQILYEYEAFYIYDHMASYLSRPEVGLSGFAKFFRECANEELEHARKFSEFVNKRNSKVVLKNILLAPGVPMEFKNIHEVIDTAIGKELEVSAQINELHKAASKMSDAITQDFLDEFLREQMNSVSRLREMRARLHLDSSAVYLMDKELR

SEQ ID NO: 5061 - protein, 173 aa, Taenia saginata
MNMIRQNFHDECEVGINRQINMELYASYLYLAMSQHFDREDVALPGFKKFFAKASEEEREHAIKLMCYQCKRGGRIVYQDIAKPQKSEWATGLEAMETALKIEREVNESLLALCDVAVKHSDNHFSDFLENEYLGEQVDAIKQLADYVTNLRRCGPGLGEYLFDKETLNGGED

SEQ ID NO: 5062 - protein, 211 aa, Manduca sexta
MKAILLSVAGLLAVLAPAIATQCHVNPVNIQREWITMHRSCRDSMRRQIQMEVGASLQYLAMGAHFSKDKINRPGFAKLFFDAAGEEREHAMKLIEYLLMRGELTNDVTSLIQVRAPQRNKWEGGVDALEHALKMESDVTKSIRTVIKACEDDPEFNDYHLVDYLTGEFLEEQYKGQRDLAGKASTLKKMLDRNSALGEFIFDKKLMGMDI

SEQ ID NO: 5063 - protein, 211 aa, Galleria mellonella
MKAILVAVLGLLAVCAPAFATQCTVNPVNIPKEWITMQRPCRDSMRRQIQMEVAASLQYLAMGAHFSKDTINRPGFAKLFFDAGSEERGHAMKLIEYLLMRGELTSDVTSLIQIRPPERKSWSSGVEALEHAVKMESDVTKSIRTVISDCESDPNFNDYHLVDYLTGEFLEEQYKGQRDLAGKASTLKKMMDRHASLGEFIFDKKLLGIDV

SEQ ID NO: 5064 - protein, 165 aa, Haemophilus influenzae Rd
MLSENVVKLLNDQMNLEFYSSNLYLQMSAWCDQQGFEGTAKFLSVHAAEEMQHMRKLFTYLNETGSLAVISAIEAPAHEYKSLKEVIETTYEHEKLITSKINELVGKTFEEKDYSAFNFLQWYVEEQHEEEKLFSSILDKLNFLGEDGKGLFLIDKDLGNLSTKA

SEQ ID NO: 5065 - protein, 182 aa, Haemophilus influenzae Rd
MIAANYALLHFINQNGKELVMLNQIIINKLNDQINLEFYSSNVYLQMSAWCSKHGYEGAATFLLRHADEELEHMQKLFNYVSETSGMPILGKIDAPKHDYSSLREVFEITLEHEKLVTSKINELVEVTFESKDYSTFNFLQWYVAEQHEEEKLFSGIIDRFNLVGEDGKGLFFIDRELATLE

SEQ ID NO: 5066 - protein, 209 aa, Aedes aegypti
MMKSVFFGVVAITVAILSIYQETAQAQEQTVGATDNYQWDSVDDQCLAALHRQINKEFDASIIYLKYAAYFAQEKINLPGFEKFFFHAAAEEREHGIKLIEYALMRGKAPVDKHFKLNYDHEVPTVTTGESALETALQKEVEVTRSIRGVIKACEDGSNDFHLADYLTGEYLDEQHKGQRELAEKIATLKKMKKSAPKLGEFLFDKNHM

SEQ ID NO: 5067 - protein, 209 aa, Aedes aegypti
MMKSVFFGVVAITVAILSIYQETAQAQEQTVGATDNYQWDSVDDQCLAALHRQINKEFDASIIYLKYAAYFAQEKINLPGFEKFFFHAAAEEREHGIKLIEYALMRGKAPVDKHFKLNYDHEVPTVTTGESALETALQKEVEVTKSIRGVIKACEDGSNDFHLADYLTGEYLDEQHKGQRELAEKIATLKKMKKSAPKLGEFLFDKNHM

SEQ ID NO: 5068 - protein, 209 aa, Aedes aegypti
MMKSVFFGVVAITVAILSIYQETAQAQEQTVGATDNYQWDSVDDQCLAALHRQINKEFDASIIYLKYAAYFAQEKINLPGFEKFFFHAAAEEREHGIKLIEYALMRGKAPADKHFKLNYDHEVPTVTTGESALETALQKEVEVTKSIRGVIKACEDGSNDFHLADYLTGEYLDEQHKGQRELAEKIATLKKMKKSAPKLGEFLFDKNHM

SEQ ID NO: 5069 - protein, 186 aa, Drosophila melanogaster
MAWCFRDIRRHMCMLVRQNFAKSCEKKLNDQINMELKASHQYLAMAYHFDRSDISSPGMHRFFLKASVEEREHAEKIMTYMNKRGGLIILSSVPQPLPCFASTLDALKHAMKMELEVNKHLLDLHALAGKEADPNLCDFIEANFLQEQVDGQKILADYISQLEKAQNQVGEFLFDKYMGSGMHPAK

SEQ ID NO: 5070 - protein, 205 aa, Drosophila melanogaster
MVKLIASLLLLAVVAQAYGDFKCSLAVPEITKDWVDMKDACIKGMRNQIQEEINASYQYLAMGAYFSRDTVNRPGFAEHFFKAAKEEREHGSKLVEYLSMRGQLTEGVSDLINVPTVAKQEWTDGAAALSDALDLEIKVTKSIRKLIQTCENKPYNHYHLVDYLTGVYLEEQLHGQRELAGKLTTLKKMMDTNGELGEFLFDKTL

SEQ ID NO: 5071 - protein, 180 aa, Drosophila melanogaster
AVPEITKDWVDMKDACIKGMRNQIQEEINASYQYLAMGAYFSRDTVNRPGFAEHFFKAAKEEREHGSKLVEYLSMRGQLTEGVSDLINVPTVAKQEWTDGAAALSDALDLEIKVTKSIRKLIQTCENKPYNHYHLVDYLTGVYLEEQLHGQRELAGKLTTLKKMMDTNGELGEFLFDKTL

SEQ ID NO: 5072 - protein, 121 aa, Drosophila melanogaster
MVKLIASLLLLAVVAQAYGDFKCSLAVPEITKDWVDMKDACIKGMRNQIQEEINASYQYLAMGAYFSRDTVNRPGFAEHFFKAAKEEREHGSKLVEYLSMRGQLTEGVSDLINVPVSRRLA

SEQ ID NO: 5073 - protein, 162 aa, Haemophilus influenzae
MLNQIIINKLNDQINLEFYSSNVYLQMSAWCSKHGYEGAATFLLRHADEELEHMQKLFNYVSETSGMPILGKIDAPKHDYSSLREVFEITLEHEKLVTSKINELVEVTFESKDYSTFNFLQWYVAEQHEEEKLFSGIIDRFNLVGEDGKGLFFIDRELATLE

SEQ ID NO: 5074 - protein, 216 aa, Calpodes ethlius
MKSFLLTLLTTLALSASTFGTQCNVNPVTIPTDWITMTSGCRTSVRHQIQMEVAASLQYLAMGAHFSRDGINRPGFAKLFFDASSEERGHALKLIEYLLMRGELTSNISSLITIRPPERKSWESGQEALEHALRMETAVTKSIKNVIVNCEHDREANGRDDNDYHLVDYLTGEFLDEQYKGQRDLAGKAATLKKMMDRHSALGEFIFDKRLLGMDI

SEQ ID NO: 5075 - protein, 213 aa, Prochlorococcus marinus str. MIT 9313
MHICLVANPSSPLCAISTRQIMALPTSTKAVALTTGPAGRAIAQSMEASLVEALHQHLTMERNASAAYFAIAIWFAERELRGFSHYFKQEAIQEQEHAAHFADYLIARGQAVVLQDVPSPRQEWISTDEIMAASFQMEADVTTSLHQLYAMAERASDMRTTVFLDPLVDNQVDSENEFAHLLGRVRFAQNQPSAMLIIDGELSDGKHSPAKLA

SEQ ID NO: 5076 - protein, 165 aa, Pasteurella multocida
MLSQNVINLLNEQMNLEFYSSNLYLQMSAWCEQNGFDGTAKFLAAHAAEEMQHMRKLFTYLNETGALAIIGEIAAPAHQYGSLKEVLEITYQHEKLITAKINELVGKTFEEKDYSAFNFLQWYVAEQHEEEKLFSGILDKLNLLGEDGKGLFLIDKDLGNLANSK

SEQ ID NO: 5077 - protein, 171 aa, Asterias forbesii
MATIRQNYNETSEAGVNKQINLELYASYTYLSMAFYFDNTTVALPGAHKYFKKASDEEREHAMLLMKFQNQRGGTIVLQDIKKPENDSWGSLKDAVQAALALEKHVNQSLLDLHKLADSKGDAQMCDWIETHFLTEQVEAIKELGDHITQLTRVGPGLGEYTYDKENLGED

SEQ ID NO: 5078 - protein, 172 aa, Branchiostoma belcheri
MAVSQVRQNFHEDSEAGINKQINLELYASQVYMSMASYFGRDDVALHNFQKFFNHASDEVREHARKLQRYQAMRGGRVILQTVQNPERDEWGSGLDAMRAALALEKNINQALLDLHKVAGSRNDPQMQDFLEGEYLKEQVESIKEIADHVTNLKRVGSGLGEYIFDHETLGD

SEQ ID NO: 5079 - protein, 175 aa, Scyliorhinus canicula
MASQIRQNYHQECEAAMNRQINMELYASYVYISMYAFDRDDVALKNFAKFFKDQSHEEREHAEKLMKFQNQRGGRVILQDVSKPDRDEWSNGLEAMKCALHLERTVNQSLLDLHKLASDKFDARMCDFLETHYLDEQVQSIKKLGDSVTNLVRLGASQNGMAEYLFDKHSLEESS

SEQ ID NO: 5080 - protein, 118 aa, Oryzias latipes
EKEHADKLLSFQNKRGGRIFLQDVKKPERDEWGSGLEAMQCALQLEKNVNQALLDLHKVASDHKDLIVCDFLETHYLNEQVESIKKIGDYITNLTRMDAHTNKMAEYLFDKHTLGSQS

SEQ ID NO: 5081 - protein, 159 aa, Bacteroides fragilis
MISEKLQNAINEQISAEMWSSNLYLSMSFYFEREGFSGFAHWMKKQSQEEMGHAYAMADYIIKRGGIAKVDKIDVVPTGWGTPLEVFEHVFEHERHVSKLVDALVDIAAAEKDKATQDFLWGFVREQVEEEATAQGIVDKIKRAGDAGIFFIDSQLGQR

SEQ ID NO: 5082 - protein, 160 aa, Porphyromonas gingivalis
MKISENVTKAINDQIKAEMWSSNLYLSMSVHFAQVGYNGFAHWLKKQSLEEMEHAYDMMDYLLKRGGEVKIEAIDAVPQKFGSVLEVFQQVYEHECKVTEMIEAVVRAASEAGDMASQDFFWKYIREQVEEEATAAEIVETIRLSQEQNLIFIDHQLARR

SEQ ID NO: 5083 - protein, 229 aa, Artemia salina
ATEGARNIGQSAPEGKVQMDCPSRHNFDPECEKAFVEHIHLELASSYHAWSMWAFYARDCKAAVGMTRLCEWASHVSAQRARRMAAYVLTRGGHVDYKEIPAPKKQGWDNFEDAFSHCVANKKRILTSLQSLYQCCQSKDAHCSNFIQTDMMDEVIAWNKFLSDCLSNLHCIGSQGMGPWVFDRWLARIVMSKFKHPKIPSLSTSDLESNIPNELFDAEGDMVRAIKKL

SEQ ID NO: 5084 - protein, 169 aa, Bacillus halodurans
MLNEKLLQALNKQMNYEMYAAHSYLAMAAYCSAESLDGFANFFMVQAEEERFHGMKFYNFINAMGERARFEGFESPNNEFSSVLDCFEKSLEQEKLVTKQIYDLSDLAWDAREHATINFLKWFIDEQVEEEDMFDTIIQKLKRIDNDSNAFFMMDNEFSKRSFNPEDEA

SEQ ID NO: 5085 - protein, 149 aa, Macaca mulatta
YLSMSYYFDRDDVALKNFAKYFLHQSHEEREHAEKLMKLQNQRGGRIFLQDIKKPDYDDWESGLNAMECALHLEKNVNQSLLELHKLATDKNDPHLCDFIETHYLNEQVKAIKELGDHVTNLRKMGAPESGLAEYLFDKHTLGDSDNES

SEQ ID NO: 5086 - protein, 181 aa, Sus scrofa
MTTSCSSQVRQNYHQDSEAAINRQINLELYASYVYLSMSYYFDRDDVALKNFAKYFLHQSHGGRGHAEKLMKLQTQRGARIFLQDIMKPERDDWENGLTAMEFALHVVKNVYQSLLELHKLATDKNDPHLCDFIETHYLHEQVKAIKELGDHITNLHRMGAPEYGMAEYLFDKHTLGSSES

SEQ ID NO: 5087 - protein, 160 aa, Sus scrofa
SSQVRQNYSTEVEAFVNRLINMHLQASYTYLSLGFYFNRDDVALEGVSHFFRELAEEKREGSERLLKMQNQRGGRALFQDVQKPSQDEWGKTQDAMEAALHLEKGLNQALVDLHALGSARADPHLCDFLENHFLDEEVKLIKKMGDHLTNLRRLSGPQAG

SEQ ID NO: 5088 - protein, 164 aa, Oryctolagus cuniculus
AINRQINLELYASYVYLSMSYYFDRDDVALKNFAKYFLHQSHEEREHAEKLMKLQNQRGGRIFLQDIKKPEYDDWESGLNAMECALHLEKSVNQSLLELHKLATDKNDPHLCDFIETHYLNEQVKSIKELGDHVTNLRKMGAPESGMAEYLFDKHTLGHSDNES

SEQ ID NO: 5089 - protein, 175 aa, Oryctolagus cuniculus
MTSQIRQNYSPEVEAAVNHLVNLHLRASYTYLSLGFYFDRDDVALEGVSHFFRELAEEKREAAERLLKMQNQRGGRALFQDVQKPSQDEWGKTLNAMEAALALEKNLNQALLDLHALGSAHTDPHLCDFLENHFLDEEVKLLKKMGDHLTNIRRLSGPQASLGEYLFERLTLKHD

SEQ ID NO: 5090 - protein, 181 aa, Mycobacterium tuberculosis H37Rv
MTEYEGPKTKFHALMQEQIHNEFTAAQQYVAIAVYFDSEDLPQLAKHFYSQAVEERNHAMMLVQHLLDRDLRVEIPGVDTVRNQFDRPREALALALDQERTVTDQVGRLTAVARDEGDFLGEQFMQWFLQEQIEEVALMATLVRVADRAGANLFELENFVAREVDVAPAASGAPHAAGGRL

SEQ ID NO: 5091 - protein, 110 aa, Chloroflexus aurantiacus
FDYLNDRGGRVTLGAIDEPQNEYASPLDAFEHALAHEQRVTAAIHAIYALAAQENDYATMSMLKWFIDEQVEEEKSADEIIQHLKLIGNDGVGLLMLDRKLAEREEEEDE

SEQ ID NO: 5092 - protein, 170 aa, Clostridium acetobutylicum
MLENNLLKLLNDQVTKEFYSAYFYLDIHNYFISKGLDGFGNWFYIQTQEEKDHAMLFLKYVEINSEDITLGNIPAPSLNFSDISTPLETTLKHERGITASINKIYEAAFSVKDFRTMQFLDWFVKEQGEEEKNTEDLVRKYELFGSDSKGLYLLDSELKTRVYTPATLVL

SEQ ID NO: 5093 - protein, 165 aa, Escherichia coli O157:H7 EDL933
MLKPEMIEKLNEQMNLELYSSLLYQQMSAWCSYHTFEGAAAFLRRHAQEEMTHMQRLFDYLTDTGNLPRINTVESPFAEYSSLDELFQETYKHEQLITQKINELAHAAMTNQDYPTFNFLQWYVSEQHEEEKLFKSIIDKLSLAGKSGEGLYFIDKELSTLDTQN

SEQ ID NO: 5094 - protein, 167 aa, Campylobacter jejuni subsp. jejuni NCTC 11168
MLSKEVVKLLNEQINKEMYAANLYLSMSSWCYENSLDGAGAFLFAHASEESDHAKKLITYLNETDSHVELQEVKQPEQNFKSLLDVFEKTYEHEQFITKSINTLVEHMLTHKDYSTFNFLQWYVSEQHEEEALFRGIVDKIKLIGEHGNGLYLADQYIKNIALSRKK

SEQ ID NO: 5095 - protein, 203 aa, Chlorobium tepidum TLS
MLSKTILDKLNHQVNFEAASAHLYLQMSAWLLTQSLDSTAAFFRAHAEEEKAHMMKLFDYINETGSLALIGEVATPAPEWKSHIELLEAAYNHELAITQSINDLVDTALREKDYSTFQFLQWYVAEQHEEEYLFSSMLHKARIINTMDGRALFRFDEEVRKSVLHHEHHQQKPMFLQVGPAPKHHDGHDGLHAHQHSSHWSGH

SEQ ID NO: 5096 - protein, 162 aa, Corynebacterium efficiens YS-314
MAINERLAHTMNSQVTAELEASLVYLQLSYVLDDLGLVGMRDWMKTQSEEELEHAHKFSQHLLDRGYVPQIGDIAPPKLDISTAVDAFEAALAHEQKISGLIRELAAVQDAERDYDSRALINWFLEEQVEEEAAVGEILDRLRIAGNSGSGLLHLDAELGAR

SEQ ID NO: 5097 - protein, 162 aa, Corynebacterium glutamicum ATCC 13032
MTINEKIASAFNNQVTAELEASMVYLQLSYVLDDLGLTGMRDWMKAQSKEELEHAQKFAQHLLDRDYTPQIGDIAPPKLDVTSAIEAFEASLAHEQKISGLIRELAAIQDAEKDYDSRALIDWFLNEQIEEEATVGEIIDRLRIAGDSGSGILRIDGELGSR

SEQ ID NO: 5098 - protein, 189 aa, Thermosynechococcus elongatus BP-1
MRLTVSSTIRMEDELMLSSAMINRLNAQINLEMFSARLYLQMSSWCAHKALEGCATFLGQHADEEMAHMRRLLSYMHETGALAILEGLEAPPHNFGSLKEMFSQVYSHEQLVTRKINELVHLANSEPDYSTLQFLQWYVAEQHQEEFLFKSILDKIDLIGTEGQGLFFIDQEIGKLASTSGSKTLSTIG

SEQ ID NO: 5099 - protein, 170 aa, Shigella flexneri 2a str. 301
MWSTIMLKPEMIEKLNEQMNLELYSSLLYQQMSAWCSYHTFEGAAAFLRRHAQEEMTHMQRLFDYLTDTGNLPRINTVESPFAEYSSLDELFQETYKHEQLITQKINELAHAAMTNQDYPTFNFLQWYVSEQHEEEKLFKSIIDKLSLAGKSGEGLYFIDKELSTLDTQN

SEQ ID NO: 5100 - protein, 161 aa, Haemophilus somnus 129PT
MLNQAIITKLNEQINLEFYSSNVYLQMSSWCAHNGYEGAAAFLLRHADEEMQHMHKLFTYVSETSGMPLLGKIEAPKNDYKSLKEIFEIILEHEKFVTSKINELVEITFATKDYSTFNFLQWYVAEQHEEEKLFTGIIDKFNLMGEDGRSLYFIDRDLLTL

SEQ ID NO: 5101 - protein, 165 aa, Haemophilus somnus 129PT
MLSANVIKLLNDQMNLEFYSSNLYLQMSAWCEQNGFDGTAKFLAAHAVEEMQHMRKLFTYLNETGASAIITAIDEPPHEFDSLKQVIELTYEHEKLITCKINELVGKTFEEKDYSAFNFLQWYVAEQHEEEKLFSGILDKLNLLGEDGKCLYLIDKDLGDLVSKV

SEQ ID NO: 5102 - protein, 167 aa, Helicobacter pylori
MLSKDIIKLLNEQVNKEMNSSNLYMSMSSWCYTHSLDGSGLFLFDHAAEEYEHAKKLIVFLNENNVPVQLTSISAPEHKFESLTQIFQKAYEHEQHISESINNIVDHAIKGKDHATFNFLQWYVSEQHEEEVLFKDILDKIELIGNENHGLYLADQYIKGIAKSRKS

SEQ ID NO: 5103 - protein, 167 aa, Helicobacter pylori
MLSKDIIKLLNEQVNKEMNSSNLYMSMSSWCYTHSLDGAGLFLFDHAAEEYEHAKKLIVFLNENNVPVQLTSISAPEHKFEGLTQIFQKAYGHEQHISESINNIVDHAIKNKDHATFNFLQWYVAEQHEEEVLFKDILDKIELIGNENHGLYLADQYVKGIAKSRKS

SEQ ID NO: 5104 - protein, 167 aa, Helicobacter pylori
MLSKDIIKLLNEQVNKEMNSSNLYMSMSSWCYTHSLDGSGLFLFDHAAEEYEHAKKLIVFLNENNVPVQLTSISAPEHKFESLTQIFQKAYEHEQHISESINNIVDHAIKSKDHATFNFLQWYVAEQHEEEVLFKDILDKIELIGNQNHGLYLADQYVKGIAKSRKS

SEQ ID NO: 5105 - protein, 167 aa, Helicobacter pylori
MLSKDIIKLLNEQVNKEMNSSNLYMSMSSWCYTHSLDGAGLFLFDHAAEEYEHAKKLIVFLNENNVPVQLTSISAPEHKFEGLTQIFQKAYEHEQHISESINNIVDHAIKSKDHATFNFLQWYVAEQHEEEVLFKDILDKIELIGNENHGLYLADQYVKGIAKSRKS

SEQ ID NO: 5106 - protein, 167 aa, Helicobacter pylori
MLSKDIIKLLNEQVNKEMNSSNLYMSMSSWCYTHSLDGSGLFLFDHAAEEYEHAKKLIVFLNENNVPVQLTSISAPEHKFEGLTQIFQKAYEHEQHISESINNIVDHAIKGKDHATFNFLQWYVSEQHEEEVLFKDILDKIELIGNENHGLYLADQYVKGIAKSRKS

SEQ ID NO: 5107 - protein, 175 aa, Vibrio vulnificus CMCP6
MLSQTMVEQLNAQINLEFFSSNLYLQMSAWCEDKGFDGAAQFLRVHAVEEMQHMQRLFTYVSETGALPILGAIAAPKHDFASLGEVFRETYEHEQMITQQINKLAHVAFTSQDYSTFNFLQWYVAEQHEEEKLFKGILDKIELVGEDGKALFFIDKDLAQMAKEGSSSIMDAPAA

SEQ ID NO: 5108 - protein, 175 aa, Vibrio parahaemolyticus RIMD 2210633
MLSQTMVEQLNEQINLEFFSSNLYLQMSAWCEDKGFEGAAEFLRAHAVEEMEHMQRLFTYVSETGSMPILGAIEAPKHDFASLGDVFRETYEHEQMITEKINKLAHVAFTSQDYSTFNFLQWYVSEQHEEEKLFKGILDKIELVGEDGKALFFIDKDLAQMAKEGSSSIMGAPAA

SEQ ID NO: 5109 - protein, 159 aa, Bacteroides thetaiotaomicron VPI-5482
MISEKLQKAINEQITAEMWSSNLYLAMSFYFEKEGFSGFAHWMKKQSQEEMGHAYAMADYIIKRGGTAIVDKIDVVPNGWGTPLEVFEHVYKHECHVSALVDKLVDVAAAEKDKATQDFLWGFVREQVEEEATAQGIVDKIKKAGDTGIFFVDSQLGQR

SEQ ID NO: 5110 - protein, 160 aa, Bacteroides thetaiotaomicron VPI-5482
MTEKLQNALNEQITAELWSANLYLSMSFYLEREGFSGMARWMQKQSAEETGHAYAIAGYMIKREATPKVDKVDVVPQGWGNPVEVFEHALEHEKHVSKLIDELVQVASEEKDNATQDFLWQFVREQVEDEANVLNIVSHLRKAGDCAILFMDAKLGERES

SEQ ID NO: 5111 - protein, 164 aa, Wigglesworthia glossinidia endosymbiont of Glossina brevipalpis
MIKQEMVVNLNKQLNLELFSSNLYLQMSSWCNSNKLEGSSKFFKQQSIEETSHMHRLFDYLIDSGNTPKISSIDSPPEHFPSLKEIVQFSYEHEKMISKKIKNLSFQAIDTKDYLTFHFLKWYVEEQCEEEKMFKSILDRIELVNEDPSGLYFVDQILKKINNS

SEQ ID NO: 5112 - protein, 188 aa, Triticum aestivum
PRVRNMSPKQNFANQSEEALNQQVNTELQASQVYLSMSAWAQHTSVALPGLEKYFREAAHEEREHAQKLIDYINTRGGRVVLRALQAPETDWKSAKNAVESALQLEKDVNKSLLNLHKIADSNGDPQMCDFIEAEYLGEQVEAIKKLADMVTQLNRVGEGLGVYLWDQQLYRDGTGAGSRATGNVKHG

SEQ ID NO: 5113 - protein, 131 aa, Erwinia chrysanthemi
RSTFLKSHSREEMEHMQRLFDYLDDTGSMPVLGAIAAPPVDFSSLQDVFKLTYEHEQLITSKINELAHAAMTLQDYSTFNFLQWYVAEQHEEEKLFKSILDKMGMVNAQEGGLFFIDQDLKKMAASATPSA

SEQ ID NO: 5114 - protein, 181 aa, Vibrio cholerae
MNQEFFMLSQAMVEHLNEQINLEFFSSNLYLQMSAWCEDKGFDGAAEFLRAHAVEEMQHMQRLFTYVSETGALPILGAIAAPRHDFASLGEVFRETYQHEQKITQQINKLAHVAFTSQDYSTFNFLQWYVAEQHEEEKLFKGILDKLELVGEDGKALFFIDKDLAALAKKGSSSVMDAPAE

SEQ ID NO: 5115 - protein, 181 aa, Pacifastacus leniusculus
MASQIRHNYHEDCEPINKQINLEFYASYVYMSMGHYFDRDDISLPGASKFFKDSSDEEREHGQKLMKYQNKRGARIVLQAIAAPSLQEWGNLHDALQAALDLENEVNQSLLDLDATASKINDPHLTNMLEGEFLEEQVESIEKIGNLITRLKRAGTSGLGEFLFDKELKQRFLPSLTSHPN

SEQ ID NO: 5116 - protein, 177 aa, Prochlorococcus marinus str. MIT 9313
MNDLTKAINLHLACEFQASHTYLAMSIWLREKDLAGFSSYMQIKSQEERGHADRLIAYLVDCDEQVELPAVEAPQRNWGSTQDLFDQVYELEKDVTASINRIYSIAEQAGERSATAMLDWFIAEQLQEEAEARFVRKRLRLAGDNTAALLLLDQQFLDGTALTTVKGGLTGLKQSEN

SEQ ID NO: 5117 - protein, 161 aa, Pasteurella multocida
MLSQAIAEKLNEQINLEFYSSNVYLQMSAWCAHHGYEGAAAFLLRHADEEMEHMQKLFNYVSETSGMPLLGKIEAPKNDYKTLKEIFEITLEHEKFVTSKINELVEVTFAHKDYSTFNFLQWYVAEQHEEEMLFNSIIDKFNLLGEDGRSLYFIDRDLATL

SEQ ID NO: 5118 - protein, 167 aa, Helicobacter pylori 26695
MLSKDIIKLLNEQVNKEMNSSNLYMSMSSWCYTHSLDGAGLFLFDHAAEEYEHAKKLIVFLNENNVPVQLTSISAPEHKFEGLTQIFQKAYEHEQHISESINNIVDHAIKGKDHATFNFLQWYVSEQHEEEVLFKDILDKIELIGNENHGLYLADQYVKGIAKSRKS

SEQ ID NO: 5119 - protein, 167 aa, Helicobacter pylori J99
MLSKDIIKLLNEQVNKEMNSSNLYMSMSSWCYTHSLDGAGLFLFDHAAEEYEHAKKLIIFLNENNVPVQLTSISAPEHKFEGLTQIFQKAYEHEQHISESINNIVDHAIKSKDHATFNFLQWYVAEQHEEEVLFKDILDKIELIGNENHGLYLADQYVKGIAKSRKS

SEQ ID NO: 5120 - protein, 165 aa, Salmonella enterica subsp. enterica serovar Typhi
MLKTEMIDKLNEQMNLELYSSLLYQQMSAWCSYHSFEGAAAFLRRHAQEEMTHMQRLFDYLTDTGSLPRINSVSSPFAEYTSLDELFRATYEHEQLITQKINELAHAAMTSQDYPTFNFLQWYVAEQHEEEKLFKSIIDKLTLAGKSGEGLYFIDKELSTLDTQN

SEQ ID NO: 5121 - protein, 179 aa, Cytophaga hutchinsonii
MKDLVRLRTSLKEEIEIILNAQCKMEAEASNKYLAMASWLERNGFLQSAEYLYHQAEEERSHFLKIFKYINDVGGTAITPFVSDVAQEYNSIKDVFEMALQGEIAVSNSINKIVAKCRESNDYATEEFIMWFVKEQREEEANARRALELFELIDVNSDSGKFLLDKEIGKISGKKIIES

SEQ ID NO: 5122 - protein, 165 aa, Salmonella typhimurium LT2
MLKTEMIDKLNEQMNLELYSSLLYQQMSAWCSYHSFEGAAAFLRRHAQEEMTHMQRLFDYLTDTGSLPRIHTVSSPFAEYASLDELFRATYEHEQLITQKINELAHAAMTSQDYPTFNFLQWYVAEQHEEEKLFKSIIDKLTLAGKSGEGLYFIDKELSTLDTQN

SEQ ID NO: 5123 - protein, 353 aa, Mus musculus
MNGNQKLDAYNQEKQNFIQHFSQIVKVLTEKELGHPEIGDAIARLKEVLEYNALGGKYNRGLTVVQAFQELVEPKKQDAESLQRALTVGWCVELLQAFFLVSDDIMDSSLTRRGQICWYQKPGIGLDAINDALLLEASIYRLLKFYCREQPYYLNLLELFLQSSYQTEIGQTLDLMTAPQGHVDLGRYTEKRYKSIVKYKTAFYSFYLPIAAAMYMAGIDGEKEHANALKILMEMGEFFQVQDDYLDLFGDPSVTGKVGTDIQDNKCSWLVVQCLLRASPQQRQILEENYGQKDPEKVARVKALYEALDLQSAFFKYEEDSYNRLKSLIEQCSAPLPPSIFMELANKIYKRRK

SEQ ID NO: 5124 - protein, 220 aa, Mus musculus
MNGNQKLDVYNQEKQNFIQHSSQIVKVLTEKELGHPEIGDAIAWLKEVLEYNDLGGKYNRGLTVVQAFQELVERKKQDAESLQRALTVGWCVELLQAFFLVSDDIMDSSLTRPGQICWYQKPGIGLDAINDALLLEASIYRLLKFYCREQPYYLNLLELFLQSSYQTEIGHTLDLMTAPQSPMWILVRYTEKRYKSIVKYKTAFYSFLPAYRGRHVHGRH

SEQ ID NO: 5125 - protein, 185 aa, Mus musculus
MNGNQKLDAYNQEKQNFIQHFSQIVKVLTEKELGHPEIGDAIARLKEVLEYNALGGKYNRGLTVVQAFQELVEPKKQDAESLQQALTVGWCVELLQAFFLVSDDIMDSSLTRRGQICWYQKPGIGLDAINDALLLEASIYRLLKFYCREQPYYLNLLELSAEFLSDRDQADSRPHDSTPGPCGSW

SEQ ID NO: 5126 - protein, 309 aa, Mus musculus
MVLERQIRVKVADDHDESEENFCPPDHGQIMSMCHFQACSVTEKECLLLHSIESRGSAVWELTLRSSCIWRGQVISTAEKKTVVEPLDGCFYYRKSIAQSGIPKVYAFWLKHFSLGKMKSVKITYRLIQCFGDAEKQNFIQHFSQIVKVLTEEELGHRETRDAITQLKEVLHCNVVGGKYSWGLTTVQAFQELVEPRKQDAESLQRALTAQDYLDLFGDPSVTGKVGTDIQDNKCIWLRQILEENYGQKDPEKVAQVKALYEALDLQSVFFKNKEDSKNRLKSLIEQCSVSLPPSIFLELANKIYKLRK

SEQ ID NO: 5127 - protein, 353 aa, Rattus norvegicus
MNGDQKLDVHNQEKQNFIQHFSQIVKVLTEDELGHPEKGDAITRIKEVLEYNTVGGKYNRGLTVVQTFQELVEPRKQDAESLQRALTVGWCVELLQAFFLVLDDIMDSSYTRRGQICWYQKPGIGLDAINDALLLEAAIYRLLKFYCREQPYYLNLLELFLQSSYQTEIGQTLDLITAPQGQVDLGRYTEKRYKSIVKYKTAFYSFYLPIAAAMYMAGIDGEKEHANALKILLEMGEFFQIQDDYLDLFGDPSVTGKVGTDIQDNKCSWLVVQCLLRATPQQRQILEENYGQKDPEKVARVKALYEELDLRSVFFKYEEDSYNRLKSLIEQCSAPLPPSIFLELANKIYKRRK

SEQ ID NO: 5128 - protein, 353 aa, Rattus norvegicus
MNGDQKLDVHNQEKQNFIQHFSQIVKVLTEDELGHPEKGDAITRIKEVLEYNTVGGKYNRGLTVVQTFQELVEPRKQDAESLQRALTVGWCVELLQAFFLVLDDIMDSSHTRRGQICWYQKPGIGLDAINDALLLEAAIYRLLKFYCREQPYYLNLLELFLQSSYQTEIGQTLDLITAPQGQVDLGRYTEKRYKSIVKYKTAFYSFYLPIAAAMYMAGIDGEKEHANALKILLEMGEFFQIQDDYLDLFGDPSVTGKVGTDIQDNKCSWLVVQCLLRATPQQRQILEENYGQKDPEKVARVKALYEELDLRSVFFKYEEDSYNRLKSLIEQCSAPLPPSIFLELANKIYKRRK

SEQ ID NO: 5129 - protein, 344 aa, Rattus norvegicus
MNGDQKLDVHNQEKQNFIQHFSQIVKVLTEDELGHPEKGDAITRIKEVLEYNTVGGKYNRGLTVVQTFQELVEPRKQDAESLQRALTVGWCVELLQAFFLVLDDIMDSSYTRRGQICWYQKPGIGLDAINDALLLEAAIYRLLKFYCREQPYYLNLLELFLQSSYQTEIGQTLDLITAPQGQVDLGRYTEKRYKSIVKYKTAFYSFYLPIAAAMYMAGIDGEKEHANALKILLEMGEFFQIQDDYLDLFGDPSVTGKVGTDIQDNKCSWLVVQCLLRATPQQRQILEENYGQKDPEKVARVKALYEELDLRSVFFKYEEDSLQPPQESHRAVVARPCPHPSSWN

SEQ ID NO: 5130 - protein, 339 aa, Rattus norvegicus
MNGDQKLDVYNQEKQNFIQHFSQIVKVLTEDELGHSEKRDAITRLKEVLEYNTVGGKYNRGLTVVQTFQELVELRKQDAESLQRALMAGWCVGLLQAFFLISDDIMDSSHSLRGQICWYQKPGIGLDAINNALLLEASIYHLLKFYCRDTYQTEIGQTLDLIAAPQGQVDLGRYTEKRYKSIVKYKTAFYSFYLPIAAAMYMAGFDREKEHANALKILLEMGEFFQIQDDYLDLFGDPSVTGKVDTDIQDNKCSWPVVQCLLRATSQQRQKVEENYGQKDPEKVAQVKALYEALDLQNVFFKYEEDSYNHLKSLIEQCSVPLSPSIFLELAKKIYKWRK

SEQ ID NO: 5131 - protein, 288 aa, Rattus norvegicus
MVVQAFQELVELRKQDAERLQWALTVGCCVELLHAFFLVSDDIMDSSHTRRAQICWYQKPGIGLDAINDALLLEASIYRLLKFYCREQPYYLNLLELFLQSSYQTEIGQTLDLITAPQGHVDLGRYTEKRCKSIVKYKRALYAFYLPTGLSCTWQGLMKESDNALEILLEMGEFFQVWDDYLDLFADPNVTGKVGTDIQDDKCSWLVVQCLLRATPQQRQILENYGQKDPEKVARVKALYEELDLQSVFFKYEEDSYNRLKSLIEQCSAPLPPSIFLELANKIYKRRK

SEQ ID NO: 5132 - protein, 291 aa, Rattus norvegicus
MNGEQELHVYNQEKQNFISHFSQTVKEVLEYNTVGGKYNRGLTVVQAFQELVERRKQDAERLQWALAVAWCVELLQAFFLICWYQKLGIGLDSVNDALLLEASIYRLLEFYCREQPSYLNPLELFLQSSYQTEIGQTLDLITAPQGHVDLGRYTEKRYKSIVKYKTALYTFHLPTGLLCSWQGLMKEHANALKILLEMGEFFQIQDDYLDLFGDPSVTGKRQILEENYGQKDPEKGARVRALYEALDLQNVFFKYEEDSYNGLKRLIEQCSAPLPPSIFLELANKIYKRRK

SEQ ID NO: 5133 - protein, 310 aa, Rattus norvegicus
MNGDQKLDAYNQEKQNFIQHFSQIVKVLTEDELGHPETITRLKEVLACSAVGGKFTRGLTVVQAFKELLEPRKQDAENLEWALAVGWCVGLLQAFPHKPGIGLAINDALLLEASIYRLLKFSCREQPYSFCRVTSNRPGRLSLITAPQGHADLGRHTEKRYKSIVKYKTASLYSFYLPITAAVCLAGISGEKEHANAMKILLEMGEFFQVQDDSLDPHGDTCVTRKVSTDIQDNRCSWLAVQCLLQTTPQLQQVLDENSGQKDPEKVAQVKALLYGRQTEPPQHLTEQCSALSTFLELADKIYKRRNCRG

SEQ ID NO: 5134 - protein, 140 aa, Rattus norvegicus
MYMAGFDREKEHANALKILLEMGKFFQIQDDYLDLFGDPSVTGKVDTDIQDNKCSWPVVQCLLRATSQQHQKVEENYGQKDPEKVAQVKALYEALDLQNVFFKYEEDSYNHLKSLIEQCSVPLSPSIFLELAKKIYKWRK

SEQ ID NO: 5135 - protein, 334 aa, Rattus norvegicus
MLAVVVIDEGYGSASTKGKSKQGQDSPPEPEDASPSRARSMAPSGIRGPRRAAQRHGLAGVFGEVRTGDPRKAAGNGPGPTDASSPMQHQLRESGPGSSSAVTESLSLRRNRWLRPPRRFAWGGIAARPPARTWLASRGRWAEKQSFIRHFSHIVKVLPEEELGHPEIGVLLPRSRRQVQLGSNGCPGLSGAGGAEETGCSESSAGPDCIRSHQQFSAPGASIYCLLKFCCREQPYSLNLLERCLRSCYQAETWQSVDLITAPQGHGHLAAVYMAGIDGEEEHANALKILLEMGEFFQVQDDYLDLFADPSVTGKVSTDIQDNKCSWLVVQCLL

SEQ ID NO: 5136 - protein, 329 aa, Sulfolobus tokodaii
MSFEDYFNRIVENVNINIEKYLKGDIQELYEASFYLFKAGGKRLRPLILVSSADLLGGDLNRAYLAGASVEVLHTFTLIHDDIMDEDTTRRGMPTVHVKWGIPMAILAGDLLHAKAFEILNEAFRGMSSNKITRAFEIFTKAIIIISEGQALDMQFEDKVTVSEEEYLDMIKRKTAMLFSSSAALGGLIATDNEKEIQALADYGLNLGISFQIVDDILGLIADEKELGKPVYSDIREGKKTLLVIKTMKEATDEEKKILLKALGNKNASKDELITAAEIIRKYSLEYAYNKAEEYARKAIEALESIDWKNDEAGKALKYLAEFTVKRRK

SEQ ID NO: 5137 - protein, 136 aa, Taraxacum japonicum
YFLVLDDIMDESHTRRGQPCWFRLPKVGMIAANDGIILRNHVPRILKKHFRGKPYYIDLVDLFNEVEFQTASGQMIDLITTLVGEKDLSKYSLSIHRRIVQYKTAYYSFYLPVACALLMFGEDLEKHVEVKDVLVE

SEQ ID NO: 5138 - protein, 341 aa, x Citrofortunella mitis
MSDLKSRFIDVYGVLKQELLYDPAFEFDHDSRQWVDRMLDYNVPGGKLNRGLSVVDSYRLLKEGKTTDDEFFLSSALGWCIEWLQAYFLVLDDIMDGSHTRRGQPCWFRVPKVGMIAANDGVLLRNHISRILKNHFRDKPYYVDLLDLFNEVEFQTASGQMIDLITTIEGEKDLSKYSLPLHRRIVQYKTAYYSFYLPVACALLMAGENLDKHVEVKDILVQMGIYFQVQDDFLDCFGSPEVIGKVGTDIEDYKCSWLVVKALELCNEEQKNVVHENYGKVDPACVAKVKELYKTLDLEGAFVEYEKESYEKLTKSIEAHPTKEVQAVLKSFLAKIYKRQK

SEQ ID NO: 5139 - protein, 482 aa, Anopheles gambiae str. PEST
AGYSEGQKNKATTRTAAEYCVPAFFDTATTNHNKSQAASMSLFNLARFGVGVALEAAITRTAAPITATSGVVQLRRSISKSSEVNNSDFMTIRTENQNHPHHHQKGSSRNCDSKQQIRLKKVSRTLSTLNSSVPEAATQTAVPKSESREFMAVFPDVVRDLTAYASKYDKNVATKWFVKALQYNVPQGKKNRGLACVLAYRMLARSEDLTPENIRRAQYLGWAIEMLHSMFLIMDDVMDGSVTRRGQPCWHTLDDVKLSGVNDAIMIEAAIAHLVKIQYGNEPYYPRLLELFNEMKFITTIGQSLDLRSAKLDVTDYSMDLYKSIVFHKTAYYTFYLPVAMAMHLTGYTDPEMFRQAKTILLEIGQFYQTQDDFFDCFGDPAVIGKVGTDIAEGKCSWLAVVAMQRATEEQKEVMKACYGSTDPENIARVKKLYEQLGLPTTYSIYEEESYNMIKTHIQQISRGLPHELFFKIMEKIYRREA

SEQ ID NO: 5140 - protein, 407 aa, Giardia lamblia ATCC 50803
MASYTVSNYVKLDAHKRQKCIKDFATEKVDSFLETFIPVYLPNLFSTGLLRDHIVEVIKYNVVGGKMTRGTLAADIFLQTVRFLFSGLLEDSNFSEELFNLAIDICLVQEILQGAFLMIDDVIDHSTIRRGKPSWRAVVGDEQAVNDGLILWQIADSLVLYLEDKCGKTLKIFEVYHQAKANTTLGQHLDTFTKTYSQRHTMGHLNDTYILKTAYYTFYLPLIMGYRSGVLFGNMAIGTTAASEKGYTMQKVDSILNLQQRLDTDIEQQIHKISMDLGRLYQMQDDFLDFYAPEILHKESSDYLENKATWPLVRALELSASEEARGKGVSPQTILTIYGKRASEKESIQKLFDALDLKSIYIHEASALLKQCKEEAASMPPYISDSIEDVFDMLSSRINVEIIRPSK

SEQ ID NO: 5141 - protein, 332 aa, Chlorobium tepidum TLS
MSSPITQAQVESKYRQYHAKINEALAACFPKEKPATLYDPARYILEGKGKRIRPFLTLLAAEAVSGKSDNALGVALGIEVLHNFTLMHDDIMDQADLRHGRPTVHKQWNVNAAILSGDMMIAYAYELALKAISSRHAEIIHIFNDANITICEGQALDMELEQRKDVTIADYLDMISKKTGRLISAALEAGGVAGDGTPEQIAALVTFGEKIGRAFQIQDDYLDIMAGDGKSGKVPGGDVINGKKTWLLLRSLELAEGADRELLQSIFDNNGTSPDNVPAVKAIFEKCGVLNETRAKINEDTEAALAALDALPFEEGRGYLRGFANILMKRDF

SEQ ID NO: 5142 - protein, 372 aa, Bifidobacterium longum NCC2705
MCSSNPVDKLLGMCTTANNREIIEPRIIQLVRELTAAPATDEVADALKPVMEQVVDQAASSSQGGKRLRALLALDAFDILAGDVTPDRRDAMIDLACAIEVFQTAALVHDDIIDESDLRRGKPSAHHALEQAVHSGAIGRGLGLMLGDILATACIEITRRSASRLPNTDALNEAFLTMQREVEIGQVLDLAVEMTPLSNPEALANASLNVFRWKTASYTTIAPLLLALLAAGESPDQARHCALAVGRPLGLAFQLADDLLDVVGSSRNTGKPVGGDIREGKRTVLLADALSAADTADKADLIAIFEEDCRNDNQVARTIELFTSTGALDRSRERIAALWGESRKAIAGLELNSEAQRRLTEACARFVPESLR

SEQ ID NO: 5143 - protein, 324 aa, Bacteroides thetaiotaomicron VPI-5482
MFTASQLLDKINNHLSEIQITRTPEGLYEPIEYILSLGGKRIRPVLMLMAYNLYKEDVSSIYDPATGIEVYHNHTLLHDDLMDRSDMRRGKPTVHKVWNDNTAILSGDTMLILAFRYVAGCAPEHLKEVIDLFSLTALEICEGQQLDMEFESRNDVAEDEYIEMIRLKTAVLLAASLKIGAILAGASAADAENLYNFGMQIGVAFQLQDDLLDVYGDPEVFGKKIGGDILCNKKTYMLIKALERANGEQLEELNRWLNADNCQPAEKIAAVTEIYNQLTIRSVCENKMREYYTLAMESLEAVAVAEEKKKELKNLVKLLMYREM

SEQ ID NO: 5144 - protein, 344 aa, Thermus thermophilus
MVPAPETIRQALQERLIARLDHTDPLYRDLLQDYPRRGGKMLRGLLTVYSALAHGAPLEAGLETATALELFQNWVLVHDDIEDGSEERRGRPALHRLHPMPLALNAGDAMHAEMWGLLAEGLARGLFPPEVLLEFHEVVRRTAYGQHLDLLWTLGGTFDLRPEDYFRMVAHKAVYYTAVVPLRLGVLLVGKTPPAAYEEGGLRLGTAFQIVDDVLNLEGGEAYGKERTGDLYEGKRTLILLRFLEETPPEERAREAKPEAEVGWLLERLLASRALAWDKAEAKRLQAEGLALLEAAFQDLPGRRPGPPPRSPRRFGGAQGIMGPCRGCASGSSPPTTPTSSKSA

SEQ ID NO: 5145 - protein, 349 aa, Kluyveromyces lactis
MSDNRAQFLEVFPSLVQELRDILAGYGMPEEAIEWYEKSLNYNTPGGKLNRGLSVVDTYALLKGYKSVSELSAEEYKKVAILGWCIELLQAYFLVADDMMDQSITRRGQPCWYKVENVGDIAINDAFMLEGAIYCLLKKHFRTEPYYVDLLELFHDVTFQTELGQLLDLITAPEDKVDLSKFSLEKHSFIVIFKTAYYSFYLAVALAMFAAGITDSKDLKQASDVLIPLGEYFQIQDDFLDCFGKPEDIGKIGTDIQDNKCSWVINVALKNATKEQRDILDENYGRKDSEKEQKCRAVFNELNIQDIYHKYEEETASNLREKIANIDESRGFKAEVLTLFLNKIYHRKK

SEQ ID NO: 5146 - protein, 342 aa, Gossypium arboreum
MADLRSAFLNVYSQLKSELLQDPSFELTDESRQWVERMLDYNVPGGKLNRGLSVIDSYRLLKDGKELTQDEIFLTSALGWCIEWLQAYFLVLDDIMDSSHTRRGQPCWFRLPKVGMIAVNDGVILRNHITRILKNHFRGKPYYVDLLDLFNEVEFQTASGQMIDLITTLEGEKDLSKYSLQQHRRIVQYKTAYYSFYLPVACALVMCGENLDNHIDVKNILVDMGIYFQVQDDYLDCFGNPETIGKIGTDIENFKCSWLVVKALEFCNEEHNKVLYENYGETRPANVAKVKALYNELNLKGVFEDYESKSYERLVTSIEAHPSKPVQAVLKSFLGKIYKRQK

SEQ ID NO: 5147 - protein, 352 aa, Mucor circinelloides f. lusitanicus
MVAVKLQKEENRQAFLKVFPTLADEVLLELRKYNMPEDAYEWTKKMLYYNVPGGKLNRGISVVDTVRILKGDAVTEDDIFKATVLGWLIEFLQAFFLVSDDIMDASITRRGQPCWYKSEGVGMVAINDAFILESCIYIFLKKYFKKTDYYIELVELFHEVTFQTELGQLCDLITAPEDDVDLSKFSIKKHQFIVIYKTAYYSFYLPVALAMHMVGIKNEEAFKQSHDILIPLGEYFQVQDDYLDCYGAPEVIGKIGTDIMDNKCSWLINQALALANPEQRKILDENYGQKNAESEAKVKQLYLDLNIESVYKAYEEKSFNDLNALIEKLDESVGVKKMIFTEFMDKIYKRTK

SEQ ID NO: 5148 - protein, 349 aa, Mentha x piperita
MANLNGAASDLRKTFLGVYSTLKSELLNDPAFEWTDGSRQWVERMLDYNVPGGKLNRGLSVIDSYQLLKEGKDLTDDEVFLASALGWCIEWLQAYFLVLDDIMDNSHTRRGQPCWFKVPKVGMIAINDGIILRNHIPRILKKHFRSKPYYVDLLDLFNEVEFQTASGQMIDLITTIEGEKDLSKYSLPLHRRIVQYKTAYYSFYLPVACALLMAGENLENHPTVKDVLIDMGIYFQVQDDYLDCFGEPEKIGKIGTDIEDFKCSWLVVKALELCNEEQKKTLFEHYGKENPADVAKIKALYNDINLQGMFADFESKSYEKITSSIEAHPSKSVQAVLKSFLGKIYKRQK

SEQ ID NO: 5149 - protein, 342 aa, Humulus lupulus
MSGLRSKFMEVYSILKSELLNDPAFEFTDDSRQWVERMLDYNVPGGKLNRGLSVIDSYQLLKGGKELTEEEIFLTSALGWCIEWLQAYFLVLDDIMDNSVTRRGQPCWFRVPKVGLIAANDGILLRNHIPRILKKHFKGKSYYVDLLDLFNEVEFQTASGQMIDLITTIEGEKDLSKYSIPLHHRIVQYKTAYYSFYLPVACALVMAGENLDNHVDVKNVLIEMGTYFQVQDDYLDCFGHPDVIGKIGTDIEDFKCSWLVVKALEIATEEQKKMLFEHYGKGDEASVKKVKELYKALDLEGVFADYENASYQKLIKSIEAHPKEEVQAVLKSFLAKIYKRQK

SEQ ID NO: 5150 - protein, 342 aa, Humulus lupulus
MSGLRLKFMEVYSILKSELLNDPAFEFTDDSRQWVERMLDYNVPGGKLNRGLSVIDSYQLLKGGKELTEEEIFLTSALGWCIEWLQAYFLVLDDIMDNSVTRRGQPCWFRVPKVGLIAANDGILLRNHIPRILKKHFKGKSYYVDLLDLFNEVEFQTASGQMIDLITTIEGEKDLSKYSIPLHHRIVQYKTAYYSFYLPVACALVMAGENLDNHVDVKNVLIEMGTYFQVQDDYLDCFGHPDVIGTIGTDIEDFKCSWLVVKALEIATEEQKKMLFEHYGKGDEASVKKVKELYKALDLEGVFADYENASYQKLIKSIEAHPKEEVQAVLKSFLAKIYKRQK

SEQ ID NO: 5151 - protein, 343 aa, Artemisia annua
MSSTDLKSKFLKVYDTLKSELINDPAFEFDDDSRQWIEKMLDYNVPGGKLNRGLSVVDSYQLLKGGELSDDEIFLSSALGWCIEWLQAYFLVLDDIMDESHTRRGQPCWFRLPKVGMIAANDGILLRNHVPRILKKHFRGKPYYVDLVDLFNEVEFQTASGQMIDLITTLVGEKDLSKYSLSIHRRIVQYKTAYYSFYLPVACALLMFGEDLDKHVEVKNVLVEMGTYFQVQDDYLDCFGAPEVIGKIGTDIEDFKCSWLVVKALELPNEEQKKTLHENYGKKDPASVAKVKEVYHTLNLQAVFEDYEATSYKKLITSIENHPSKAVQAVLKSFLGKIYKRQK

SEQ ID NO: 5152 - protein, 343 aa, Artemisia annua
MSSIDLKSKFLKVYDTLKSELINDPAFEFDDDSRQWIEKMLDYNVPGGKLNRGLSVVDSYQLLKGGELSDDEIFLSSALGWCIEWLQAYFLVLDDIMDESHTRRGQPCWFRLLKVGMIAANDGILLRNHVPRILKKHFRGKPYYVDLVDLFNEVEFQTASGQMIDLITTLVGEKDLSKYSLSIHRRIVQYKTAYYSFYLPVACALLMFGEDLDKHVEVKNMLVEMGTYFQVQDDYLDCFGAPEVIGKIGTDIEDFKCSWLVVKALELANEEQKKVLHENYGKKDPASVAKVKEVYHTLNLQAVFEDYEATSYKKLITSIENRPSKAVQAVLKSFLGKIYKRQK

SEQ ID NO: 5153 - protein, 343 aa, Artemisia annua
MSSIDLKSKFLKVYDTLKSELINDPAFEFDDDSRQWIEKMLDYNVPGGKLNRGLSVVDSYQLLKGGELSDDEIFLSSALGWCIEWLQAYFLVLDDIMDESHTRRGQPCWFRLLKVGMIAANDGILLRNHVPRILKKHFRGKPYYVDLVDLFNEGVIQTASGQMIDLIPTLVGEKDLSKYSLSIHRRIVQYKTAYYSFYLPVACALLMFGEDLDKHVEVKNMLVEMGTYFQVQDDYLDCFGAPEVIGKIGTDIEDFKCSWLVVKALELANEEQKKVLHENYGKKDPASVAKVKEVYHTLNLQAVFEDYEATSYKKLITSIENRPSKAVQAVLKSFLGKIYKRQK

SEQ ID NO: 5154 - protein, 149 aa, Artemisia annua
  unsure (1)..(149): unsure at all Xaa locations
DDIMDESHTRRGQPCWFRLPKVGMIAANDGILLRNHVPRILKKHFRGKPYXVDLVDLFNEVEFQTASGQMIDLITTLVGEKDLSKYSLSIHRRIVQYKTAYYSFYLPVACALLMFGEDLDKHVEVKNVLVEMGTYFQVQDDYLDCFGAP

SEQ ID NO: 5155 - protein, 342 aa, Parthenium argentatum
MSTDIRSKFLQVYDTLKSELINDPAFEFDDDSRQWIEKMLDYNVPGGKLNRGLSVIDSYQLLKGGKLTDDEIFHASALGWCVEWLQAYFLVLDDIMDESHTRRGQPCWFRLPKVGMIAANDGIILRNHVPRILKKHFRGKPYYVDLVDLFNEVEFQTASGQMIDLITTLVGEKDLSKYSLSIHRRIVQYKTAYYSFYLPVACALLMFGEDLEKHVEVKNVLVEMGTYFQVQDDYLDCFGAPEVIGKIGTDIEDFKCSWLVVKALELANEEQKKVLHENYGKKDPSPVAKVKELYNTLNLQGVFEDYENTSYKKLITSIEGHPSKAVQAVLKSFLGKIYRRQK

SEQ ID NO: 5156 - protein, 342 aa, Parthenium argentatum
MSSDLKSRFLQVYDTLKSELINDPAFEFDDDSRQWVEKMLDYNVPGGKLNRGLSVIDSYQLLKGGELTDNEIFLAAALGWCIEWLQAYFLVLDDIMDESHTRRGQPCWFRLPKVGMIAANDGIILRNNVPRILKKHFRGKPYYVDLLDLFNEVEFQTASGQMIDLITTLVGEKDLSKYSLSIHRRIVQYKTAYYSFYLPVACALLMFGEDLEKHEEVKNVLVEMGTYFQVQDDYLDCFGAPEVIGKIGTDIEDFKCSWLVVKALELSNEEQKKILHENYGKKDPSSVAKVKELYHTLNLQGVFEDYENTSYKKLITSIEGHPSKAVQAVLKSFLGKIYKRQK

SEQ ID NO: 5157 - protein, 105 aa, Parthenium argentatum
FNEVEFQTASGQMIDLITTLVGEKDLSKYLLPIHRRIVQYKTAYYSFYLPVACALLMAGESLDNHVNVKNILIEMGIYFQVQDDYLDCFADPEVLGKIGTDIQEF

SEQ ID NO: 5158 - protein, 369 aa, Plasmodium falciparum 3D7
MYDRYRDVFINHINDYVLEDDIKIIISKYYKLLFDYNCLGGKNNRGILVILIYEYVKNRDINCNEWEKVACIAWCIEILQASFLVADDIMDKGETRRNKHCWYLLKDVEIKNAVNDVFLLYNAIYKLLDVYLRNDNCYLDLITSFREATLKTIVGQHLDTNIFSDKYSHIDKDIDVNNINISQENKININMLNFKVYQNIIIHKTAYYSFFLPIVCGMQMGGISLDNLLYKKVENIAILMGEYFQVHDDYIDTFGDSKKTGKVGSDIQNNKLTWPLIKAFELCSQPEKEDIIRNYGKDNVTCIKFINDIYEHYNIRDHYVEYEKKQKMKILEYRICLEIRNGHFVYRRLRDNNLNNFCLNMIKFKKKKK

SEQ ID NO: 5159 - protein, 342 aa, Arabidopsis thaliana
MADLKSTFLDVYSVLKSDLLQDPSFEFTHESRQWLERMLDYNVRGGKLNRGLSVVDSYKLLKQGQDLTEKETFLSCALGWCIEWLQAYFLVLDDIMDNSVTRRGQPCWFRKPKVGMIAINDGILLRNHIHRILKKHFREMPYYVDLVDLFNEVEFQTACGQMIDLITTFDGEKDLSKYSLQIHRRIVEYKTAYYSFYLPVACALLMAGENLENHTDVKTVLVDMGIYFQVQDDYLDCFADPETLGKIGTDIEDFKCSWLVVKALERCSEEQTKILYENYGKAEPSNVAKVKALYKELDLEGAFMEYEKESYEKLTKLIEAHQSKAIQAVLKSFLAKIYKRQK

SEQ ID NO: 5160 - protein, 384 aa, Arabidopsis thaliana
MSVSCCCRNLGKTIKKAIPSHHLHLRSLGGSLYRRRIQSSSMETDLKSTFLNVYSVLKSDLLHDPSFEFTNESRLWVDRMLDYNVRGGKLNRGLSVVDSFKLLKQGNDLTEQEVFLSCALGWCIEWLQAYFLVLDDIMDNSVTRRGQPCWFRVPQVGMVAINDGILLRNHIHRILKKHFRDKPYYVDLVDLFNEVELQTACGQMIDLITTFEGEKDLAKYSLSIHRRIVQYKTAYYSFYLPVACALLMAGENLENHIDVKNVLVDMGIYFQVQDDYLDCFADPETLGKIGTDIEDFKCSWLVVKALERCSEEQTKILYENYGKPDPSNVAKVKDLYKELDLEGVFMEYESKSYEKLTGAIEGHQSKAIQAVLKSFLAKIYKRQK

SEQ ID NO: 5161 - protein, 343 aa, Arabidopsis thaliana
METDLKSTFLNVYSVLKSDLLHDPSFEFTNESRLWVDRMLDYNVRGGKLNRGLSVVDSFKLLKQGNDLTEQEVFLSCALGWCIEWLQAYFLVLDDIMDNSVTRRGQPCWFRVPQVGMVAINDGILLRNHIHRILKKHFRDKPYYVDLVDLFNEVELQTACGQMIDLITTFEGEKDLAKYSLSIHRRIVQYKTAYYSFYLPVACALLMAGENLENHIDVKNVLVDMGIYFQVQDDYLDCFADPETLGKIGTDIEDFKCSWLVVKALERCSEEQTKILYENYGKPDPSNVAKVKDLYKELDLEGVFMEYESKSYEKLTGAIEGHQSKAIQAVLKSFLAKIYKRQK

SEQ ID NO: 5162 - protein, 343 aa, Arabidopsis thaliana
METDLKSTFLNVYSVLKSDLLHDPSFEFTNESRLWVDRMLDYNVRGGKLNRGLSVVDSFKLLKQGNDLTEQEVFLSCALGWCIEWLQAYFLVLDDIMDNSVTRRGQPCWFRVPQVGMVAINDGILLRNHIHRILKKHFRDKPYYVDLVDLFNEVELQTACGQMIDLITTFEGEKDLSKYSLSIHRRIVQHKTAYYSFYLPVACALLMAGENLENHIDVKNVLVDMGIYFQVQDDYLDCFADPETLGKIGTDIEDFKCSWLVVKALERCSEEQTKILYENYGKTDPSNVAKVKDLYKELDLEGVFMEYESKSYEKLTGAIEGHQSKAIQAVLKSFLAKIYKRQK

SEQ ID NO: 5163 - protein, 342 aa, Malus x domestica
MADLKSKFLKVYSVLKSELLEDPAFDFTNDSRQWVERMLDYNVPGGKLNRGLSVIDSYQLLQQGRELTEDEIFLASALGWCIEWLQAFFLVLDDIMDGSHTRRGQPCWFRLPKVGMIAVNDGVVLRNHIPRILRKYFREKPYYVDLLDLFNEVEFQTASGQMIDLITTIEGEKDLSKYSLSIHRRIVQYKTAYYSFYLSVACALLMSGEELEKHIDVKNILVEMGIYFQVQDDYLDCFGDPETIGKIGTDIEDFKCSWLVVKALELCNEEQKKVLHENYGKPDPENVATVKALYKELDIEGVFADYESKSYKKLTSWIEGHPSKAVQSVLKSFLGKIYKRQK

SEQ ID NO: 5164 - protein, 342 aa, Glycine max
MADLKSTFLNVYSVLKSELLHDPAFEFSDDARNWVDRMLDYNVPGGKLNRGLSVIDSYRLLKEGQALNDDEIFHASALGWCIEWLQAYFLVLDDIMDNSHTRRGQPCWFRVPKVGMIAANDGVLLRNHIPRILKKHFRGKPYYVDLLDLFNEVEFQTASGQMIDLITTLEGEKDLSKYTLTLHRRIVQYKTAYYSFYLPVACALLMAGEDLDNHVDVKNILVEMGTYFQVQDDYLDCFGDPQTIGKIGTDIEDFKCSWLVVKALELSNEQQKKVLHENYGKADPENVAKVKALYNELNLQAVFEEYENGSYAKLVSSIEAHPSKAVQAVLKSFLAKIYKRQK

SEQ ID NO: 5165 - protein, 342 aa, Glycine max
MADLKSTFLNVYSVLKSELLHDPAFEFSDDARHWVDRMLDYNVPGGKLNRGLSVIDSYRLLKEGQALNDDEIFLASALGWCIEWLQAYFLVLDDIMDNSHTRRGQPCWFRVPKVGMIAANDGVLLRNHIPRILRKHFRGKPYYIDLLDLFNEVEFQTASGQMIDLITTLEGEKDLSKYTLTLHRRIVQYKTAYYSFYLPVACALLMAGEDLDKNVDVKNILVEMGTYFQVQDDYLDCFGDPQTIGKIGTDIEDFKCSWLIVKALELSNEQQKKVLQENYGKPDPENVAKVKALYNELNLQGVFEEYESGSYAKLVSSIEAHPIKAVQAVLKSFLAKIYKRQK

SEQ ID NO: 5166 - protein, 187 aa, Glycine max
  unsure (1)..(187): unsure at all Xaa locations
XARGVLQLQAYFLVLDDIMDNSHTRRGQPCWFRVPKVGMIAANDGVLLRNHIPRILKKHFRGKPYYVDLLDLFNEVEFQTASGQMIDLITTLEGEKDLSKYTLTLHRRIVQYKTAYYSFYLPVACALLMAGEXDLDNHVDVKNILVEMGTYFQVQDDYLDCFGDPHTTGKVSISDNGFXKHQFLFTX

SEQ ID NO: 5167 - protein, 159 aa, Glycine max
RRIVQYKTAYYSFYLPVACALLMAGEDLDKNVDVKNILVEMGTYFQVQDDYLDCFGDPQTIGKIGTDIEDFKCSWLIVKALELSNEQQKKVLQENYGKPDPENVAKVKALYNELNLQGVFEEYESGSYAKLVSSIEAHPIKAVQAVLKSFLAKIYKRQK

SEQ ID NO: 5168 - protein, 179 aa, Glycine max
  unsure (1)..(179): unsure at all Xaa locations
MADLKSTFLNVYSVLKSEXLHDPAFEFSDDARNWVDRMLDYNVPGGKLNRGLSVIDSYRLLKEGQALNDDEIFHASALGWCIEWLQAYFLVLDDIMDNSHTRRGQPCWFRVPKVGMIAANDGVLLRNHIPRILKKHFRGKPYYVDLLDLFNEVEFQTASGQMIDLITTXEGEKDLSEYY

SEQ ID NO: 5169 - protein, 221 aa, Glycine max
  unsure (1)..(221): unsure at all Xaa locations
MADLKSTFLNVYSVLKSELLHDPAFEFSDDARHWVDRMLDYNVPGGKLNRGLSVIDSYRLLKEGQALNDDEIFLASALGWCIEWLQAYFLVLDDIMDNSHTRRGQPCWFRVPKVGMIAANDGVLLRNHIPRILRKHFRGKPYYVDLLDLFNEVEFQTASGQMIDLITTLEGEKDLSKYTLTLXVLKKKKKRTIRXKYYXWAAFLINMKCRLICECDYSNYX

SEQ ID NO: 5170 - protein, 116 aa, Glycine max
  unsure (1)..(116): unsure at all Xaa locations
XRDDRRALGWCIEWLQAYFLVLDDIMDNSHTRRGQPCWFRVPKVGMIAANDGVLLRNHIPRILKKHFRGKPXYYVDLLDLFNEVEFQTASGQMIDLIITLEGEKDLSKYTLTLXVL

SEQ ID NO: 5171 - protein, 130 aa, Glycine max
  unsure (1)..(130): unsure at all Xaa locations
XAGKLNRGLSVIDSYRLLKEGQALNDDEIFLASALGWCIEWLQAXXXXXXXXXXNSHTRRGQPCWFRVPKVGMIAANDGVLLRNHIPRILRKHFRGKPYYIDLLDLFNEVEMPKFKLCGVHLVSMLIVDX

SEQ ID NO: 5172 - protein, 177 aa, Glycine max
  unsure (1)..(177): unsure at all Xaa locations
IXLPAYPHEFDDVMNNSHTTLGTSCCIRTSKEVMIVSNAAFLLRNQIMQSLKKHLGREPYNEHLMDMLKQAQLLTAEEQMIDLMTSLXGXIDLSTYTLTLCQHIVQNKTAYSSFHRSVACALHMAGDDNDNHVTVTNIRAEIGTYLRVQDDYMDTGGDPXTIEEMCTYIEHVMCSCX

SEQ ID NO: 5173 - protein, 134 aa, Glycine max
  unsure (1)..(134): unsure at all Xaa locations
MAAAXQGEASTGATTTATFRRVYETLKAELLRDGYFHFNDDALRWLDAMLDYNVLGGXLNRGXXXVESXKSLKAGSEPSEEEEFLACVLGWGIEWLQAYFLILDDIMDNSQTRRGKPCWYRLPKFCLXYLEXXG

SEQ ID NO: 5174 - protein, 119 aa, Glycine max
  unsure (1)..(119): unsure at all Xaa locations
MADLKSTFLNVYSVLKSELLHDPAFEFSDDARNWVDRMLDYNVPGGKLNRGLSVIDSYRLLKERQALNDDEIFHASALGWSIEWLQAYFLVLDDIMXMIAANDGVLLRNHIPRILKKHF

SEQ ID NO: 5175 - protein, 167 aa, Glycine max
  unsure (1)..(167): unsure at all Xaa locations
XDCFGDPQTNGNIGPEIEAFQCSWLVVKALEFSNEQPKXVLHEHSGKADPQHVGQLKALYNELNPQGQFREYXNRSYPKLVSSSEGHPNKPVQAELKSLLGQISKRHKQSRVKVRARTVAHAIQTSVVISIYPRIRFPGMEIFEKMILLPVTLFNISFLRIRSCGFL

SEQ ID NO: 5176 - protein, 342 aa, Lupinus albus
MADLRSTFLNVYSVLKSELLHDPAFEFSPDSRQWLDRMLDYNVPGGKLNRGLSVIDSYRLLKDGHELNDDEIFLASALGWCIEWLQAYFLVLDDIMDNSHTRRGQPCWFRVPKVGMIAANDGVLLRNHIPRILKKHFRGKPYYADLLDLFNEVEFQTASGQMIDLITTLEGEKDLSKYTLSLHRRIVQYKTAYYSFYLPVACALLMVGENLDNHIDVKNILVDMGTYFQVQDDYLDCFGAPETIGKIGTDIEDFKCSWLVVKALELSNDEQKKVLYDNYGKPDPANVAKVKALYDELNLQGVFTEYESKSYEKLVTSIEAHPSKAVQALLKSFLGKIYKRQK

SEQ ID NO: 5177 - protein, 342 aa, Lupinus albus
MADPKSSFLNVYSILKSELLQDPAFEFSTDSRQWVERMLDYNVPGGKLNRGLSVIDSYKLLKDGQELNDEEIFLASALGWCIEWLQAYFLVLDDIMDNSHTRRGHPCWFRVPKVGMIAPNDGVVLRNHIPRILKKHFRGKPYYVDLLDLFNEVEFQTASGQMIDLITTLEGEKDLSKYTLSLHRRIVQYKTAYYSFYLPVACALLMVGENLDNHTDVKNILVEMGTYFQVQDDYLDCFGAPETIGKIGTDIEDFKCSWLVVKALELSNEEQKKVLYENYGKPDPANVAKVKTLYNELNLEGAYADYESKSYEKLVTCIEGHPSKAVQGVLKSFWAKIYKRQK

SEQ ID NO: 5178 - protein, 279 aa, Phaseolus lunatus
ITPSSKLTLTKGNKSWSSTAVAAALELVDPPGCRNSAAADPEDEIFLASALGWCIEWLQAYFLVLDDIMDNSHTRRGQPCWFRVPKVGMIAANDGVLLRNHIPRILKKHFRGKPYYVDLLDLFNEVEFQTASGQMIDLITTLQGEKDLSKYTLTLHRRIVQYKTAYYSFYLPVACALLMAGDNLDNHVDVKNILVEMGTYFQVQDDYLDCFGDPETIGKIGTDIEDFKCSWLVAKALELSNEQQKKVLYDNYGNPDPENVAKVKALYNELNLQGAFEEV

SEQ ID NO: 5179 - protein, 342 aa, Hevea brasiliensis
MADLKSTFLKVYSVLKQELLEDPAFEWTPDSRQWVERMLDYNVPGGKLNRGLSVIDSYKLLKEGQELTEEEIFLASALGWCIEWLQAYFLVLDDIMDSSHTRRGQPCWFRVPKVGLIAANDGILLRNHIPRILKKHFRGKAYYVDLLDLFNEVEFQTASGQMIDLITTLEGEKDLSKYTLSLHRRIVQYKTAYYSFYLPVACALLIAGENLDNHIVVKDILVQMGIYFQVQDDYLDCFGDPETIGKIGTDIEDFKCSWLVVKALELCNEEQKKVLYEHYGKADPASVAKVKVLYNELKLQGVFTEYENESYKKLVTSIEAHPSKPVQAVLKSFLAKIYKRQK

SEQ ID NO: 5180 - protein, 351 aa, Oryza sativa (japonica cultivar-group)
MAAAGAGASGPAAETAAATFRRVYGTLKAELLKDPSFDFNDDAIQWLESMLDYNVLGGKLNRGLAVVESYKILKAASATEPSEEELFLACILGWGIEWLQAYFLVLDDIMDNSQTRRGKPCWFRLPKVGLIAINDGLVLRSQISRIFRRYFRGKSYYVDLLDLFNEVEIQTTSGQLLDQITTNEGRKDLNKYRRIVEYKTAYYSFYLPVACALLLFDESLDNYAQVKHILVEMGVYFQSQDDYLDCFGEPEIIGKIGSDIEDFKCSWLFVQALERADEKQKGVLFENYGKSDPACVAKVKDLYNELHLQRVFSEYERESYEKLISAIEAQPNEAVRAVLKSFLHKIYKRSK

SEQ ID NO: 5181 - protein, 186 aa, Oryza sativa (japonica cultivar-group)
TASGQLLDLITTHEGEKDLNKYNIGVHRRIVQYKTSYYSFYLPVACALLLSGEDLTKYGAVEDILVKMGIYFQVQDDYLDCYGDPKFIGKIGTDIEDYKCSWLVVQALERADESQKSVLFENYGKKDPACVAKVKSLYRELNLEAVFLDYENESYKKLIADIEAQPSIAVQNVLKSFLHKIYKRQK

SEQ ID NO: 5182 - protein, 342 aa, Capsicum annuum
MSDFKSKFMEAYYVLKSELLNDPGFEFTDDSREWVDKMLEYNVPGGKLNRGLSVIDSYSLVDDGKELTRDEIFKASALGWCIEWLQAYFLVLDDIMDNSHTRRGQPCWYKVEKVGMIAVNDGILLRNHISRILKNHFRPKSYYVDLLDLFNEVEFQTASGQMIDLITTHVGEKDLSKYSLPIHCRIVQYKTAYYSFYLPVACALLMAGENLDNHVDVKNILIEMGIYFQVQDDYLDCFADPEVLGKIGTDIQDFKCSWLVVKALELCNEEQKKILYENYGKDDAACIAKIKTLYNDLKLEEVFLEYEKKTYEKLANSIAAHPSKAVQAVQLSFLGKIYKRQK

SEQ ID NO: 5183 - protein, 342 aa, Lycopersicon esculentum
MADLKKKFLDVYSVLKSDLLEDTAFEFTDDSRKWVDKMLDYNVPGGKLNRGLSVIDSLSLLKDGKELTADEIFKASALGWCIEWLQAYFLVLDDIMDGSHTRRGQPCWYNLEKVGMIAINDGILLRNHITRILKKYFRPESYYVDLLDLFNEVEFQTASGQMIDLITTLVGEKDLSKYSLSIHRRIVQYKTAYYSFYLPVACALLMVGENLDKHVDVKKILIDMGIYFQVQDDYLDCFADPEVLGKIGTDIQDFKCSWLVVKALELCNEEQKKILFENYGKDNAACIAKIKALYNDLKLEEVFLEYEKTSYEKLTTSIAAHPSKAVQAVLLSFLGKIYKRQK

SEQ ID NO: 5184 - protein, 138 aa, Nicotiana tabacum
AFFLVLDDIMDGSHTRRGQPCWFRLPKVGMIAANDGILLRNHIPRILKNHFRGKPYYVDLLELFNEVEFQTASGQMIDLITTLVGEKDLSKYLLPIHRRIVQYKTAYYSFYLPVACALLMAGESLDNHVNVRTYLLKW

SEQ ID NO: 5185 - protein, 341 aa, Helianthus annuus
MASDLKSKFLHVYQTLKSELLNDPAFEFHHDSRQWIDKMLDYNVPGGKLNRGLSVVDSYQLLKGAELTDDEIFLASALGWCIEWLQAYFLVLDDIMDGSHTRRGQPCWFRLPKVGMIAANDGLILRNHVPRILKKHFRGKPYYVDLVDLFNEVEFQTASGQMIDLITTLVGEKDLSKYSLSIHRRIVQYKTAYYSFYLPVACALLMFGEDLDNHVEVKNVLVEMGTYFQVQDDYLDCFGAPEVIGKIGTDIEDFSSWLVVKALELANEEQKKVLHENYGKKDPSSVAKVKELYNTLNLQGVFEDYESTSYKKLITSIEGHPSKAVQAVLKSFLGKIYKRQK

SEQ ID NO: 5186 - protein, 348 aa, Eucommia ulmoides
MAELKKEFLNVYSVLKKELLHDPAFSLTEDSRNWVERMLDYNVPGGKLNRGLSVVDSYKLLKELSSSKKGAQLTESEIFHSSVLGWCIEWLQACALVLDDIMDSSHTRRGQMCWYKLPKVGMIAINDGLILRNHVPRILKKHFRSKPYYLELLDLFHEVECQTVGGQMIDLITTLVGEIDLSEYSLPTHRQITVSKTSYYSFYLPVACALLMTGEKLESHSGMKDILIEMGSYFQVQDDYLDCFGDPEVIGKIGSDIEDFKCTWLVVKALELCNEEQKKILYDNYGKKDPESVARVKDLYKTLKLQDVFEEYEKKTHEKLNKSIDAYPSKAVQAVLQSFLAKIHRRLK

SEQ ID NO: 5187 - protein, 342 aa, Eucommia ulmoides
MSDLKSKFLEVYSVLKSELLNDPAFDFTDDSRLWVERMLDYNVPGGKLNRGLSVIDSFKLLKEGKEPTDEEIFLACVLGWCIEWLQAYFLVLDDIMDSSHTRRGQPCWFRLPKVGMIAVNDGLILRNHIPRILKKHFKGKPYYVDLLDLFNEVEFQTASGQMIDLITTLVGEKDLSKYSLPLHHRIVQYKTAYYSFYLPVACALVMSGENLDNHVDVKNILVEMGTYFQVQDDYLDCFGDPKFIGKIGTDIEDFKCSWLVVKALELANDEQKKLLHENYGKEDPECVAKVKKLYETLNLQDVFGEYERQSHGKLIKAIEGHSNKAVQFVLKSSLEKIYQRQK

SEQ ID NO: 5188 - protein, 319 aa, Eucommia ulmoides
MAELKKEFLNVYSVLKKELLHDPAFSLTEDSRNWVERMLDYNVPGGKLNRGLSVVDSYKLLKELSSSKKGAQLTESEIFHSSVLGWCVEWLQACALVLDDIMDSSHTRRGQMCWYKLPKVGMIAINDGLILRNHVPRILKKHFRSKPYYLELLDLFHEVECQTVGGQMIDLITTLVGEIDLSEYSLPTHRQITVSKTSYYSFYLPVACALLMTGEKLESHSGMKDILIEMGSYFQVQDDYLDCFGDPEVIGKIGSDIEDFKCTWLVVKALELCNEEQKKILYDNYGKKDPESVARVKDLYKTLKLQDVFEETRKRRTRS

SEQ ID NO: 5189 - protein, 305 aa, Eucommia ulmoides
MLDYNVPGGKLNRGLSVVDSYKLLKELSSSKKGAQLTESEIFHSSVLGWCIEWLQACALVLDDIMDSSHTRRGQMCWYKLPKVGMIAINDGLILRNHVPRILKKHFRSKPYYLELLDLFHEVECQTVGGQMIDLITTLVGEIDLSEYSLPTHRQITVSKTSYYSFYLPVACALLMTGEKLESHSGMKDILIEIQDDYLDCFGDPEVIGKIGSDIEDFKCTWLVVKALELCNEEQKKILYDNYGKKDPESVARVKDLYKTLKLQDVFEEYEKKTHEKLNKSIDAYPSKAVQAVLQSFLAKIHRRLK

SEQ ID NO: 5190 - protein, 135 aa, Eucommia ulmoides
FLVLDDIMDSSHTRRGQPCWFRLPKVGMIAVNDGLILRNHIPRILKKHFKGKPYYVDLLDLFNEVEFQTASGQMIDLITTLVGEKDLSKYSLPLHHRIVQYKTAYYSFYLPVACALVMSGENLDNHVDVKNILVE

SEQ ID NO: 5191 - protein, 382 aa, Dictyostelium discoideum
MNNQSLQRAAMISEHLAPTSELNMNQTSAPIKTAKEELADFVEIFPILTNEILKELPGMDMPPQTIAWVEKMINVNVSGGKMNRGLTVLHSLQLLVEGRQLSRSEIFLANVLGWCVEWLQAFFLVADDIMDQSITRRGQPCWYRQANPISNNGTIGSIAINDSFILESCIYILIKKYFRNEPYYADILDIFHETSYQTELGQLLDLTTQPNRGDFSLFTLNTYRRIVKYKTAYYSFYLPVALAMLMAGITSTPAFSTAKDILLPMGEFFQVQDDFLDCYGSPAVIGKIGRDIEENKCSWMICQAILNGTPEQINLLKKHYGLDNPTDVELVKKIYGEIGLKKIFKDYEDESYAFLISKIKSVRIMPQEVFIKLLSKIYKRDL

SEQ ID NO: 5192 - protein, 353 aa, Oryza sativa; identical to SEQ ID NO: 430

SEQ ID NO: 5193 - protein, 353 aa, Oryza sativa; identical to SEQ ID NO: 430

SEQ ID NO: 5194 - protein, 355 aa, Oryza sativa
MAAANGSACGGGGVDKEKEEFKQIYGVLKEELLRDPAFEFTDSSRQWIDRMLDYNVPGGKCNRGLSVVDSYKLLKGTNVLSQEDMFLASTLGWCVEWLQAYFLVLDDIMDDSHTRRGQPCWFRVPQVGSIAINDGIILRNHITRMLRLHFRGKLYYADLLDLFNEVEFKTASGQLLDLITTHEGEKDLNKYNIGVHRRIVQYKTSYYSFYLPVACALLLSGEDLTKYGAVEDILVKMGIYFQVQDDYLDCYGDPKFIGKIGTDIEDYKCSWLVVQALERADESQKSVLFENYGKKDPACVAKVKSLYRELNLEAVFLDYENESYKKLIADIEAQPSIAVQNVLKSFLHKIYKRQK

SEQ ID NO: 5195 - protein, 354 aa, Oryza sativa
MAAAGAGASGPAAETAAATFRRVYGTLKAELLKDPSFDFNDDAIQWLESMLDYNVLGGKLNRGLAVVESYKILKGATEPSEEELFLACILGWGIEWLQAYFLVLDDIMDNSQTRRGKPCWFRLPKVGLIAINDGLVLRSQISRIFRRYFRGKSYYVDLLDLFNEVEIQTTSGQLLEPITTNEGRKDLNKYNVHVYRRIVEYKTAYYSFYLPVACALLLFGESLDNYAQVKHILVEMGVYFQSQDDYLDCFGEPEIIGKIGSDIEDFKCSWLFVQALERADEKQKGVLFENYGKSDPACVAKVKDLYNELHLQRVFSEYERESYEKLISAIEAQPNEAVRAVLKSFLHKIYKRSK

SEQ ID NO: 5196 - protein, 408 aa, Oryza sativa
  unsure (1)..(408): unsure at all Xaa locations
MGALAASIASHLPSGVSAAVAALAASPGEVVRRAAGLEDELRELLRLNGGGRGRGGAAAEQGQGEQTRDRFVRAYERLKSELLNDRAFNFDFTEETRQWVAKMMDYNVPGGKLNRGLSVVDSYMLLRQGTEVDDEDFYLACVLGWCVEWLQASALVLDDITDNAYTRRDNLCWYKLPTVGMSAINDGVLLKCHVQAIIKRYFKEKFYFLDLMELXWNEIGLQTAMGQMLDLITTHTGAKDLARYRIQGYRRIVKYKTSYYSFYLPVACALLLNGARLSDYVELKNVLIEMGVYFQIQDDYLDCFGDPEVIGKVGTDIEDYKCSWLIVQAMELANENEMKILYENYGKSDPKCVAEVKSVYRELDLQDIFLEYESRVYKHLVSTIDAETDRAIRDILKSFLKKIYRRKK

SEQ ID NO: 5197 - protein, 495 aa, Oryza sativa
MTMRTTRLTATVPINIWIHTNTNGIVVLARLLPRDYKNGSFAAAPAAPPPPVHLGRRRCRCRDRDPRLDRLPQEPAAAAAGVAWHRGRPARAFSLFCAAAAAAGRSVFLAQAASMAAANGSACGGGGVDKEKEEFKQIYGVLKEELLRDPAFEFTDSSRQWIDRVMLFSPSPFSSCVADRMCFSSRIVSSGFSVGFRSGKCNRGLSVVDSYKLLKGTNVLSQEDMFLASTLGWCVEWLQAYFLVLDDIMDDSHTRRGQPCWFRVPQVGSIAINDGIILRNHITRMLRLHFRGKLYYADLLDLFNEVEFKTASGQLLDLITTHEGEKDLNKYNIGVHRRIVQYKTSYYSFYLPVACALLLSGEDLTKYGAVEDILVKMGIYFQVQDDYLDCYGDPKFIGKIGTDIEDYKCSWLVVQALERADESQKSVLFENYGKKDPACVAKVKSLYRELNLEAVFLDYENESYKKLIADIEAQPSIAVQNVLKSFLHKIYKRQK

SEQ ID NO: 5198 - protein, 495 aa, Oryza sativa; identical to SEQ ID NO: 5197

SEQ ID NO: 5199 - protein, 367 aa, Oryza sativa
  unsure (1)..(367): unsure at all Xaa locations
XGRGKSQATSPQIDRDSRFVQAYGRLRDDLVGDDSCELTDEARRWLAQMIDYNVPGGKLNRGLSVIDSYLLLKQGSEVTEDDFFLACVLGWCVEWFQACALLLDDIMDDSHTRRDQICWYRRPEVGLRGINDGIILKCHILIMIKKYFREKPYFLDILEIWSEIALQTSLGQMLDLYSTHTGADDLAKYSIEGYRRIVKYKTAYYSFYLPVANALLLSGAKLEDFSGLKDILIEMGIYFQIQDDYLDCFADPNTIGKIGTDIEDHKCSWLIVQALGHADNNQIEVLHRNYGKKDSSSVSEVKRTYAALDLKDIFSEFERRCYNHLDQQIIPLPAFSFTGIGDGHAAEAQKRHGFSLRAHPPLRPCVA

SEQ ID NO: 5200 - protein, 338 aa, Oryza sativa
MAAAVVANGASGDSSKAAFAEIYSRLKEEMLEDPAFEFTDESLQWIDRMLDYNVLGGKCNRGISVIDSFKMLKGTDVLNKEETFLACTLGWCIEWLQAYFLVLDDIMDNSQTRRGQPCWFRVPQVGLIAVNDGIILRNHISRILQRHFKGKLYYVDLIDLFNEVEFKTASGQLLDLITTHEGEKDLTKYNLTVHRRIVQYKTAYYSFYLPVACALLLSGENLDNFGDVKNILVEMGTYFQVQIGTDIEDYKCSWLVVQALERADENQKHILFENYGKPDPECVAKVKDLYKELNLEAVFHEYERESYNKLIADIEAHPNKAVQNVLKSFLHKIYKRQK

SEQ ID NO: 5201 - protein, 463 aa, Oryza sativa
MTMRTTRLTATVPINIWIHTNTNGIVVLARLLPRDYKNGSFAAAPAAPPPPVHLGRRRCRCRDRDPRLDRLPQEPAAAAAGVAWHRGRPARAFSLFCAAAAAAGRSVFLAQAASMAAANGSACGGGGVDKEKEEFKQIYGVLKEELLRDPAFEFTDSSRQWIDRVMLFSPSPFSSCVADRMCFSSRIVSSGFSVGFRSGKCNRGLSVVDSYKLLKGTNVLSQEDMFLASTLGWCVEWLQAYFLVLDDIMDDSHTRRGQPCWFRVPQVGSIAINDGIILRNHITRMLRLHFRGKLYYADLLDLFNEVEFKTASGQLLDLITTHEGEKDLNKYNIGVHRRIVQYKTSYYSFYLPDDYLDCYGDPKFIGKIGTDIEDYKCSWLVVQALERADESQKSVLFENYGKKDPACVAKVKSLYRELNLEAVFLDYENESYKKLIADIEAQPSIAVQNVLKSFLHKIYKRQK

SEQ ID NO: 5202 - protein, 471 aa, Oryza sativa
MGALAASIASHLPSGVSAAVAALAASPGEVVRRAAGLEDELRELLRLNGGGRGRGGAAAEQGQGEQTRDRFVRAYERLKSELLNDRAFNFDFTEETRQWVAKMMDYNVPGGKLNRGLSVVDSYMLLRQGTEVDDEDFYLACVLGWCVEWLQASALVLDDITDNAYTRRDNLCWYKLPTVGMSAINDGVLLKCHVQAIIKRYFKEKFYFLDLMELWNETAMGQMLDLITTHTGAKDLARYRIQGYRRIVKYKTSYYSFYLPVACALLLNGARLSDYVELKNDDYLDCFGDPEVIGKAMELANENEMKILYENYGKSDPKCVAEVKSVYRELDLQDIFLEYESRVYKHLVSTIDAETDRAIRDILKSFLKKIYRRKNGASGGRQKRAGRSGIGRRDGPHRGSTLPSESMMSDKLQMLKRGMCPVIASHGPTDRLAIVAFSGAAKRLLPLRRMTRQIVDRLRRPGPGTAAGRLH

SEQ ID NO: 5203 - protein, 900 aa, Oryza sativa
MRPSPALAGGGRTVANLLSATEWMLPSPATQVHTISVLPSHSPPSPPHHFAFSNLTTAPKRNGGKGEEEGRPRFEVVRDDLLHPLANGNKARKLDALLPLLRRRGATDVVRAHRCIPLHPALITSCFSNLMVSSLFWTSDCRDEMLYNHARKVAGTGGTVLWADDISKEDFVLDEDNGCEIGSRRVVIIKEGAGDVQALLGVIRLVEYLYNLSSFHKHENVHVVVDAGTGTTAVGLALGAVCLGLHWRVTAVMLADTLERYKEREKSLISDFKKLCHNNYHEMVGENDIGDSLVEWVERFSPRRFGKVLNGEIALCRQIAQQTGILLDPMYTLAGWEQAVDLCVGDSRTKVVMIHTGGTLGFCGLAQRRRERRRRQRRRRRPHESAAAGVARSSPPTHARTARWRAHGVTNRRNRSKFLDATRHDVYVTTPTARDRLGRARARHARTPDATQRKPPAPSRRRHRDGWAARCSSVLRRSSALPAARGRGSARRSGGLGSMAAAGAGASGPAAETAAATFRRVYGTLKAELLKDPSFDFNDDAIQWLESMLDYNVLGGKLNRGLAVVESYKILKGATEPSEEELFLACILGWGIEWLQAYFLVLDDIMDNSQTRRGKPCWFRLPKVGLIAINDGLVLRSQISRIFRRYFRGKSYYVDLLDLFNEVACALLLFDESLDNYAQVKHILVEMGVYFQSQDDYLDCFGEPEIIGKIGSDIEDFKCSWLFVQALERADEKQKGVLFRVFSEYERESYEKLISAIEAQPNEAVRAVLKSFLHKIYKRSNINTRSDRSARHGFDPAGRMRGTAVPRNHSAAPTSGTAEPSRGTGADQRSRMPVPVPRHGYAGPRSPPRSRVTGQRDRPYSALPTCGTEAMSRVCNGPTFPSCGRDSAADATEPNDADGL

SEQ ID NO: 5204 - protein, 172 aa, Oryza sativa
  unsure (1)..(172): unsure at all Xaa locations
XADDLAKYSIEVRRRIVKYKTAYYSFYLPVANALLLSGAKLEDFSGLKDILIEMGIYFQIQDDYLDCFADPNTIGKIGTDIEDHKCSWLIVQALGHADNNQIEVLHRNYGKKDSSSVSEVKRTYAALDLKDIFSEFERRCYNHLVTSIEAQKDHAAREILISFLKKIHQRKK

SEQ ID NO: 5205 - protein, 240 aa, Oryza sativa
  unsure (1)..(240): unsure at all Xaa locations
MAAANGSACGGGGVDKEKEEFKQIYGVLKEELLRDPAFEFTDSSRQWIDRMLDYNVPGGKCNRGLSVVDSYKLLKGTNVLSQEDIFKLTFSCLMISWMILTLDVVSLXLVSGASEENFTMLISLIYSXEDDYLDCYGDPKFIGKIGTDIEDYKCSWLVVQALERADESQKSVLFENYGKKDPACVAKVKSLYRELNLEAVFLDYENESYKKLIADIEAQPSIAVQNVLKSFLHKIYKRQK

SEQ ID NO: 5206 - protein, 167 aa, Oryza sativa
  unsure (1)..(167): unsure at all Xaa locations
TLGAGFXLSSCRRMGVYFQIXDDYLDCFGDPXKXIXXVGTNXEXNYNCPWLIXQAXXXXXXNEMKXLFENXGXSDPXCXPKLKIXXGELDLQDIFLEYEXRVYKHLVSTIDAETDRXXRDILKSFLKXIYXRKKXNXFXPWLLEFXHNRLASWTXGXCDXXLNDXHX

SEQ ID NO: 5207 - protein, 108 aa, Oryza sativa
  unsure (1)..(108): unsure at all Xaa locations
XDCCGDPSFIGKIGSGIQGVKCSWLVGQALQRAYEGQKSVLFANYANKDPACVPTVKSLFRVLTLWAVFVGYETESCKQFLPHIGAQPSIAVQNVLKPFLHEICQTHT

SEQ ID NO: 5208 - protein, 345 aa, Triticum aestivum
QKKKQKTFLSVFPTLRDEVLAELKKYNMPEDAYEWTKRNLEYNVPGGKLNRGISVVDTVRILKGDSVTEDDIFKATVLGWLIEFLQAFFLVSDDIMDASITRRGQPCWYKSSGVGMVAINDAFILESCIYIFLKKYFKGTDYYVELIELFHEVTFQTELGQLCDLITAPEDHVDLSKFSVKKHQFIVIYKTAYYSFYLPVALAMHMVGVKNEEAFKSAHDILIPLGEYFQVQDDYLDCYGAPEVIGKIGTDIMDNKCSWLINQALDKANPEQRKVLDENYGKKDAEAEAKIKQLYIELDIEGVYKAYEEKSYNELSALIEKLDESVGVKKQVFVEFMDKIYKRTK

SEQ ID NO: 5209 - protein, 276 aa, Triticum aestivum
  unsure (1)..(276): unsure at all Xaa locations
MAKQTTLDEFNAVFPKLEEVLLDHARSYKLPQEQLDWYKKSLEANPLGGKCNRGMSVPDSVSLLLEKPLTEEQYFQAATLGWMTELLQAFFLVSDDIMDSSITRRGQPCWYRQEGVGMIAINDAFMLEMAIYTLLXTYFRTHPAYVDLIELFHETTFQTELGQLCDLLTAPEDNVNLDNFSLEEYSFIVIYKTAYYSFYLPVALALHQLNLATPSNLKQAEDILIPLGEYFQIQDDYLDNFGKPEHIGKIGTDIKDNQCSWLEKQALAVAHPQQRK

SEQ ID NO: 5210 - protein, 350 aa, Triticum aestivum
MAAAANGGGGETKAAFARIYDALKAELLRDPAFEYTESSHQWIDRMLDYNVLGGKCNRGLSVVDSYKLLKGVDVLTEEEMFLASTLGWCIEWLQAFFLVLDDIMDDSHTRRGQPCWFRVPQVGLIAVNDGILLRNHISRMLRLHFKKKPYYADLLDLFNEVEFKTASGQMLDLITTHEGEKDLTKYNIGVHRRIVQFKTAYYSFYLPVACALLLSGESLENYGAVENILVEMGTYFQVQDDYLDCYGDPEFIGKIGTDIEDYKCSWLVVQALERADESQKSILFENYGKKDPACVAKVKDLYKELNLEAVFHEYESESYKKLIADIEAQPSDAVQKVLKSFLHKIYKRQK

SEQ ID NO: 5211 - protein, 357 aa, Triticum aestivum
  unsure (1)..(357): unsure at all Xaa locations
MAAAAVALSNGSGGDSKAEFAEIYSRLKEEMLEDPAFEFTDESLQWIDRMLDYNVLGGKCNRGLSVIDSYKTLKGVDVLRKEETFLACTLGWCIEWLQAYFLVLDDIMDNSQTRRGQPCWFRVPQVGLIAVNDGIILRNHISRILQRHFRGKPYYVDLIDLFNEVEFKTASGQLLDLITTHEGEKDLTKYNLNVHRRIVQYKTAYYSFYLPVACALLLSGENLDNFGXDVKNIXLVEMGTYFQXVQDDYLDCFGDPESIGKIGTDIEDYKCSWLVVQALEHADESQKGILLENYGKSDPESVAKVKDLYKELDLETAFHKYERESYNKLIADIEAQPSKAVQKVLMSFLEKIYKRQK

SEQ ID NO: 5212 - protein, 318 aa, Triticum aestivum
  unsure (1)..(318): unsure at all Xaa locations
WRLIFQKNFVSRMLDYNVPGGKLNRGLSVIDSYMLLREGTEVDEEDFYLACVLGWCIEWLQASALVMDDITDNAYTRRDNLCWYKLPTVGLSAINDGVLLKCHVQAIIKRYFKEKFYFMELMELWNEIGLQTAMGQMLDLITTHTGAKDLARYRIQGYRRIVKYKTSYYSFYXLPVACALLLNGAKLSDYVELKNVLIEMGVYFQIQDDYLDCFGDPQVIGKVGTDIEDYKCSWLIVQAMELANENEMKILYENYGKSCPECVAAVKNVYKELDLQDIFLEYESRVYKHLVSTIDAEPDRAIREILKIFLKKIYRRKK

SEQ ID NO: 5213 - protein, 174 aa, Triticum aestivum
  unsure (1)..(174): unsure at all Xaa locations
LFRANGACFNXLCSYRRIVEYKTAYYSFYLPVGCALLLSGGSLDDYVQVKHILVEMGIYFQIQDDYLDCFGDPEVMGKIGTDIEDFKCSWLFVQALVRVDERQKDILFENYGKSDPACVAKVKALYKELNLEAVFSEYEREIYEKLISDIEAQPNEAVQAVLKSFLHKIYRRMK

SEQ ID NO: 5214 - protein, 305 aa, Triticum aestivum
  unsure (1)..(305): unsure at all Xaa locations
ASSLKHSGSSTSIDHGGAGGVDRVARAVGDAERGAGGAGGAAEPRRAGAEGGAAGGRAEGAAPAERPWRRGGGGAGGRQPGAADARAXFLRAYERLKDELLKDRAFNFDFTEETRQWVAKMLDYNVPGGKLNRGLSVIDSYMLLREGTEVDEEDFYLACVLGWCIEWLQASALVMDDITDNAYTRRDNLCWYKLPTVGLSAINDGVLLKCHVQAIIKRYFKEKFYFMELMELWNEIGLQTAMGQMLDLITTHTGAKDLARYRIQGYRRIVKYKTSYYSFYPAGACALLLNGAKLSDYVELKNVLX

SEQ ID NO: 5215 - protein, 138 aa, Triticum aestivum
  unsure (1)..(138): unsure at all Xaa locations
LLSGRNLDDYVQVKHILVEMGVYFQSQDDYLDCFGDPEVMGKVGTDIEDFKCSWLFVQALVRVDERQKDILFENYGKSDPACVAKVKALYKELNLERVFSEYESETYXKLISDIEAQPNEAVQAVLKSFLHKIYRRRK

SEQ ID NO: 5216 - protein, 165 aa, Triticum aestivum
  unsure (1)..(165): unsure at all Xaa locations
SHSDTSLAQDQQLFNERFPSLIXQLLGSLPADEFSAEATDRLRHMLHYNVLGGKLNRALTVFTAMKACLHPAQPTEQQIQDGLVLGWCMELIQAAFLMADDVMDNSDLRRLKPSWHKEVGPMAINDAFIIEGIVYHMIRKYFRSRSWYIDVLEMIQKITLVTELG

SEQ ID NO: 5217 - protein, 188 aa, Triticum aestivum
  unsure (1)..(188): unsure at all Xaa locations
RSGFCFCTRQQAGPRESVSGNRMNGDQNSDVYAQEKQDFVQHFSQIVRVLTEDEMGHPEIGDAIARLKEVLEYNAIGGKYNRGLTVVISFRELVEPRKQDADSLQRAWTVGWCVELLQAFFLVADDIMDSCLTRRGQICWYQKPGVGLDAINDANLLEACIYRLLKLYCREQPYYLNLIELFLQSSYX

SEQ ID NO: 5218 - protein, 154 aa, Triticum aestivum
  unsure (1)..(154): unsure at all Xaa locations
MAAAAQGEASTGATTTATFRRVYETLKAELLRDGYFHFNDDALRWLDAMLDYNVLGGKLNRGLAVVESYKSLKAGSEPSEEEEFLACVLGWGIEWLQAYFLILDDIMDNSQTRRGKPCWYRLPKVGLIAINDGLLLRSQISRIFKRYFYGKPYX

SEQ ID NO: 5219 - protein, 244 aa, Triticum aestivum
  unsure (1)..(244): unsure at all Xaa locations
MGALAESIASHVPSGMLSAGLAALAALPNPGELVRKAARLEDELRELLRLNGRGAGAGAEQGGGNRAQQTRERFLRAYERLKDELLKDRAFNFDFTEETRQWVAKMLDYNVPGGKLNRGLVXIDSYMLLREGTEVDEEDFYLARRLRSRIVRLQASALVMDDITDNAYTRRDNLCWYKLPTVGLSAINDGVLLKCHVQAIIKRYFKEKFYFMELMELWNEVCTSAPSNQFPDLLSVPLLSSSRS

SEQ ID NO: 5220 - protein, 140 aa, Triticum aestivum
  unsure (1)..(140): unsure at all Xaa locations
XEMGEFFXIQDDSLALFGAPSVTGKIGAAIQDHKCRGGVVXCLERAIPKQSQFFKENYGQKEVKKVARVKGLYEEMDLPTVFFXYXEDSCTPIMVFIEQYEAPLPPPVFLGVGGKIYKRRKCPKNCKGGERRFSINICVP

SEQ ID NO: 5221 - protein, 57 aa, Triticum aestivum
  unsure (1)..(57): unsure at all Xaa locations
VQDDYLDCFGDPESIGKIGTDIEDYKCSWLVVQALEHADEXXPPQKXKXKXKGGXGX

SEQ ID NO: 5222 - protein, 288 aa, Zea mays
IRLEILGRPLTEEEYFKAATLGWMTELLQAFFLVSDDIMDGSITRRGQPCWYRQEGVGMIAINDSFLLEAGIYIILKKYFRDHPRYIELVELFHESSFQTELGQLCDLLTAPEDVVNLDNFSMEKYSFIVIHKTAYYSFYLPIALALYMLDIASPENLQTAKDILIPLGEYFQIQDDYLDNFGLPEHIGKIGTDIKDNKCSWLVNQALLLATPEQRKILEENYGQKDDAKEQVIKKLYDDMKLKEKYEAFEEKRAAELMELINKIDESQGLKKQVFEVFLSKIYKRSK

SEQ ID NO: 5223 - protein, 350 aa, Zea mays
MAAGGNGAGGDTRAAFARIYKTLKEELLTDPAFEFTEESRQWIDRMVDYNVLGGKCNRGLSVVDSYKLLKGADALGEEETFLACTLGWCIEWLQAFFLVLDDIMDDSHTRRGQPCWFRVPQVGLIAANDGIILRNHISRILRRHFKGKPYYADLLDLFNEVEFKTASGQLLDLITTHEGEKDLTKYNITVHGRIVQYKTAYYSFYLPVACALLLSGENLDNYGDVENILVEMGTYFQVQDDYLDCYGDPEFIGKIGTDIEDYKCSWLVVQALERADESQKRILFENYGKKDPACVAKVKNLYKELDLEAVFQEYENESYKKLIADIEAQPSIAVQKVLKSFLHKIYKRQK

SEQ ID NO: 5224 - protein, 350 aa, Zea mays
MAAGGNGAGGDTRAAFARIYKTLKEELLTDPAFEFTEESRQWIDRMVDYNVLGGKCNRGLSVVDSYKLLKGADALGEEETFLACTLGWCIEWLQAFFLVLDDIMDDSHTRRGQPCWFRVPQVGLIAANDGIILRNHISRILRCHFKGKPYYADLLDLFNEVEFKTASGQLLDLITTHEGEKDLTKYNITVHGRIVQYKTAYYSFYLPVACALLLSGENLDNYGDVENILVEMGTYFQVQDDYLDCYGDPEFIGKIGTDIEDYKCSWLVVQALERADESQKRILFENYGKKDPACVAKVKNLYKELDLEAVFQEYENESYKKLIADIEAQPSIAVQKVLKSFLHKIYKRQK

SEQ ID NO: 5225 - protein, 356 aa, Zea mays
  unsure (1)..(356): unsure at all Xaa locations
MATVEVVVANGLGGADTKTVFKETYSKLKEEMLDDPAFEFTDESLQWIDRMLDYNVLGGKCNRGLSVIDSYRILKGVDVLSKEETFLACTLGWCIEWLQAYFLVLDDIMDNSQTRRGQPCWFRVPQVGLIAVNDGIILRNHISRILQRHFKGKPYYVDVIDLFNEVEFKTASGQMLDLITTHEGEKDLTKYNLTVRRHIVQYKTAYYSFYLPVACAXLLLAGENLDNFGDVKNILVEMGTYFQVQDDYLDCFGDPEFIGKIGTDIEDYKCSWLVVQALEHADEKQKNILFESYGKSDPACVAKVKDLYKELKLEEVFQAYERESYNKLIADIEAQPSKAVQSVLKSFLHKIYKRDK

SEQ ID NO: 5226 - protein, 358 aa, Zea mays
  unsure (1)..(358): unsure at all Xaa locations
MATAEVVVANGSGGADTKTAFKEIYSKLKQEMLEDPAFEFTDESLQWIDRMLDYNVLGGKCNRGLSVVDSYKILKGVDVLSKEETFLACTLGWCIEWXLQAYFLVLDDIMDNSQTRRGQPCWFRVPQVGLIAVNDGIILRNHISRILQRHFKGKPYYVDIIDLFNEVEFKTASGQMLDLITTXTRGEKDLTKYNLTVHRRIVQYKTAYYSFYLPVACALXLLAGENLENFVDVKNILVEMGTYFQVQDDYLDCFGDPEFIGKIGTDIEDYKCSWLVVQALERAAENQKSILFENYGKSDPACVAKVKDLYKELKLEEVFHEYERESYNKLIADIEAQPSKAVQTVLKSFLHKIYKRDK

SEQ ID NO: 5227 - protein, 321 aa, Zea mays
  unsure (1)..(321): unsure at all Xaa locations
QCXYMKFLYLPPFKQMVDYNVLGGKCNRGLSVVDSYKLLKGADALGEEETFLACTLGWCIEWLQAFFLVLDDIMDDSHTRRGQPCWFRVPQVGLIAANDGIILRNHISRILRRHFKGKPYYADLLDLFNEVEFKTASGQLLDLITTHEGEKDLTKYNITVHGRIVQYKTAYYSFYLPVACALLLSGENLDNYGDVENILVEMGTYFQVQDDYLDCYGDPEFIGKIGTDIEDYKCSWLVVQALERADESQKRILFENYGKKAAAVVAXLKTLCKARHLXEAVFHESDNERSKKLITVREGHPSIAVQKVVISHLAKSIKRQK

SEQ ID NO: 5228 - protein, 264 aa, Zea mays
  unsure (1)..(264): unsure at all Xaa locations
HSYGRMGPSRPAGDNSQTRRGQPCWFRVPQVGLIAVNDGIILRNHISRILQRHFKGKPYYVDIIDLFNEVEFKTASGQMLDLITTHEGEKDLTKYNLTVHRRIVQYKTAYYSFYLPVACALLLAGENLENFVDVKNILVEMGTYFQVQDDYLDXCFGDPELIGKIGTDIEDYKCSWXLVVQAXLERAAENQKSILFENYGKSDPSXCVAKXVKDLYKELNLEGVFHEYERESYNKLIADIEAQPSKAVQTVLKSFLHKIYKRDK

SEQ ID NO: 5229 - protein, 207 aa, Zea mays
  unsure (1)..(207): unsure at all Xaa locations
MAAAAVALSNGSGGDSKAEFAEIYSRLKEEMLEDPAFEFTDESLQWIDRMLDYNVLGGKCNRGLSVIDSYKTLKGVDVLRKEETFLACTLGWCIEWLQAYFLVLDDIMDNSQTRRGQPCWFRVPQVGLIAVNDGIILRNHISRILQRHFRGKPYYVDLIDLFNEVEFKTASGQLLDLITTHEGEKDLTKYNLNVHRRIVQYKTAYYX

SEQ ID NO: 5230 - protein, 146 aa, Zea mays
  unsure (1)..(146): unsure at all Xaa locations
MAAAENGGGGESKAAFARIYDALKAELLRDPAFEYTESSHEWIDRMLDYNVLGGKCNRGLSVVDSYKLLKGVDVLSEEEMFLASTLGWCIEWLQAFFLVLDDIMDDTHTRRGQPCWFRVSRVGLIAVXDGILLRNHISRMLRLHFK

SEQ ID NO: 5231 - protein, 108 aa, Zea mays
  unsure (1)..(108): unsure at all Xaa locations
XDCFGDPEFIGKIGTDIEDYKCSWLVVQALERAAENQKSILFENYGKSDPACVAKVKDLYKELKLEEVFHEYERESYNKLIADIEAQPSKAVQTVLKSFLHKIYKRDK

SEQ ID NO: 5232 - protein, 74 aa, Zea mays
  unsure (1)..(74): unsure at all Xaa locations
XIELFLQSSYQTEIGQTLDLLTAPQGNVDLVRFTEKRYKSIVKYKTAFYSFYLPIAAAMYMAGIDGEKEHANAK

SEQ ID NO: 5233 - protein, 236 aa, Zea mays
  unsure (1)..(236): unsure at all Xaa locations
XQRVSMLAGQLAWPMEWFAAGFLGPGRSIDHSYTLAGQDXCWFSGAEGGLHPVNNGIHGLSRIWDLILRRXHCEGKHPYRCIVLDVXINDGIRSQTVSGGIQMXTLIRTHSEEIERPNKPITVAGXADXDVAHYNTAIFSFYSXTDAMCTWWSDGENLDTDXDVKNIIIFMGPYFQVQDDYLVCYCDPEFMAKIATDIVDYXXLXLVVHALERADESQTRILFEYYXGLKDLACVX

SEQ ID NO: 5234 - protein, 116 aa, Zea mays
  unsure (1)..(116): unsure at all Xaa locations
AANCVTGPVTLYEPKTTLSLQGTTLDWNGLDQESQQINVNTQFKXXYDYLDCYGDPEFIGKIGTDIEDYKCSWLVVQALDRADXSQKHILFVGHLQTSLKXLELYCLKVYTIDGSA

SEQ ID NO: 5235 - protein, 153 aa, Zea mays
  unsure (1)..(153): unsure at all Xaa locations
YFNCTLTVACALLVGGEYLNNXGLVKNILVXLGTYFQVQDXDYXHCVCGPEFIXGKIGTDIEXDYKCFWLVMHALEHPDEMHXNILLDCYGQSDSACVALVMDXCTELKLDEVFHACYTESYNMLIVYIEAHSNKEVQSVNKSLLDNIYTRDK

SEQ ID NO: 5236 - protein, 357 aa, Musa acuminata
MAAAGTNGAVVVVVGEGDLKATFRQIYDRLKSELLQDDAFDCTDEARQWIDRMLDYNVPGGKLNRGLSVIDSYKLLKEGNQLNDEEVFLGCALGWCIEWLQAYFLVLDDIMDNSHTRRGQLCWFRVPKVGLIAVNDGILLRNHIPRILKRHFKGKPYYVDLLDLFNEVEFQTASGQMLDLITTHEGEKDLSKYTLPVYNRIVQYKTAYYSFYLPVACALLMAGENLDTFVDVKNILVEMGTYFQVQDDFLDCFGDPEVIGKIGTDIEDFKCSWLVVQALQRANENQMKTLSEIYGKSDPTCVAKVKSIYKDLDLQNVFAEYERTSYEQLISSIEAQPSKAVQGVLKSFLQKIYKREK

SEQ ID NO: 5237 - protein, 347 aa, Schizosaccharomyces pombe
MSAVDKRAKFESALPVFVDEIVNYLKTINIPDDVTEWYKNSLFHNTLGGKYNRGLSVIDSYEILLGHPLDEAAYMKAAVLGWMVELLQSFFLIADDIMDASKTRRGQPCWYLMPGVGNIAINDAFMVESAIYFLLKKHFRQESCYVDLIELFHDVTFQTELGQQLDLLTAPEDSVDLSKFSLQKHSFIVIYKTAFYSFYLPVALAMHLAGVATPENLKCAQDILIILGKYFQVQDDYLDCYGDPTVTGKIGTDILDNKCSWIINLALAKCTPEQRVILDDNYGRKDSESEKRVKAVFEELNIRGEFENYEESEVSEIKKLIDGVDESTGLKKSIFTTFLGKIYKRNK

SEQ ID NO: 5238 - protein, 339 aa, Schizosaccharomyces pombe
VFVDEIVNYLKTINIPDDVTEWYKNSLFHNTLGGKYNRGLSVIDSYEILLGHPLDEAAYMKAAVLGWMVELLQSFFLIADDIMDASKTRRGQPCWYLMPGVGNIAINDAFMVESAIYFLLKKHFRQESCYVDLIELFHDVTFQTELGQQLDLLTAPEDSVDLSKFSLQKHSFIVIYKTAFYSFYLPVELAMHLAGVATPENLKCAQDILIILGKYFQVQDDYLDCYGDPTVTGKIGTDILDNKCSWIINLALAKCTPEQRVILDDNYGRKDSESEKRVKAVFEELNIRGEFENYEESEVSEIKKLIDGVDESTGLRKSIFTTFLGKIYKRISKFLVLCF

SEQ ID NO: 5239 - protein, 351 aa, Schizosaccharomyces pombe
MVNDFNEKNGIKKRLLDFFPVVLEGIREILESMQYFPEETEKLLYSIKRNTLGGKNNRGLAVLQSLTSLINRELEEAEFRDAALLGWLIEILQGCFLMADDIMDQSIKRRGLDCWYLVVGVRRAINESQLLEACIPLLIRKYFRNMPYYVDLLDTFREVTFLTELGQQEDLLSSRDGEASLRSFDLMKYDFIITYKTSFYSFYLPIKCALLLSRNSNQKAYDTTIKLSKLLGYYFQVQDDYLDCFGDYTVLGKVGMDIQDNKCTWLVCYAEKFASADQLNLLRAHYGKAGSENIAVIKQLYHELQIPELYHKFEDDMVDSISKEIDLIDESTGLKKCIFTKFFQLIYKRSR

SEQ ID NO: 5240 - protein, 212 aa, Sphaceloma manihoticola
GGKCNRGMSVVDTSSFLLGRPLSKDEYFKSATLGWMIELLQAFFLVSDDIMDSSKTRRGSPCWYLMPQVGMVAINDAFMLETSIYLLLKKYFRQSKHYVDLIELFHEVSFQTEMGQQCDLLTAPEDKVDLDNFSLEKYSFIVIYKTAFYSFYLPVALALYYCELATEKNLKQAKDILIPMGEYFQVQDDYLDNYADPETLGKIGTDIQGNKC

SEQ ID NO: 5241 - protein, 352 aa, Saccharomyces cerevisiae
MASEKEIRRERFLNVFPKLVEELNASLLAYGMPKEACDWYAHSLNYNTPGGKLNRGLSVVDTYAILSNKTVEQLGQEEYEKVAILGWCIELLQAYFLVADDMMDKSITRRGQPCWYKVPEVGEIAINDAFMLEAAIYKLLKSHFRNEKYYIDITELFHEVTFQTELGQLMDLITAPEDKVDLSKFSLKKHSFIVTFKTAYYSFYLPVALAMYVAGITDEKDLKQARDVLIPLGEYFQIQDDYLDCFGTPEQIGKIGTDIQDNKCSWVINKALELASAEQRKTLDENYGKKDSVAEAKCKKIFNDLKIEQLYHEYEESIAKDLKAKISQVDESRGFKADVLTAFLNKVYKRSK

SEQ ID NO: 5242 - protein, 222 aa, Saccharomyces cerevisiae
MLEAAIYKLLKSHFRNEKYYIDITELFHEVTFQTELGQLMDLITAPEDKVDLSKFSLKKHSFIVTFKTAYYSFYLPVALAMYVAGITDEKDLKQARDVLIPLGEYFQIQDDYLDCFGTPEQIGKIGTDIQDNKCSWVINKALELASAEQRKTLDENYGKKDSVAEAKCKKIFNDLKIEQLYHEYEESIAKDLKAKISQVDESRGFKADVLTAFLNKVYKRSK

SEQ ID NO: 5243 - protein, 136 aa, Sonchus oleraceus
YFLVLDDIMDESHTRRGQPCWFRLPIVGMIAANDGIILRNHIPRILKKHFRGKPYYIDLVDLFNEVEFQTASGQMIDLITTLVGEKDLSKYSLSIHKRIVQYKTAYYSFYLPVACALLMFGEDLEKHVEVKDVLVE

SEQ ID NO: 5244 - protein, 212 aa, Claviceps purpurea
GGKCNRGMSVPDSVSLLLGRPLQEEEYFHAATLGWMTELLQAFFLVSDDIMDGSITRRRKPCWHRQDGVGMIAINDAFLIESAIYALLKKYFRSHPAYVDMLELFHEATFQAELGQLCDLITGPVDKVDLGNFSMDKYRFIVIYKTAYYSFYLPVALALHQLNLATPRNLKVAEDILIPLGEYFQVQDDYLDNFGRPEHIGKIGTDIQDNKC

SEQ ID NO: 5245 - protein, 211 aa, Claviceps purpurea
GGKCNRGMSVPDSVSLLLGRPLQEEEYFHAATLGWMTELLQAFFLVSDDIMDGSITRRRKPCWHRQDGVGMIAINDAFLIESAIYALLKKYFRSHPAYVDMLELFHEATFQAELGQLCDLITGPVDKVDLGNFSMDKYRFIVIYKTAYYSFYLPVALALHQLNLATPRNLKVAEDILIPLGEYFQVQDDYLDNFGRPEHIGKIGTDIQDNK

SEQ ID NO: 5246 - protein, 347 aa, Gibberella fujikuroi
MAQQTTLQEFNSVYPKLEEALLDHARSYKLPQEQLDWYKRSLEVNPLGGKCNRGMSVPDSVSLLLEKPLTEEQYFQAATLGWMTELLQAFFLVSDDIMDSSITRRGQPCWYRQEGVGMIAINDAFMLESAIYTLLKKYFRSHPAYFDLIESFHETTFQTELGQLCDLLTAPEDNVNLDNFSLEKYSFIVIYKTAYYSFYLPVALALHQLNLATPSNLKQAEDILIPLGEYFQIQDDYLDNFGKPEHIGKIGTDIKDNKCSWLVNQALAVATPEQRKILEENYGRKDDEKEKVVKKLYDDLNLEQRYLDYEEKVVGQIRERIANIDENDGLKKTVFEAFLAKIYKRSK

SEQ ID NO: 5247 - protein, 347 aa, Neurospora crassa
MAKTTTLKEFESVFPKLEEALLEYAKAYKLPEQMLSWYKQSLEVNTLGGKCNRGMSVPDSASILLGRPLTEEEYFQAATLGWMTELLQAFFLVSDDIMDSSITRRGKPCWYRQEGVGMVAINDAFMLESAIYTLLKKYFRSHPRYVDFLELFHEVTFQTEMGQLCDLLTAPEDKVDLDNFSMDKYTFIVIYKTAYYSFYLPVALAMYMLDIATPENLKQAEDILIPLGEYFQVQDDYLDNFGLPEHIGKIGTDIQDNKCSWLVNKALSIVTPEQRKTLEENYGRKDKAKEAVIKQLYDDLKLEDHYKQYEEERVGEIRKMIDAIDESKGLKKQVFEAFLGKIYKRSK

SEQ ID NO: 5248 - protein, 347 aa, Neurospora crassa
MAKTTTLKEFESVFPKLEEALLEYAKAYKLPEQMLSWYKQSLEVNTLGGKCNRGMSVPDSASILLGRPLTEEEYFQAATLGWMTELLQAFFLVSDDIMDSSITRRGKPCWYRQEGVGMVAINDAFMLESAIYTRLKKYFRSHPRYVDFLELFHEVTFQTEMGQLCDLLTAPEDKVDLDNFSMDKYTFIVIYKTAYYSFYLPVALAMYMLDIATPENLKQAEDILIPLGEYFQVQDDYLDNFGLPEHIGKIGTDIQDNKCSWLVNKALSIVTPEQRKTLEENYGRKDKAKEAVIKQLYDDLKLEDHYKQYEEERVGEIRKMNDAIDESKGLKKQVFEAFLGKIYKRSK

SEQ ID NO: 5249 - protein, 427 aa, Agrotis ipsilon
MFSTKKSLDRFLQMYKKEIRRQISKTTSVTNSDAMVPRLDQAVSKSPQNDDAGPKKLLKLQKYHRYLSTLTTQEMPMATRGLSVSKDQSREFMACFPDIVRDLTETGKHIDVPEASKWLAKLLQYNVPNGKKNRGLATVLAYKMLEKKENLTPENIHLANMMGWSIEMFHTHQLLLNDIMEGAEMRRGAPCWYKHPEVGLSGINDAALIQAAMFSTLKRHFNNKFFYKSVLETFNEMLLKCSIGHFLENQMAKTDKPDLTLFTMEKYEAITKYKTSYHTFQMPVTLALLMTGVEDPETHRQAKNILLKMGEFFQIQDDFLDCFGDPAVTGKNGTDIQDGKCTWLAVVALQRATPKQKQFMEENYGSSDPEAVNKIKQLYEELQLPHTYSVFEEATHDLLRTQIQQVTRGLPHELFFKILDNIFRRSV

SEQ ID NO: 5250 - protein, 362 aa, Trypanosoma cruzi
MASMERFLSVYDEVQAFLLDQLQSKYEIDPNRARYLRIMMDTTCLGGKYFRGMTVVNVAEGFLAVTQHDEATKERILHDACVGGWMIEFLQAHYLVEDDIMDGSVMRRGKPCWYRFPGVTTQCAINDGIILKSWTQIMAWHYFADRPFLKDLLCLFQKVDYATAVGQMYDVTSMCDSNKLDPEVAQPMTTDFAEFTPAIYKRIVKYKTTFYTYLLPLVMGLFVSEAAASVEMNLVERVAHLIGEYFQVQDDVMDCFTPPEQLGKVGTDIEDAKCSWLAVTFLGKANAAQVAEFKANYGDKDPAKVAVVKRLYSEANLQADFAAYEAEVVREVESLIEQLKVKSPTFAESVAVVWEKTHKRKK

SEQ ID NO: 5251 - protein, 425 aa, Trypanosoma cruzi
MTAFACFPHSLFYSTRLPFFFFFFCVCVHCCLRYLCLLKCAYCCSDKNYFRPLNYFFYCLYLAMASMERFLSVYDEVQAFLLDQLQSKYEIDPNRARYLRIMMDTTCLGGKYFRGMTVVNVAEGFLAVTQHDEATKERILHDACVGGWMIEFLQAHYLVEDDIMDGSVMRRGKPCWYRFPGVTTQCAINDGIILKSWTQIMAWHYFADRPFLKDLLCLFQKVDYATAVGQMYDVTSMCDSNKLDPEVAQPMTTDFAEFTPAIYKRIVKYKTTFYTYLLPLVMGLLVSEAAASVEMNLVERVAHLIGEYFQVQDDVMDCFTPPEQLGKVGTDIEDAKCSWLAVTFLGKANAAQVAEFKANYGEKDPAKVAVVKRLYSKANLQADFAAYEAEVVREVESLIEQLKVKSPTFAESVAVVWEKTHKRKK

SEQ ID NO: 5252 - protein, 316 aa, Trypanosoma cruzi
GKYFRGMTVVNVAEGFLAVTQHDEATKERILHDACVGGWMIEFLQAHYLVEDDIMDGSVMRRGKPCWYRFPGVTTQCAINDGIILKSWTQIMAWHYFADRPFLKDLLCLFQKVDYATAVGQMYDVTSMCDSNKLDPEVAQPMTTDFAEFTPAIYKRIVKYKTTFYTYLLPLVMGLFVSEAAASVEMNLVERVAHLIGEYFQVQDDVMDCFTPPEQLGKVGTDIEDAKCSWLAVTFLGKANAAQVAEFKANYGDKDPAKVAVVKRLYSEANLQADFAAYEAEVVREVESLIEQLKVKSPTFAESVAVVWEKTHKRKK

SEQ ID NO: 5253 - protein, 362 aa, Plasmodium falciparum
MENEQNNQDSENGLDYFRSMYDRYRDVFINHINDYVLEDDIKIIISKYYKLLFDYNCLGGKNNRGILVILIYEYVKNRDINCNEWEKVACIAWCIEILQASFLVADDIMDKGETRRNKHCWYLLKDVEIKNAVNDVFLLYNAIYKLLDVYLRNDNCYLDLITSFREATLKTIVGQHLDTNIFSDKYSHIDKDIDVNNINISQENKININMLNFKVYQNIIIHKTAYYSFFLPIVCGMQMGGISLDNLLYKKVENIAILMGEYFQVHDDYIDTFGDSKKTGKVGSDIQNNKLTWPLIKAFELCSQPEKEDIIRNYGKDNVTCIKFINDIYEHYNIRDHYVEYEKKQKMKILEAINQLHHEGNI

SEQ ID NO: 5254 - protein, 292 aa, Encephalitozoon cuniculi
MIKEIVKSRILQMSSEYSKPEVLFLLDYNLGGGKELRYKAYVHVLKALNGEVSMENLIMGYSVELLQAVLLIVDDIMDNSKIRRGKPCYYLKRGMKTVKDAFFLLGAIRKLLSEKMKKPYSDSVFKTCLGQTHDTIRKTRSEYSLETYVAIAESKTGAYTFYLPAVLGYVAANKAEPACLWDFCNLGALIFQMQDDYLNFLPEKSSKSMNDLEEMKCTWFTSRMSQMDNPAVEKYFLDGAVCSELLTIIRSLFGEYSSTLDKLLKKLLSMVGEDQKEVFRVFISFLDARREI

SEQ ID NO: 5255 - protein, 352 aa, Caenorhabditis elegans
MFASRKLVETALGEVKKKFVRVVAAKLPADGMEYDLVQYRCRNLFDNTVIGGKYSRASLCVDTIRALQPHLRDETQELQAVCEAAATLEIIQSFYLIADDIMDNSETRRGKPCWFRREGVGMSAINDAFIMDSFVEDILRLALPGHVNLDRLCEAYRKSKQKTLIGQFLDTSSVNQISSFTWDRYELMVENKTSHYTVFHPIQMALIISDVLAYHGSVKKVAYQIGFLFQSQDDFLDVYGDPKITGKIGTDIQDGKCTWLAVRALQKMHKTPEKWGAKLIEEFKTSFGSVDPEKVEKIKRIYDELQLKQEFRRFEKHFSGEIKKSISEIPDVINPLRPVLDGFVTKLVNRNA

SEQ ID NO: 5256 - protein, 289 aa, Caenorhabditis elegans
MDNSETRRGKPCWFRREGVGMSAINDAFIMDSFVEDILRLALPGHVNLDRLCEAYRKSKQKTLIGQFLDTSSVNQISSFTWDRYELMVENKTSHYTVFHPIQMALIISDVLAYHGSVKKVAYQIGFLFQSQDDFLDVYGDPKITGKIGTDIQDGKCTWLAVRALQKMHKTPEKWGAKLIEEFKTSFGSVDPEKVEKIKRIYDELQLKQEFRRFEKHFSGEKKKKVDFADFSREKSLKIEENCFFFQKFTTKKLKKKSPEAENLTKNSSLFQVFQVKKCRFLPIFPVKNC

SEQ ID NO: 5257 - protein, 427 aa, Bombyx mori
MFSTKKSLEKFMQAYKNEVRRHISKTTSVTNSDAMAPRLDQSASKSPQAEETGPKRLLKLQKYHRFLSTLTPQEMPMATRGLAVSKDQSREFMAVFPDIVRDLTETGKHIDVPEASKWLAKLLQYNVPNGKKNRGLATILAYKMLEKKENLTPENILLANVMGWCVEMFHTHQLLLNDIMEGTTMRRGVPCWHRRPDVGLNGINDAALIQSAMYTSLKRHFNTKPYYNYVLETFNEMLMKCSMGHYVQKLMLKTDKPDLSLFTMEKYEAITKYKTSYYTFQMPVSLALLMTGVDDPETHRQAKTILLKMGEFFQIQDDFLDCFGDPTVTEKYGTDIQDGKCTWLAVVALQRATPAQKQIMEDNYGVNKPEAIARIKDLYEELQLPHTYSVFEETTYDLLRTQIQQVTRGLPHELFFKILDNIFRRSV

SEQ ID NO: 5258 - protein, 419 aa, Drosophila melanogaster
MFKLARMLLPQQRILASPLRLQRLISTSDEVNAEPIIKSMDTIGGLPTELVNEQKLKKTSRTLSTLQNHSVPIAARVTVSKDESRDFMAVFPDLVRDITTVTKAYNCSDAAKWFAQVLQYNVPRGKKNRGILTVLTYKNLVPTQDLTPENIKLAQYLGWCVEMLQSFFIISDDVMDNSTTRRGQPCWHKVENVGLTAINDALMIENAMYAILKKHFSHLDCYVALMELFHEITYITTCGQSLDQLNSNRCVSEFTMENYKAIVENKTAYYSFYLPFALALHLAGYKDAEAFRQSKTILLEMGNFFQVQDDFLDCFGNPEVTGKIGTDIQDNKCSWLAVVAMQRANVEQKQIMVDCYGKEEPAKVERVKELYKELGLPSTYAIFEEESYNMIKTHIQQTSRGVPHQTFLQILNKIYQRDS

SEQ ID NO: 5259 - protein, 380 aa, Drosophila melanogaster
MDTIGGLPTELVNEQKLKKTSRTLSTLQNHSVPIAARVTVSKDESRDFMAVFPDLVRDITTVTKAYNCSDAAKWFAQVLQYNVPRGKKNRGILTVLTYKNLVPTQDLTPENIKLAQYLGWCVEMLQSFFIISDDVMDNSTTRRGQPCWHKVENVGLTAINDALMIENAMYAILKKHFSHLDCYVALMELFHEITYITTCGQSLDQLNSNRCVSEFTMENYKAIVENKTAYYSFYLPFALALHLAGYKDAEAFRQSKTILLEMGNFFQVQDDFLDCFGNPEVTGKIGTDIQDNKCSWLAVVAMQRANVEQKQIMVDCYGKEEPAKVERVKELYKELGLPSTYAIFEEESYNMIKTHIQQTSRGVPHQTFLQILNKIYQRDS

SEQ ID NO: 5260 - protein, 151 aa, Plasmodium yoelii yoelii
MCIYICTYIHSMQLSGIAMDNLLYKKIEDISIMMGEYFQAHDDYLDIFGDFTQTGKMGSDIQNNKLTWLLIKAFELCSESDKEKIIKNYGKNNVASVKIIDNIYEKYNIKEHYNIYEQTQKDKIIEYRHSVYVLIYSNFNLKYMFNLFLSC

SEQ ID NO: 5261 - protein, 135 aa, Youngia japonica
TSLCLMTSWTSLIHAEVSPVGSDSKVGMIAANDGIILRNHVPRILKKHFRGKPYYIDLVDLFNEVEFQTASGQMIDLITTLVGEKDLSKYSLSIHRRIVQYKTAYYSFYLPVACALLMFGEDLEKHVEVKDVLVE

SEQ ID NO: 5262 - protein, 348 aa, Gallus gallus
SPVVVEREREEFVGFFPQIVRDLTEDGIGHPEVGDAVARLKEVLQYNAPGGKCNRGLTVVAAYRELSGPGQKDAESLRCALAVGWCIELFQAFFLVADDIMDQSLTRRGQLCWYKKEGVGLDAINDSFLLESSVYRVLKKYCRQRPYYVHLLELFLQTAYQTELGQMLDLITAPVSKVDLSHFSEERYKAIVKYKTAFYSFYLPVAAAMYMVGIDSKEEHENAKAILLEMGEYFQIQDDYLDCFGDPALTGKVGTDIQDNKCSWLVVQCLQRVTPEQRQLLEDNYGRKEPEKVAKVKELYEAVGMRAAFQQYEESSYRRLQELIEKHSNRLPKEIFLGLAQKIYKRQK

SEQ ID NO: 5263 - protein, 367 aa, Gallus gallus
MHKFTGVNAKFQQPALRNLSPVVVEREREEFVGFFPQIVRDLTEDGIGHPEVGDAVARLKEVLQYNAPGGKCNRGLTVVAAYRELSGPGQKDAESLRCALAVGWCIELFQAFFLVADDIMDQSLTRRGQLCWYKKEGVGLDAINDSFLLESSVYRVLKKYCRQRPYYVHLLELFLQTAYQTELGQMLDLITAPVSKVDLSHFSEERYKAIVKYKTAFYSFYLPVAAAMYMVGIDSKEEHENAKAILLEMGEYFQIQDDYLDCFGDPALTGKVGTDIQDNKCSWLVVQCLQRVTPEQRQLLEDNYGRKEPEKVAKVKELYEAVGMRAAFQQYEESSYRRLQELIEKHSNRLPKEIFLGLAQKIYKRQK

SEQ ID NO: 5264 - protein, 367 aa, Gallus gallus
MHKFTGVNAKFQQPALRNLSPVVVEREREEFVGFFPQIVRDLTEDGIGHPEVGDAVARLKEVLQYNAPGGKCNRGLTVVAAYRELSGPGQKDAESLRCALAVGWCIELFQAASLVADDIMDQSLTRRGQLCWYKKEGVGLDAINDSFLLESSVYRVLKKYCRQRPYYVHLLELFLQTAYQTELGQMLDLITAPVSKVDLSHFSEERYKAIVKYKTAFYSFYLPVAAAMYMVGIDSKEEHENAKAILLEMGEYFQIQDDYLDCFGDPALTGKVGTDIQDNKCSWLVVQCLQRVTPEQRQLLEDNYGRKEPEKVAKVKELYEAVGMRAAFQQYEESSYRRLQELIEKHSNRLPKEIFLGLAQKIYKRQK

SEQ ID NO: 5265 - protein, 367 aa, Gallus gallus
MHKFTGVNAKFQQPALRNLSPVVVEREREEFVGFFPQIVRDLTEDGIGHPEVGDAVARLKEVLQYNAPGGKCNRGLTVVAAYRELSGPGQKDAESLRCALAVGWCIELFQAASLVADDIMDQSLTRRGQLCWYKKEGVGLDAINDSFLLESSVYRVLKKYCRQRPYYVHLLELFLQTAYQTELGQMLDLITAPVSKVDLSHFSEERYKAIVKYKTAFYSFYLPVAAAMYMVGIDSKEEHENAKAILLEMGEYFQIQDDYLDCFGDPALTGAVGTDIQDNKCSWLVVQCLQRVTPEQRQLLEDNYGRKEPEKVAKVKELYEAVGMRAAFQQYEESSYRRLQELIEKHSNRLPKEIFLGLAQKIYKRQK

SEQ ID NO: 5266 - protein, 353 aa, Homo sapiens [sequence omitted]

SEQ ID NO: 5267 - protein, 419 aa, Homo sapiens
MPLSRWLRSVGVFLLPAPYWAPRERWLGSLRRPSLVHGYPVLAWHSARCWCQAWTEEPRALCSSLRMNGDQNSDVYAQEKQDFVQHFSQIVRVLTEDEMGHPEIGDAIARLKEVLEYNAIGGKYNRGLTVVVAFRELVEPRKQDADSLQRAWTVGWCVELLQAFFLVADDIMDSSLTRRGQICWYQKPGVGLDAINDANLLEACIYRLLKLYCREQPYYLNLIELFLQSSYQTEIGQTLDLLTAPQGNVDLVRFTEKRYKSIVKYKTAFYSFYLPIAAAMYMAGIDGEKEHANAKKILLEMGEFFQIQDDYLDLFGDPSVTGKIGTDIQDNKCSWLVVQCLQRATPEQYQILKENYGQKEAEKVARVKALYEELDLPAVFLQYEEDSYSHIMALIEQYAAPLPPAVFLGLARKIYKRRK

SEQ ID NO: 5268 - protein, 346 aa, Homo sapiens
DVYAQEKQDFVQHFSQIVRVLTEDEMGHPEIGDAIARLKEVLEYNAIGGKYNRGLTVVVAFRELVEPRKQDADSLQRAWTVGWCVELLQAFFLVADDIMDSSLTRRGQICWYQKPGVGLDAINDANLLEACIYRLLKLYCREQPYYLNLIELFLQSSYQTEIGQTLDLLTAPQGNVDLVRFTEKRYKSIVKYKTAFYSFYLPIAAAMYMAGIDGEKEHANAKKILLEMGEFFQIQDDYLDLFGDPSVTGKIGTDIQDNKCSWLVVQCLQRATPEQYQILKENYGQKEAEKVARVKALYEELDLPAVFLQYEEDSYSHIMALIEQYAAPLPPAVFLGLARKIYKRRK

SEQ ID NO: 5269 - protein, 353 aa, Homo sapiens
MNGDQNSDVYAQEKQDFVQHFSQIVRVLTEDEMGHPEIGDAIARLKEVLEYNAIGGKYNRGLTVVVAFRELVEPRKQDADSLQRAWTVGWCVELLQAFFLVADDIMDSSLTRRGQICWYQKPGVGLDAINDANLLEACIYRLLKLYCREQPYYLNLIELFLQSSYQTEIGQTLDLLTAPQGNVDLVRFTEKRYKSIVKYKTAFYSFYLPIAAAMYMAGIDGEKEHANAKKILLEMGEFFQIQDDYLDLFGDPSVTGKIGTDIQDNKCSWLVVQCLQRATPEQYQILKENYGQKEAEKVARVKALYEELDLPAVFLQYEEDSYSHIMALIEQYAAPLPPAVFLGLARKIYKRRK

SEQ ID NO: 5270 - protein, 348 aa, Homo sapiens
  unsure (1)..(348): unsure at all Xaa locations
NSDVYAQEKQDFVQHFSQIVRVPTEDEMGHPEIGDAIARLKEVLEYNAIGGKYNRRLTVAVAFRELVDPRKQDADSLQRAWTVGWCVELLQAFFLVADDIMDSSLTRRGQICWYQKPGVGLDAIDDANLLEACIYPLLKLYCREQPYYLNLIELFLQSSYQTEIGQTLDLLTXPQGNVDLVRFTEKRYISIVKYKTALSSSYLPIAAAXXXXGIVXEKEHANAXKILLEMGEFSQIQDDYLELFGDPSVTGKIGTDIQDXKCNCLXVQCLXRATPEQYQILKENYGQKEAEKVPRVKALYEELDLPAVFLQYEEDSYSHIMALIEQYAAPLPPAVFLGLARQIYKRXK

SEQ ID NO: 5271 - protein, 184 aa, Homo sapiens
MDSSFTCRGQICWYQKPGMDLDAINDVILLEACIYHLLKIYCIYHLLKIYCREQPYYLNLTVLFLQSSYQTEIRQTLDLITAPQGNVDLGRFTEKRHKSIVKYKTAFYSFYLPVAAAMYMAGIDGKKEHANAKKILLGMGEFLQVQDDYLDLFGDPSVTGKVGTDIQDNKCSWLVVQCLQQATP

SEQ ID NO: 5272 - protein, 258 aa, Homo sapiens
MNGDQKSDAYAQEKQDFIQHFSRIVRVLTEDEMGHPETGDAIAQLKEVLEYNAIGGKLSPGFDAFRELVEPRKQDADSFQRALMVGWCVELLQAFFLVVDDITDSSLTHWGQICWYQKLGVGLDAVNDAMLLEACIYCLLKLCCWEQPYYLNLIELFLQSSYQTEIGQTLDPITAPPGQCGSSQIQGKELQIVKYKTVFYSFYLPIAAAMHMAGIDGEKAHTNAKKILLEMGEFFKIQDDHFDLFGDSTVTDKVGTAI

SEQ ID NO: 5273 - protein, 265 aa, Homo sapiens
MNGDQKSDVYAQEKQDFFQHFSQIVGVLTEDEMGHSEIGDAIARLKDVLEYNAIGGKYHRGLTVLVAFQELDAINYAILLEACIYYLLKLYCQAQPYYLNLIELFLQISCQPEIGQTLDLITAPRTMWILADSLKTARQCLEDPTGDREFFQIQDGYLDLFGDPTVTRKVGTDIQDNKCSWLVVQCLQRSTLEQYQILKENYGQKKAKKVVQVKALYEELDLPAVFLQYEEDGYSHIMGLTEQYAAPLLPAMFLGLVYKIYKQKK

SEQ ID NO: 5274 - protein, 266 aa, Homo sapiens
MNGDQKSDVYAQEKQDFVQHFPQIIRVLSEDEMGHSETGDAVDRLKEVLEYNAIGGKYHQDLMVLVAFWELVEPRKQDADSLQQALTVGWCVELLQAFFLVADDIMDSSVSRRGQIWWYQKPGMGLDAINDAMLLELQPCTAGIDGDKEHANGKKILLEMGEFFQIQDDYLDLFGDPSVTSKVGTDIQDNKCGWLYQILKENYRQKKAKKVAQVKALSEELNLLAVFLQYEEDSYSHIMGLIEQYAAPLTPAIFLGLVRKIYKQKK

SEQ ID NO: 5275 - protein, 285 aa, Homo sapiens [sequence omitted]

SEQ ID NO: 5276 - protein, 325 aa, Cytophaga hutchinsonii
MLLTTERLTKDISKAISKAEFGKEPTELYEPIRYIMDLGGKRMRPLLTILSNYIFTEDTNNVMNAAIAVEVFHNFTLMHDDIMDNAPLRRGKATVHAKWNTNIAILSGDVMLVEAYKQLMTIDEKYLKQVLDRFNETAAGVCEGQQFDMNFESLPTISVDDYINMIRLKTAVLLGFSMELGGILGDADEKSCTYLNTVGISAGIGFQLKDDLLDVYGDAATFGKQVGGDILANKKTFLLIRALEKAAGKTKKDLEKLLTDKTISDKAKIEGVTNIYDQLGIKEETEALIQQHFNTAIESLGKVKGSIFRKHYIKDYLLALIGREQ

SEQ ID NO: 5277 - protein, 353 aa, Bos taurus
MNGDQKLDAYAQERQDFIQHFSQIVKVLTEEDIGHPEIGDAITRLKEVLEYNAIGGKYNRGLTVVITFRELVEPGKQDPDSLQRALTVGWCVELLQAFFLVSDDIMDSSLTRRGQTCWYQKPGIGLDAINDAFLLESSIYRLLKLYCREQPYYLDLIELFLQSSYQTEIGQTLDLITAPQGNVDLGRFTEKRYKSIVKYKTAFYSFYLPVAAAMYMAGIDGEKEHAHAKKILLEMGEFFQIQDDYLDLFGDPSMTGKIGTDIQDNKCSWLVVQCLQRASPEQRQILQENYGQKEAEKVARVKALYEEMNLSAVYMQYEEDSYNHIMGLIEQYAAPLPPAIFLGLAQKIYKRKK

SEQ ID NO: 5278 - protein, 148 aa, Xanthoceras sorbifolium
SFYLPVACALLMAGENLDNHVDVKNTLVDMGIYFQVQDDYLDCFGAPEVIGKVGTDIEDFKCSWLVVKAVERCNEEQRKSLNENYGKADQACVAKVKELYNALDLQGAFTQFESESYEKLIKSIEAHPSKAVQAVLKSFSGKIYKWQK

SEQ ID NO: 5279 - protein, 142 aa, Mus musculus
MNGNQKLDVYNQEKQNFIQHFSQIVKVLTEKVLVHPDIGDAIARLKEVLEYNALGGKYNRGLAMVQAFQELVEPKKQDTESLQRALTVGWCVEMLQAFFFVSDDIMDSSLTRGARSAGIRSQALAWMPSTTLCFWKPPSIVC

SEQ ID NO: 5280 - protein, 329 aa, Deinococcus radiodurans
MRPELLARVLSLLPETSATPELARFYALLRDYPQRGGKGIRSELLLASARAHGLSESDTGWESALWLAAALELFQNWVLVHDDIEDDSEERRGRPALHHLCGMPVALNVGDALHAYMWAAVGKANVPGAFEEFLQMVYRTAEGQHLDLAWVEGREWGLRPADYLQMVGLKTAHYTVIVPLRLGALAAGMAPQDAFTPAGLALGTAFQIRDDVLNLAGDPVKYGKEIGGDLLEGKRTLIVLDWLTTAPDDRKAIFLDQMRRHRADKDPAVIDEIHRWLLESGSVEAAQDYAQAQAAEGLDLLEKALADAPDAQAAAALLASVRELATREK

SEQ ID NO: 5281 - protein, 375 aa, Fagus sylvatica
MCGGAIISDFIAPTGSRRLTADYLWGDRKKPISGKRFSKPVVDLDDEFELDFQGFKDEEESDIDEEEVLVQDVKPFTFSAPPSSGSKPVKSVEFNGQAEKSAKRKRKNQYRGIRQRPWGKWAAEIRDPRKGVRVWLGTFNTAEEAARAYDAEARRIRGKKSKGNFPMRLPVPKRSVKANLQKPLAKANLNSVQPNLNQNFNFMNSDQDYTMGLMEEKPFTNQYGYMDSIPVNADVGLKSFASNNTAPYFNSDQGSNSFDCSDYGWGEQGSKTPEISSVLSATLEGDESQFVEDAVPTKKLKSDSGNAVFIENNTAKTLSEELSAFESQMNFQMPFLEGSWESNMEALFSGDTTQDGNSMDLWSFDDLPVMAGGVL

SEQ ID NO: 5282 - protein, 240 aa, synthetic construct
MNSFSAFSEMFGSDYEPQGGDYCPTLATSCPKKPAGRKKFRETRHPIYRGVRQRNSGKWVSEVREPNKKTRIWLGTFQTAEMAARAHDVAALALRGRSACLNFADSAWRLEFSRGRTRNNYGSTIEGLLDLPDDDDAPAEAGLVAPRMSFLSAGQRPRRLSTTAPITDVSLVDELRLDGEEVDMTPADALDDFDLEMLGDVESPSPGMTHDPVSYGALDVDDFEFEQMFTDALGIDDFGG

SEQ ID NO: 5283 - protein, 240 aa, Atriplex hortensis
MSYSYPPPLPSNTLNNFLSPKPVTMKTTGGPPKPTKLYRGVRQRHWGKWVAEIRLPKNRTRLWLGTFDTAEEAALAYDKAAYKLRGDFARLNFPNLRHEGSHIGGEFGEYKPLHSSVNAKLEAICESLAKQGNEKQGKSGKSKKKDVANNNNNTSSSSSSSCCTTATAAADAPQQQQRMPENGGDVKTESTSDSEVGSGGSSPLSDLTFGDNEEMGSENFLLESCPSHEIDWDAILSSES

SEQ ID NO: 5284 - protein, 282 aa, Mesembryanthemum crystallinum
MSLIANFESDFAVLESIRRHLLEDWDPRAGAPAITTGSGPVYHRNSSFSSLYPCLTDNWGELPLKEDDSEDMVLFGVLRDAVHTGWSPQSGSESGSGSPAPVTVKPEPVDSPVSSPAPVRVAGGEAPVAAAPARGKHYRGVRRRPWGKFAAEIRDPAKNGARVWLGTFETAEDAALAYDRAAFRMRGSKALLNFPLRVNSGEPDPVRITSKRSSPERSVSSSSSESASPKRRKKEEVVVGPVAGQARPGLQQVGNVVEGMQVGVGCQVGVGTMPLGDQLLVT

SEQ ID NO: 5285 - protein, 280 aa, Prunus armeniaca
EKSAKRKRKNQYRGIRQRPWGKWAAEIRDPRKGVRVWLGTFNTAEEAARAYDSEARRIRGKKAKVNFPDETPRSSAKRSVKANPQKMQPKTNMNAIQPNLNQNINFVNDPNQDYYNAMGFLDEKPPTNNFGFMSTFPANDVALKSSTPSDAVPLYFGSDQGSNSFDCSDFGWGEQGSKTPEISSVLSSVMEESDDSLFLEDASPTKKLRSNPEDLVPVQDNAGKTLTDELSAFEMKYFQTPYLDGSWDASVDAFLSGDATQDGGNSVDLWCFDDLVGGGF

SEQ ID NO: 5286 - protein, 266 aa, Arabidopsis thaliana
MTADSQSDYAFLESIRRHLLGESEPILSESTASSVTQSCVTGQSIKPVYGRNPSFSKLYPCFTESWGDLPLKENDSEDMLVYGILNDAFHGGWEPSSSSSDEDRSSFPSVKIETPESFAAVDSVPVKKEKTSPVSAAVTAAKGKHYRGVRQRPWGKFAAEIRDPAKNGARVWLGTFETAEDAALAYDRAAFRMRGSRALLNFPLRVNSGEPDPVRIKSKRSSFSSSNENGAPKKRRTVAAGGGMDKGLTVKCEVVEVARGDRLLVL

SEQ ID NO: 5287 - protein, 268 aa, Arabidopsis thaliana
MSMTADSQSDYAFLESIRRHLLGESEPILSESTASSVTQSCVTGQSIKPVYGRNPSFSKLYPCFTESWGDLPLKENDSEDMLVYGILNDAFHGGWEPSSSSSDEDRSSFPSVKIETPESFAAVDSVPVKKEKTSPVSAAVTAAKGKHYRGVRQRPWGKFAAEIRDPAKNGARVWLGTFETAEDAALAYDRAAFRMRGSRALLNFPLRVNSGEPDPVRIKSKRSSFSSSNENGAPKKRRTVAAGGGMDKGLTVKCEVVEVARGDRLLVL

SEQ ID NO: 5288 - protein, 225 aa, Arabidopsis thaliana
GQSIKPVYGRNPSFSKLYPCFTESWGDLPLKENDSEDMLVYGILNDAFHGGWEPSSSSSDEDRSSFPSVKIETPESFAAVDSVPVKKEKTSPVSAAVTAAKGKHYRGVRQRPWGKFAAEIRDPAKNGARVWLGTFETAEDAALAYDRAAFRMRGSRALLNFPLRVNSGEPDPVRIKSKRSSFSSSNENGAPKKRRTVAAGGGMDKGLTVKCEVVEVARGDRLLVL

SEQ ID NO: 5289 - protein, 243 aa, Arabidopsis thaliana
MYGQCNIESDYALLESITRHLLGGGGENELRLNESTPSSCFTESWGGLPLKENDSEDMLVYGLLKDAFHFDTSSSDLSCLFDFPAVKVEPTENFTAMEEKPKKAIPVTETAVKAKHYRGVRQRPWGKFAAEIRDPAKNGARVWLGTFETAEDAALAYDIAAFRMRGSRALLNFPLRVNSGEPDPVRITSKRSSSSSSSSSSSTSSSENGKLKRRRKAENLTSEVVQVKCEVGDETRVDELLVS

SEQ ID NO: 5290 - protein, 243 aa, Arabidopsis thaliana
MYGQCNIESDYALLESITRHLLGGGGENELRLNESTPSSCFTESWGGLPLKENDSEDMLVYGLLKDAFHFDTSSSDLSCLFDFPAVKVEPTENFTAMEEKPKKAIPVTETAVKAKHYRGVRQRPWGKFAAEIRDPAKNGARVWLGTFETAEDAALAYDIAAFRMRGSSALLNFPLRVNSGEPDPVRITSKRSSSSSSSSSSSTSSSENGKLKRRRKAENLTSEVVQVKCEVGDETRVDELLVS

SEQ ID NO: 5291 - protein, 188 aa, Arabidopsis thaliana
MLVYGILNDAFHGGWEPSSSSSDEDRSSFPSVKIETPESFAAVDSVPVKKEKTSPVSAAVTAAKGKHYRGVRQRPWGKFAAEIRDPAKNGARVWLGTFETAEDAALAYDRAAFRMRGSRALLNFPLRVNSGEPDPVRIKSKRSSFSSSNENGAPKKRRTVAAGGGMDKGLTVKCEVVEVARGDRLLVL

SEQ ID NO: 5292 - protein, 226 aa, Arabidopsis thaliana
MSSSDSVNNGVNSRMYFRNPSFSNVILNDNWSDLPLSVDDSQDMAIYNTLRDAVSSGWTPSVPPVTSPAEENKPPATKASGSHAPRQKGMQYRGVRRRPWGKFAAEIRDPKKNGARVWLGTYETPEDAAVAYDRAAFQLRGSKAKLNFPHLIGSCKYEPVRIRPRRRSPEPSVSDQLTSEQKRESHVDDGESSLVVPELDFTVDQFYFDGSLLMDQSECSYSDNRI

SEQ ID NO: 5293 - protein, 226 aa, Arabidopsis thaliana
MSSSDSVNNGVNSRMYFRNPSFSNVILNDNWSDLPLSVDDSQDMAIYNTLRDAVSSAWTPSVPPVTSPAEEDKPPATKASGSHAPRQKGMQYRGVRRRPWGKFAAEIRDPKKNGARVWLGTYETPEDAAVAYDRAAFQLRGSKAKLNFPHLIGSCKYEPVRIRPRRRSPEPSVSDQLTSEQKRESHVDDGKSSLVVPELDFTVDQFYFDGSLLMDQSECSYSDNRI

SEQ ID NO: 5294 - protein, 70 aa, Arabidopsis thaliana
AKGKHYRGVRQRPWGKFAAEIRDPAKNGARVWLGTFETAEDAALAYDRAAFRMRGSRALLNFPLRVNSGE

SEQ ID NO: 5295 - protein, 63 aa, Arabidopsis thaliana
KHYRGVRQRPWGKFAAEIRDPAKNGARVWLGTFETAEDAALAYDRAAFRMRGSRALLNFPLRV

SEQ ID NO: 5296 - protein, 329 aa, Arabidopsis thaliana
MSTIDESVIRSNGSESTKHATKCFLKILSMATPNEVSALWFIEKHLLDEASPVATDPWMKHESSSATESSSDSSSIIFGSSSSSFAPIDFSESVCKPEIIDLDTPRSMEFLSIPFEFDSEVSVSDFDFKPSNQNQNQFEPELKSQIRKPPLKISLPAKTEWIQFAAENTKPEVTKPVSEEEKKHYRGVRQRPWGKFAAEIRDPNKRGSRVWLGTFDTAIEAARAYDEAAFRLRGSKAILNFPLEVGKWKPRADEGEKKRKRDDDEKVTVVEKVLKTEQSVDVNGGETFPFVTSNLTELCDWDLTGFLNFPLLSPLSPHPPFGYSQLTVV

SEQ ID NO: 5297 - protein, 300 aa, Arabidopsis thaliana
MATPNEVSALWFIEKHLLDEASPVATDPWMKHESSSATESSSDSSSIIFGSSSSSFAPIDFSESVCKPEIIDLDTPRSMEFLSIPFEFDSEVSVSDFDFKPSNQNQNQFEPELKSQIRKPPLKISLPAKTEWIQFAAENTKPEVTKPVSEEEKKHYRGVRQRPWGKFAAEIRDPNKRGSRVWLGTFDTAIEAARAYDEAAFRLRGSKAILNFPLEVGKWKPRADEGEKKRKRDDDEKVTVVEKVLKTEQSVDVNGGETFPFVTSNLTELCDWDLTGFLNFPLLSPLSPHPPFGYSQLTVV

SEQ ID NO: 5298 - protein, 221 aa, Arabidopsis thaliana
MASSHQQQQEQDQSALDLITQHLLTDFPSLDTFASTIHHCTTSTLSQRKPPLATIAVPTTAPVVQENDQRHYRGVRRRPWGKYAAEIRDPNKKGVRVWLGTFDTAMEAARGYDKAAFKLRGSKAILNFPLEAGKHEDLGDNKKTISLKAKRKRQVTEDESQLISRKAVKREEAQVQADACPLTPSSWKGFWDGADSKDMGIFSVPLLSPCPSLGHSQLVVT

SEQ ID NO: 5299 - protein, 201 aa, Arabidopsis thaliana
METFEESSDLDVIQKHLFEDLMIPDGFIEDFVFDDTAFVSGLWSLEPFNPVPKLEPSSPVLDPDSYVQEILQMEAESSSSSSTTTSPEVETVSNRKKTKRFEETRHYRGVRRRPWGKFAAEIRDPAKKGSRIWLGTFESDIDAARAYDYAAFKLRGRKAVLNFPLDAGKYDAPVNSCRKRRRTDVPQPQGTTTSTSSSSSN

SEQ ID NO: 5300 - protein, 221 aa, Arabidopsis thaliana
MASSHQQQQEQDQSALDLITQHLLTDFPSLDTFASTIHHCTTSTLSQRKPPLATIAVPTTAPVVQENDQRHYRGVRRRPWGKYAAEIRDPNKKGVRVWLGTFDTAMEAARGYDKAAFKLRGSKAILNFPLEAGKHEDLGDNKKTISLKAKRKRQVTEDESQLISHKAVKREEAQVQADACPLTPSSWKGFWDGADSKDMGIFSVPLLSPCPSLGHSQLVVT

SEQ ID NO: 5301 - protein, 212 aa, Arabidopsis thaliana
MVSALSRVIENPTDPPVKQELDKSDQHQPDQDQPRRRHYRGVRQRPWGKWAAEIRDPKKAARVWLGTFETAEEAALAYDRAALKFKGTKAKLNFPERVQGPTTTTTISHAPRGVSESMNSPPPRPGPPSTTTTSWPMTYNQDILQYAQLLTSNNEVDLSYYTSTLFSQPFSTPSSSSSSSQQTQQQQLQQQQQQREEEEKNYGYNYYNYPRE

SEQ ID NO: 5302 - protein, 201 aa, Arabidopsis thaliana
METFEESSDLDVIQKHLFEDLMIPDGFIEDFVFDDTAFVSGLWSLEPFNPVPKLEPSSPVLDPDSYVQEILQREAESSSSSTTTTSPEVETVSNRKKTKRFEETRHYRGVRRRPWGKFAAEIRDPAKKGSRIWLGTFESDIDAARAYDYAAFKLRGRKAVLNFPLDAGKYDAPVNSCRKRRRTDLPQPQGTTTSTSSSSSN

SEQ ID NO: 5303 - protein, 207 aa, Arabidopsis thaliana
MASFEESSDLEAIQSHLLEDLLVCDGFMGDFDFDASFVSGLWCIEPHVPKQEPDSPVLDPDSFVNEFLQVEGESSSSSSPELNSSSSTYETDQSVKKAERFEEEVDARHYRGVRRRPWGKFAAEIRDPAKKGSRIWLGTFESDVDAARAYDCAAFKLRGRKAVLNFPLDAGKYEAPANSGRKRKRSDVHEELQRTQSNSSSSSCDAF

SEQ ID NO: 5304 - protein, 218 aa, Arabidopsis thaliana
MDPFLIQSPFSGFSPEYSIGSSPDSFSSSSSNNYSLPFNENDSEEMFLYGLIEQSTQQTYIDSDSQDLPIKSVSSRKSEKSYRGVRRRPWGKFAAEIRDSTRNGIRVWLGTFESAEEAALAYDQAAFSMRGSSAILNFSAERVQESLSEIKYTYEDGCSPVVALKRKHSMRRRMTNKKTKDSDFDHRSVKLDNVVVFEDLGEQYLEELLGSSENSGTW

SEQ ID NO: 5305 - protein, 281 aa, Arabidopsis thaliana
MATPNEVSALFLIKKYLLDELSPLPTTATTNRWMNDFTSFHQTGFEFSEFETKPEIIDLVTPKPEISDFEVKSEISIESNDSFTFQSNPPRVTVQSNRKPPLKIAPPNRTKWIQFATGNPKPELPEPVVAAEEKRHYRGVRMRPWGKFAAEIRDPTRRGTRVWLGTFETAIEAARAYDKEAFRLRGSKAILNFPLEVDKWNPRAEDGRGLYKRKRDSEEEEVKVVKKVLKKEESYAVSDGENVESGLTAIDDWDLTEFLSMPLLSPLSPHPPFGYPQLTVV

SEQ ID NO: 5306 - protein, 250 aa, Arabidopsis thaliana
MASSHQQQQEQDQSALDLITQHLLTDFPSLDTFASTIHHCTTSTLSQRKPPLATIAVPTTAPVVQENDQRHYRGVRRRPWGKYAAEIRDPNKKGVRVWLGTFDTAMEAARGYDKAAFKLRGSKAILNFPLEAGKHEDLGDNKKTISLKAKRKRQVTEDESQLISRKAVKREEAQITINVQPKEIQNVQDAQIEEKTNAPPELRLPDVLDAKVVTCSRHTTWQDYVDYFKSPNQRKQPERNTEDESVLIAF

SEQ ID NO: 5307 - protein, 218 aa, Arabidopsis thaliana
MDPLLIQSPFSGFSPEYSIGSSPESFSSSSSNNYSLPFNENDSEEMFLYGLIEQSTQQTYIDSELQDLPIKSVSSRKSEKSYRGVRRRPWGKFAAEIRDSTRNGIRVWLGTFESAEEAALAYDQAAFSMRGSSAILNFSAERVQESLSEIKCTYEDGCSPVVALKRKHSMRRRMTNKKTKDSDFDHRSVKLDNVVVFEDLGEQYLEELLGSSENSGTW

SEQ ID NO: 5308 - protein, 241 aa, Arabidopsis thaliana
MATKQEALAIDFISQHLLTDFVSMETDHPSLFTNQLHNFHSETGPRTITNQSPKPNSTLNQRKPPLPNLSVSRTVSTKTEKEEEERHYRGVRRRPWGKYAAEIRDPNKKGCRIWLGTYDTAVEAGRAYDQAAFQLRGRKAILNFPLDVRVTSETCSGEGVIGLGKRKRDKSSPPEEEKAARVKVEEEESNTSETTEAEVEPVVPLTPSSWMGFWDVGAGDGIFSIPPLSPTSPNFSVISVT

SEQ ID NO: 5309 - protein, 241 aa, Arabidopsis thaliana
MATKQEALAIDFISQHLLTDFVSMETDHPSLFTNQLHNFHSETGPRTITNQSPKPNSTLNQRKPPLPNLSVSRTVSTKTEKEEEERHYRGVRRRPWGKYAAEIRDPNKKGCRIWLGTYDTAVEAGRAYDQAAFQLRGRKAILNFPLDVRVTSETCSGEGVIGLGKRKRDKGSPPEEEKAARVKVEEEESNTSETTEAEVEPVVPLTPSSWMGFWDVGAGDGIFSIPPLSPTSPNFSVISVT

SEQ ID NO: 5310 - protein, 282 aa, Arabidopsis thaliana
MATPNEVSALFLIKKYLLDELSPLPTTATTNRWMNDFTSFDQTGFEFSEFETKPEIIDLVTPKPEIFDFDVKSEIPSESNDSFTFQSNPPRVTVQSNRKPPLKIAPPNRTKWIQFATGNPKPELPVPVVAAEEKRHYRGVRMRPWGKFAAEIRDPTRRGTRVWLGTFETAIEAARAYDKEAFRLRGSKAILNFPLEVDKWNPRAEDGRGLYNKRKRDGEEEEVTMVEKVLKTEESYDVSGGENVESGLTAIDDWDLTEFLSMPLLSPLSPHPPFGYPQLTVV

SEQ ID NO: 5311 - protein, 282 aa, Arabidopsis thaliana
MATPNEVSALFLIKKYLLDELSPLPTTATTNRWMNDFTSFDQTGFEFSEFETKPEIIDLVTPKPEIFDFDVKSEIPSESNDSFTFQSNPPRVTVQSNRKPPLKIAPPNRTKWIQFATGNPKPELPVPVVAAEEKRHYRGVRMRPWGKFAAEIRDPTRRGTRVWLGTFETAIEAARAYDKEAFRLRGSKAILNFPLEVDKWNPRAEDGRGLYNKRKRDGEEEEVTVVEKVLKTEESYDVSGGENVESGLTAIDDWDLTEFLSMPLLSPLSPHPPFGYPQLTVV

SEQ ID NO: 5312 - protein, 241 aa, Arabidopsis thaliana
MATKQEALAIDFISQHLLTDFVSMETDHPSLFTNQLHNFHSETGPRTITNQSPKPNSTLNQRKPPLPNLSVSRTVSTKTEKEEEERHYRGVRRRPWGKYAAEIRDPNKKGCRIWLGTYDTAVEAGRAYDQAAFQLRGRKAILNFPLDVRVTSETCSGEGVIGLGKRKRDKGSPPEEEKAARVKVEEEESNTSETTEAEVEPVVPLTSSSWMGFWDVGAGDGIFSIPPLSPTSPNFSVISVT

SEQ ID NO: 5313 - protein, 603 aa, Arabidopsis thaliana
MATPNEVSALFLIKKYLLDELSPLPTTATTNRWMNDFTSFDQTGFEFSEFETKPEIIDLVTPKPEIFDFDVKSEIPSESNDSFTFQSNPPRVTVQSNRKPPLKIAPPNRTKWIQFATGNPKPELPVPVVAAEEKRHYRGVRMRPWGKFAAEIRDPTRRGTRVWLGTFETAIEAARAYDKEAFRLRGSKAILNFPLEVDKWNPRAEDGRGLYNKRKRDGEEEEVTVVEKVLKTEESYDVSGGENVESGLTAIDDWDLTEFLSMPLLSPLSPHPPLLYADVELCYIFCLFYVHIRAKFIHSFICFLIQLLIFLNSNQSPYLAATETKIAFSLPTNPILLDSHEERNGSIVTLNWDIVCKMWVPTLSSSSCSSDERDESSGEAALTPVYLNVYDLTPVNNYLYWFGIGIFHSGIEDFTCYFSYYSLLSLTQLFNFNVAHNLEYCYGAHEYPTSGVYEVEPRNCPGFIFRRSVLLGTTSMSRSDFRSYMEKLSRKYHGDTYHLIAKNCNHFTEEVCLQLTGKPIPGWINRLARVGSFCNCLLPESIQLTAVSALPERLEFSDEDESNSEASSVSDEEGSEQHLINVADREIVYLQNKPVRLTREEIP

SEQ ID NO: 5314 - protein, 218 aa, Arabidopsis thaliana
MHSGKRPLSPESMAGNREEKKELCCCSTLSESDVSDFVSELTGQPIPSSIDDQSSSLTLQEKSNSRQRNYRGVRQRPWGKWAAEIRDPNKAARVWLGTFDTAEEAALAYDKAAFEFRGHKAKLNFPEHIRVNPTQLYPSPATSHDRIIVTPPSPPPPIAPDILLDQYGHFQSRSSDSSANLSMNMLSSSSSSLNHQGLRPNLEDGENVKNISIHKRRK

SEQ ID NO: 5315 - protein, 244 aa, Arabidopsis thaliana
MEYQTNFLSGEFSPENSSSSSWSSQESFLWEESFLHQSFDQSFLLSSPTDNYCDDFFAFESSIIKEEGKEATVAAEEEEKSYRGVRKRPWGKFAAEIRDSTRKGIRVWLGTFDTAEAAALAYDQAAFALKGSLAVLNFPADVVEESLRKMENVNLNDGESPVIALKRKHSMRNRPRGKKKSSSSSTLTSSPSSSSSYSSSSSSSSLSSRSRKQSVVMTQESNTTLVVLEDLGAEYLEELMRSCS

SEQ ID NO: 5316 - protein, 139 aa, Arabidopsis thaliana
MESSNRSSNNQSQDDKQARFRGVRRRPWGKFAAEIRDPSRNGARLWLGTFETAEEAARAYDRAAFNLRGHLAILNFPNEYYPRMDDYSLRPPYASSSSSSSSGSTSTNVSRQNQREVFEFEYLDDKVLEELLDSEERKR

SEQ ID NO: 5317 - protein, 133 aa, Arabidopsis thaliana
MDQGGRSSGSGGGGAEQGKYRGVRRRPWGKYAAEIRDSRKHGERVWLGTFDTAEDAARAYDRAAYSMRGKAAILNFPHEYNMGTGSSSTAANSSSSSQQVFEFEYLDDSVLDELLEYGENYNKTHNINMGKRQ

SEQ ID NO: 5318 - protein, 122 aa, Arabidopsis thaliana
MESSNRSSNNQSQDDKQARFRGVRRRPWGKFAAEIRDPSRNGARLWLGTFETAEEAARAYDRAAFNLRGHLAILNFPNEYYPRMDDYSLRPPYASSSSEVFEFEYLDDKVLEELLDSEERKR

SEQ ID NO: 5319 - protein, 131 aa, Arabidopsis thaliana
MDQGGRGVGAEHGKYRGVRRRPWGKYAAEIRDSRKHGERVWLGTFDTAEEAARAYDQAAYSMRGQAAILNFPHEYNMGSGVSSSTAMAGSSSASASASSSSRQVFEFEYLDDSVLEELLEEGEKPNKGKKK

SEQ ID NO: 5320 - protein, 128 aa, Arabidopsis thaliana
MKYRGVRKRPWGKYAAEIRDSARHGARVWLGTFNTAEDAARAYDRAAFGMRGQRAILNFPHEYQMMKDGPNGSHENAVASSSSGYRGGGGGDDGREVIEFEYLDDSLLEELLDYGERSNQDNCNDANR

SEQ ID NO: 5321 - protein, 243 aa, Arabidopsis thaliana
MEYSQSSMYSSPSSWSSSQESLLWNESCFLDQSSEPQAFFCPNYDYSDDFFSFESPEMMIKEEIQNGDVSNSEEEEKVGIDEERSYRGVRKRPWGKFAAEIRDSTRNGIRVWLGTFDKAEEAALAYDQAAFATKGSLATLNFPVEVVRESLKKMENVNLHDGGSPVMALKRKHSLRNRPRGKKRSSSSSSSSSNSSSCSSSSSTSSTSRSSSKQSVVKQESGTLVVFEDLGAEYLEQLLMSSC

SEQ ID NO: 5322 - protein, 358 aa, Arabidopsis thaliana
MCGGAIISDFIPPPRSRRVTSEFIWPDLKKNLKGSKKSSKNRSNFFDFDAEFEADFQGFKDDSSIDCDDDFDVGDVFADVKPFVFTSTPKPAVSAAAEGSVFGKKVTGLDGEAEKSANRKRKNQYRGIRQRPWGKWAAEIRDPREGARIWLGTFKTAEEAARAYDAAARRIRGSKAKVNFPEENLKANSQKRSVKANLQKPVAKPNPNPSPALVQNSNISFENMCFMEEKHQVSNNNNNQFGMTNSVDAGCNGYQYFSSDQGSNSFDCSEFGWSDQAPITPDISSAVINNNNSALFFEEANPAKKLKSMDFETPYNNTEWDASLDFLNEDAVTTQDNGANPMDLWSIDEIHSMIGGVF

SEQ ID NO: 5323 - protein, 139 aa, Arabidopsis thaliana
MERIESYNTNEMKYRGVRKRPWGKYAAEIRDSARHGARVWLGTFNTAEDAARAYDRAAFGMRGQRAILNFPHEYQMMKDGPNGSHENAVASSSSGYRGGGGGDDGREVIEFEYLDDSLLEELLDYGERSNQDNCNDANR

SEQ ID NO: 5324 - protein, 236 aa, Arabidopsis thaliana
MYSSPSSWSSSQESLLWNESCFLDQSSEPQAFFCPNYDYSDDFFSFESPEMMIKEEIQNGDVSNSEEEEKVGIDEERSYRGVRKRPWGKFAAEIRDSTRNGIRVWLGTFDKAEEAALAYDQAAFATKGSLATLNFPVEVVRESLKKMENVNLHDGGSPVMALKRKHSLRNRPRGKKRSSSSSSSSSNSSSCSSSSSTSSTSRSSSKQSVVKQESGTLVVFEDLGAEYLEQLLMSSC

SEQ ID NO: 5325 - protein, 379 aa, Arabidopsis thaliana
MCGGAIISDFIPPPRSLRVTNEFIWPDLKNKVKASKKRSNKRSDFFDLDDDFEADFQGFKDDSAFDCEDDDDVFVNVKPFVFTATTKPVASAFVSTGIYLVGSAYAKKTVESAEQAEKSSKRKRKNQYRGIRQRPWGKWAAEIRDPRKGSREWLGTFDTAEEAARAYDAAARRIRGTKAKVNFPEEKNPSVVSQKRPSAKTNNLQKSVAKPNKSVTLVQQPTHLSQQYCNNSFDNSFGDMSFMEEKPQMYNNQFGLTNSFDAGGNNGYQYFSSDQGSNSFDCSEFGWSDHGPKTPEISSMLVNNNEASFVEETNAAKKLKPNSDESDDLMAYLDNALWDTPLEVKAMLGADAGAVTQEEENPVELWSLDEINFMLEGDF

SEQ ID NO: 5326 - protein, 375 aa, Arabidopsis thaliana
MCGGAIISDFIPPPRSLRVTNEFIWPDLKNKVKASKKRSNKRSDFFDLDDDFEADFQGFKDDSAFDCEDDDDVFVNVKPFVFTATTKPVASAFVSTVGSAYAKKTVESAEQAEKSSKRKRKNQYRGIRQRPWGKWAAEIRDPRKGSREWLGTFDTAEEAARAYDAAARRIRGTKAKVNFPEEKNPSVVSQKRPSAKTNNLQKSVAKPNKSVTLVQQPTHLSQQYCNNSFDNSFGDMSFMEEKPQMYNNQFGLTNSFDAGGNNGYQYFSSDQGSNSFDCSEFGWSDHGPKTPEISSMLVNNNEASFVEETNAAKKLKPNSDESDDLMAYLDNALWDTPLEVEAMLGADAGAVTQEEENPVELWSLDEINFMLEGDF

SEQ ID NO: 5327 - protein, 379 aa, Arabidopsis thaliana
MCGGAIISDFIPPPRSLRVTNEFIWPDLKNKVKASKKRSNKRSDFFDLDDDFEADFQGFKDDSAFDCEDDDDVFVNVKPFVFTATTKPVASAFVSTGIYLVGSAYAKKTVESAEQAEKSSKRKRKNQYRGIRQRPWGKWAAEIRDPRKGSREWLGTFDTAEEAARAYDAAARRIRGTKAKVNFPEEKNPSVVSQKRPSAKTNNLQKSVAKPNKSVTLVQQPTHLSQQYCNNSFDNSFGDMSFMEEKPQMYNNQFGLTNSFDAGGNNGYQYFSSDQGSNSFDCSEFGWSDHGPKTPEISSMLVNNNEASFVEETNAAKKLKPNSDESDDLMAYLDNALWDTPLEVEAMLGADAGAVTQEEENPVELWSLDEINFMLEGDF

SEQ ID NO: 5328 - protein, 248 aa, Arabidopsis thaliana
MYGKRPFGGDESEEREEDENLFPVFSARSQHDMRVMVSALTQVIGNQQSKSHDNISSIDDNYPSVYNPQDPNQQVAPTHQDQGDLRRRHYRGVRQRPWGKWAAEIRDPKKAARVWLGTFETAESAALAYDEAALKFKGSKAKLNFPERVQLGSNSTYYSSNQIPQMEPQSIPNYNQYYHDASSGDMLSFNLGGGYGSGTGYSMSHDNSTTTAATTSSSSGGSSRQQEEQDYARFWRFGDSSSSPHSGY

SEQ ID NO: 5329 - protein, 358 aa, Arabidopsis thaliana
MCGGAIISDFIPPPRSRRVTSEFIWPDLKKNLKGSKKSSKNRSNFFDFDAEFEADFQGFKDDSSIDCDDDFDVGDVFADVKPFVFTSTPKPAVSAAAEGSVFGKKVTGLDGDAEKSANRKRKNQYRGIRQRPWGKWAAEIRDPREGARIWLGTFKTAEEAARAYDAAARRIRGSKAKVNFPEENMKANSQKRSVKANLQKPVAKPNPNPSPALVQNSNISFENMCFMEEKHQVSNNNNNQFGMTNSVDAGCNGYQYFSSDQGSNSFDCSEFGWSDQAPITPDISSAVINNNNSALFFEEANPAKKLKSMDFETPYNNTEWDASLDFLNEDAVTTQDNGANPMDLWSIDEIHSMIGGVF

SEQ ID NO: 5330 - protein, 317 aa, Arabidopsis thaliana
RSNFFDFDAEFEADFQGFKDDSSIDCDDDFDVGDVFADVKPFVFTSTPKPAVSAAAEGSVFGKKVTGLDGDAEKSANRKRKNQYRGIRQRPWGKWAAEIRDPREGARIWLGTFKTAEEAARAYDAAARRIRGSKAKVNFPEENMKANSQKRSVKANLQKPVAKPNPNPSPALVQNSNISFENMCFMEEKHQVSNNNNNQFGMTNSVDAGCNGYQYFSSDQGSNSFDCSEFGWSDQAPITPDISSAVINNNNSALFFEEANPAKKLKSMDFETPYNNTEWDASLDFLNEDAVTTQDNGANPMDLWSIDEIHSMIGGVF

SEQ ID NO: 5331 - protein, 164 aa, Arabidopsis thaliana
REEFSLPPQPLITGSAVTKECESSMSLERPKKYRGVRQRPWGKWAAEIRDPHKATRVWLGTFETAEAAARAYDAAALRFRGSKAKLNFPENVGTQTIQRNSHFLQNSMQPSLTYIDQCPTLLSYSRCMEQQQPLVGMLQPTEEENHFFEKPWTEYDQYNYSSFG

SEQ ID NO: 5332 - protein, 192 aa, Arabidopsis thaliana
MVSMLTNVVSGETEPSASATWTMGHKREREEFSLPPQPLITGSAVTKECESSMSLERPKKYRGVRQRPWGKWAAEIRDPHKATRVWLGTFETAEAAARAYDAAALRFRGSKAKLNFPENVGTQTIQRNSHFLQNSMQPSLTYIDQCPTLLSYSRCMEQQQPLVGMLQPTEEENHFFEKPWTEYDQYNYSSFG

SEQ ID NO: 5333 - protein, 263 aa, Arabidopsis thaliana
MANSGNYGKRPFRGDESDEKKEADDDENIFPFFSARSQYDMRAMVSALTQVIGNQSSSHDNNQHQPVVYNQQDPNPPAPPTQDQGLLRKRHYRGVRQRPWGKWAAEIRDPQKAARVWLGTFETAEAAALAYDNAALKFKGSKAKLNFPERAQLASNTSTTTGPPNYYSSNNQIYYSNPQTNPQTIPYFNQYYYNQYLHQGGNSNDALSYSLAGGETGGSMYNHQTLSTTNSSSSGGSSRQQDDEQDYARYLRFGDSSPPNSGF

SEQ ID NO: 5334 - protein, 268 aa, Arabidopsis thaliana
MHYPNNRTEFVGAPAPTRYQKEQLSPEQELSVIVSALQHVISGENETAPCQGFSSDSTVISAGMPRLDSDTCQVCRIEGCLGCNYFFAPNQRIEKNHQQEEEITSSSNRRRESSPVAKKAEGGGKIRKRKNKKNGYRGVRQRPWGKFAAEIRDPKRATRVWLGTFETAEDAARAYDRAAIGFRGPRAKLNFPFVDYTSSVSSPVAADDIGAKASASASVSATDSVEAEQWNGGGGDCNMEEWMNMMMMMDFGNGDSSDSGNTIADMFQ

SEQ ID NO: 5335 - protein, 314 aa, Arabidopsis thaliana
MADLFGGGHGGELMEALQPFYKSASTSASNPAFASSNDAFASAPNDLFSSSSYYNPHASLFPSHSTTSYPDIYSGSMTYPSSFGSDLQQPENYQSQFHYQNTITYTHQDNNTCMLNFIEPSQPGFMTQPGPSSGSVSKPAKLYRGVRQRHWGKWVAEIRLPRNRTRLWLGTFDTAEEAALAYDRAAFKLRGDSARLNFPALRYQTGSSPSDTGEYGPIQAAVDAKLEAILAEPKNQPGKTERTSRKRAKAAASSAEQPSAPQQHSGSGESDGSGSPTSDVMVQEMCQEPEMPWNENFMLGKCPSYEIDWASILS

SEQ ID NO: 5336 - protein, 391 aa, Arabidopsis thaliana
MCVLKVANQEDNVGKKAESIRDDDHRTLSEIDQWLYLFAAEDDHHRHSFPTQQPPPSSSSSSLISGFSREMEMSAIVSALTHVVAGNVPQHQQGGGEGSGEGTSNSSSSSGQKRRREVEEGGAKAVKAANTLTVDQYFSGGSSTSKVREASSNMSGPGPTYEYTTTATASSETSSFSGDQPRRRYRGVRQRPWGKWAAEIRDPFKAARVWLGTFDNAESAARAYDEAALRFRGNKAKLNFPENVKLVRPASTEAQPVHQTAAQRPTQSRNSGSTTTLLPIRPASNQSVHSQPLMQSYNLSYSEMARQQQQFQQHHQQSLDLYDQMSFPLRFGHTGGSMMQSTSSSSSHSRPLFSPAAVQPPPESASETGYLQDIQWPSDKTSNNYNNSPSS

SEQ ID NO: 5337 - protein, 246 aa, Arabidopsis thaliana
MCGGAIISDYAPLVTKAKGRKLTAEELWSELDASAADDFWGFYSTSKLHPTNQVNVKEEEAVKKEQATEPGKRRKRKNVYRGIRKRPWGKWAAEIRDPRKGVRVWLGTFNTAEEAAMAYDVAAKQIRGEKAKLNFPDLDHHPSTPPPSSTSLRLSDQPPAKKVCVVSQSELAQPSFPVECVGFGKGEEFQNLMYGFEPDYDLKQQISSLESFLELDGTTAEQPSQLDESVCDVDMWMLDDVIASYE

SEQ ID NO: 5338 - protein, 189 aa, Arabidopsis thaliana
MASTTCAREVHYRGVRKRPWGRYAAEIRDPWKKTRVWLGTFDTPEEAALAYDGAARFLRGIKAKTNFPSPLSLDLNHLPSAPSAATAAANNQPHQHQQLWFAAPPPVPPSSDHHHQHHRIFLRTGVLNDKTSDYSSTEAPLYFTSSPNTATSSPGYQVVGFPMMNSSPSPVTVRRGLAIDLNEPPPLWL

SEQ ID NO: 5339 - protein, 200 aa, Arabidopsis thaliana
MAPRQANGRSIAVSEGGGGKTMTMTTMRKEVHFRGVRKRPWGRYAAEIRDPGKKTRVWLGTFDTAEEAARAYDTAAREFRGSKAKTNFPLPGESTTVNDGGENDSYVNRTTVTTAREMTRQRFPFACHRERKVVGGYASAGFFFDPSRAASLRAELSRVCPVRFDPVNIELSIGIRETVKVEPRRELNLDLNLAPPVVDV

SEQ ID NO: 5340 - protein, 308 aa, Arabidopsis thaliana
MAIISTRDYVSIPMPQVQSKRRPIFLSSSTPTCNNLSAYHRHITQQQKIERQQIKIDNRQKKPRITGVLKRPYKHTSCSLNSLTLSLIWVKRANKAKPLSSLLHFLSRFSHISPLESLTMASTTCAREVHYRGVRKRPWGRYAAEIRDPWKKTRVWLGTFDTPEEAALAYDGAARFLRGIKAKTNFPSPLSLDLNHLPSAPSAATAAANNQPHQHQQLWFAAPPPVPPSSDHHHQHHRIFLRTGVLNDKTSDYSSTEAPLYFTSSPNTATSSPGYQVVGFPMMNSSPSPVTVRRGLAIDLNEPPPLWL

SEQ ID NO: 5341 - protein, 287 aa, Arabidopsis thaliana
METEKKVSLPRILRISVTDPYATDSSSDEEEEVDFDALSTKRRRVKKYVKEVVLDSVVSDKEKPMKKKRKKRVVTVPVVVTTATRKFRGVRQRPWGKWAAEIRDPSRRVRVWLGTFDTAEEAAIVYDNAAIQLRGPNAELNFPPPPVTENVEEASTEVKGVSDFIIGGGECLRSPVSVLESPFSGESTAVKEEFVGVSTAEIVVKKEPSFNGSDFSAPLFSDDDVFGFSTSMSESFGGDLFGDNLFADMSFGSGFGFGSGSGFSSWHVEDHFQDIGDLFGSDPVLTV

SEQ ID NO: 5342 - protein, 248 aa, Arabidopsis thaliana
MCGGAIISDYAPLVTKAKGRKLTAEELWSELDASAADDFWGFYSTSKLHPTNQVNVKEEAVKKEQATEPGKRRKRKNVYRGIRKRPWGKWAAEIRDPRKGVRVWLGTFNTAEEAAMAYDVAAKQIRGDKAKLNFPDLHHPPPPNYTPPPSSPRSTDQPPAKKVCVVSQSESELSQPSFPVECIGFGNGDEFQNLSYGFEPDYDLKQQISSLESFLELDGNTAEQPSQLDESVSEVDMWMLDDVIASYE

SEQ ID NO: 5343 - protein, 354 aa, Arabidopsis thaliana
MDEYIDFRPLKYTEHKTSMTKYTKKSSEKLSGGKSLKKVSICYTDPDATDSSSDEDEEDFLFPRRRVKRFVNEITVEPSCNNVVTGVSMKDRKRLSSSSDETQSPASSRQRPNNKVSVSGQIKKFRGVRQRPWGKWAAEIRDPEQRRRIWLGTFETAEEAAVVYDNAAIRLRGPDALTNFSIPPQEEEEEEEPEPVIEEKPVIMTTPTPTTSSSESTEEDLQHLSSPTSVLNHRSEEIQQVQQPFKSAKPEPGVSNAPWWHTGFNTGLGESDDSFPLDTPFLDNYFNESPPEMSIFDQPMDQIFCENDDIFNDMLFLGGETMNIEDELTSSSIKDMGSTFSDFDDSLISDLLVA

SEQ ID NO: 5344 - protein, 315 aa, Arabidopsis thaliana
MERRTRRVKFTENRTVTNVAATPSNGSPRLVRITVTDPFATDSSSDDDDNNNVTVVPRVKRYVKEIRFCQGESSSSTAARKGKHKEEESVVVEDDVSTSVKPKKYRGVRQRPWGKFAAEIRDPSSRTRIWLGTFVTAEEAAIAYDRAAIHLKGPKALTNFLTPPTPTPVIDLQTVSACDYGRDSRQSLHSPTSVLRFNVNEETEHEIEAIELSPERKSTVIKEEEESSAGLVFPDPYLLPDLSLAGECFWDTEIAPDLLFLDEETKIQSTLLPNTEVSKQGENETEDFEFGLIDDFESSPWDVDHFFDHHHHSFD

SEQ ID NO: 5345 - protein, 211 aa, Arabidopsis thaliana
MNTTSSKSKKKQDDQVGTRFLGVRRRPWGRYAAEIRDPTTKERHWLGTFDTAEEAALAYDRAARSMRGTRARTNFVYSDMPPSSSVTSIVSPDDPPPPPPPPAPPSNDPVDYMMMFNQYSSTDSPMLQPHCDQVDSYMFGGSQSSNSYCYSNDSSNELPPLPSDLSNSCYSQPQWTWTGDDYSSEYVHSPMFSRMPPVSDSFPQGFNYFGS

SEQ ID NO: 5346 - protein, 220 aa, Arabidopsis thaliana
MSAMVSALTQVVSARSQTEAEGAHSQTEAEGAHSSSSSAGHKRGWLGIDSAPIPSSFARVDSSHNPIEEAREKKRRYRGVRQRPWGKWAAEIRDPHRAARVWLGTFDTAEAAARAYDEAALRFRGNKAKLNFPEDVRILPPPPPLLRSPADTVANKAEEDLINYWSYTKLLQSSGQRSFLERGQEESSNIFEHSPMEQPLPPSSSGPSSSNFPAPSLPNT

SEQ ID NO: 5347 - protein, 388 aa, Arabidopsis thaliana
MITPIHTQHSLILVYINIYSPPILSKLRTGFILWTNTQKTNKKRNMEDQFPKIETSFMHDKLLSSGIYGFLSSSTPPQLLGVPIFLEGMKSPLLPASSTPSYFVSPHDHELTSSIHPSPVASVPWNFLESFPQSQHPDHHPSKPPNLTLFLKEPKLLELSQSESNMSPYHKYIPNSFYQSDQNRNEWVEINKTLTNYPSKGFGNYWLSTTKTQPMKSKTRKVVQTTTPTKLYRGVRQRHWGKWVAEIRLPRNRTRVWLGTFETAEQAAMAYDTAAYILRGEFAHLNFPDLKHQLKSGSLRCMIASLLESKIQQISSSQVSNSPSPPPPKVGTPEQKNHHMKMESGEDVMMKKQKSHKEVMEGDGVQLSRMPSLDMDLIWDALSFPHSS

SEQ ID NO: 5348 - protein, 185 aa, Arabidopsis thaliana
KLYRGVRQRHWGKWVAEIRLPRNRTRLWLGTFDTAEEAALAYDKAAYKLRGDFARLNFPNLRHNGSHIGGDFGEYKPLHSSVDAKLEAICKSMAETQKQDKSTKSSKKREKKVSSPDLSEKVKAEENSVSIGGSPPVTEFEESTAGSSPLSDLTFADPEEPPQWNETFSLEKYPSYEIDWDSILA

SEQ ID NO: 5349 - protein, 334 aa, Arabidopsis thaliana
MAAAMNLYTCSRSFQDSGGELMDALVPFIKSVSDSPSSSSAASASAFLHPSAFSLPPLPGYYPDSTFLTQPFSYGSDLQQTGSLIGLNNLSSSQIHQIQSQIHHPLPPTHHNNNNSFSNLLSPKPLLMKQSGVAGSCFAYGSGVPSKPTKLYRGVRQRHWGKWVAEIRLPRNRTRLWLGTFDTAEEAALAYDKAAYKLRGDFARLNFPNLRHNGSHIGGDFGEYKPLHSSVDAKLEAICKSMAETQKQDKSTKSSKKREKKVSSPDLSEKVKAEENSVSIGGSPPVTEFEESTAGSSPLSDLTFADPEEPPQWNETFSLEKYPSYEIDWDSILA

SEQ ID NO: 5350 - protein, 225 aa, Arabidopsis thaliana
MRRGRGSSAVAGPTVVAAINGSVKEIRFRGVRKRPWGRFAAEIRDPWKKARVWLGTFDSAEEAARAYDSAARNLRGPKAKTNFPIDSSSPPPPNLRFNQIRNQNQNQVDPFMDHRLFTDHQQQFPIVNRPTSSSMSSTVESFSGPRPTTMKPATTKRYPRTPPVVPEDCHSDCDSSSSVIDDDDDIASSSRRRNPPFQFDLNFPPLDCVDLFNGADDLHCTDLRL

SEQ ID NO: 5351 - protein, 204 aa, Arabidopsis thaliana
MPLSSPRPRAKLTAEELWSELDASAADDFWGNYSTSKLHPTNQVNVKEEAVKKEQATEPGKRRKRKNVYRGIRKRPWGKWAAEIRDPRKGVRVWLGTFNTAEEAAMAYDVPAKQIRGDKAKLNFPDLHHPPPPNYTPPPSSPRSTDQPPAKKVCVVSQSESELSQPSFPVECIGFGNGDEFQNLSYGFEPDYDLKQQIAPSSSS

SEQ ID NO: 5352 - protein, 303 aa, Arabidopsis thaliana
MAFGNIQELDGEILKNVWANYIGTPQTDTRSIQVPEVSRTWEALPTLDDIPEGSREMLQSLDMSTEDQEWTEILDAIASFPNKTNHDPLTNPTIDSCSLSSRVSCKTRKYRGVRKRPWGKFAAEIRDSTRNGVRVWLGTFQTAEEAAMAYDKAAVRIRGTQKAHTNFQLETVIKAMEMDCNPNYYRMNNSNTSDPLRSSRKIGLRTGKEAVKAYDEVVDGMVENHCALSYCSTKEHSETRGLRGSEETWFDLRKRRRSNEDSMCQEVEMQKTVTGEETVCDVFGLFEFEDLGSDYLETLLSSF

SEQ ID NO: 5353 - protein, 343 aa, Arabidopsis thaliana
MEAEKKMVLPRIKFTEHKTNTTTIVSELTNTHQTRILRISVTDPDATDSSSDDEEEEHQRFVSKRRRVKKFVNEVYLDSGAVVTGSCGQMESKKKQKRAVKSESTVSPVVSATTTTTGEKKFRGVRQRPWGKWAAEIRDPLKRVRLWLGTYNTAEEAAMVYDNAAIQLRGPDALTNFSVTPTTATEKKAPPPSPVKKKKKKNNKSKKSVTASSSISRSSSNDCLCSPVSVLRSPFAVDEFSGISSSPVAAVVVKEEPSMTTVSETFSDFSAPLFSDDDVFDFRSSVVPDYLGGDLFGEDLFTADMCTDMNFGFDFGSGLSSWHMEDHFQDIGDLFGSDPLLAV

SEQ ID NO: 5354 - protein, 330 aa, Arabidopsis thaliana
MNLYTCSRSFQDSGGELMDALVPFIKSVSDSPSSSSAASASAFLHPSAFSLPPLPGYYPDSTFLTQPFSYGSDLQQTGSLIGLNNLSSSQIHQIQSQIHHPLPPTHHNNNNSFSNLLSPKPLLMKQSGVAGSCFAYGSGVPSKPTKLYRGVRQRHWGKWVAEIRLPRNRTRLWLGTFDTAEEAALAYDKAAYKLRGDFARLNFPNLRHNGSHIGGDFGEYKPLHSSVDAKLEAICKSMAETQKQDKSTKSSKKREKKVSSPDLSEKVKAEENSVSIGGSPPVTEFEESTAGSSPLSDLTFADPEEPPQWNETFSLEKYPSYEIDWDSILA

SEQ ID NO: 5355 - protein, 343 aa, Arabidopsis thaliana
MEAEKKMVLPRIKFTEHKTNTTTIVSELTNTHQTRILRISVTDPDATDSSSDDEEEEHQRFVSKRRRVKKFVNEVYLDSGAVVTGSCGQMESKKRQKRAVKSESTVSPVVSATTTTTGEKKFRGVRQRPWGKWAAEIRDPLKRVRLWLGTYNTAEEAAMVYDNAAIQLRGPDALTNFSVTPTTATEKKAPPPSPVKKKKKKNNKSKKSVTASSSISRSSSNDCLCSPVSVLRSPFAVDEFSGISSSPVAAVVVKEEPSMTTVSETFSDFSAPLFSDDDVFDFRSSVVPDYLGGDLFGEDLFTADMCTDMNFGFDFGSGLSSWHMEDHFQDIGDLFGSDPLLAV

SEQ ID NO: 5356 - protein, 334 aa, Arabidopsis thaliana
MAAAMNLYTCSRSFQDSGGELMDALVPFIKSVSDSPSSSSAASASAFLHPSAFSLPPLPGYYPDSTFLTQPFSYGSDLQQTGSLIGLNNLSSSQIHQIQSQIHHPLPPTHHNNNNSFSNLLRPKPLLMKQSGVAGSCFAYGSGVPSKPTKLYRGVRQRHWGKWVAEIRLPRNRTRLWLGTFDTAEEAALAYDKAAYKLRGDFARLNFPNLRHNGSHIGGDFGEYKPLHSSVDAKLEAICKSMAETQKQDKSTKSSKKREKKVSSPDLSEKVKAEENSVSIGGSPPVTEFEESTAGSSPLSDLTFADPEEPPQWNETFSLEKYPSYEIDWDSILA

SEQ ID NO: 5357 - protein, 166 aa, Arabidopsis thaliana
MAPTVKTAAVKTNEGNGVRYRGVRKRPWGRYAAEIRDPFKKSRVWLGTFDTPEEAARAYDKRAIEFRGAKAKTNFPCYNINAHCLSLTQSLSQSSTVESSFPNLNLGSDSVSSRFPFPKIQVKAGMMVFDERSESDSSSVVMDVVRYEGRRVVLDLDLNFPPPPEN

SEQ ID NO: 5358 - protein, 204 aa, Arabidopsis thaliana
MMSSQTSSHNKLIKLPQRFFFLHKQFFLHKQILLFVVVMAPTVKTAAVKTNEGNGVRYRGVRKRPWGRYAAEIRDPFKKSRVWLGTFDTPEEAARAYDKRAIEFRGAKAKTNFPCYNINAHCLSLTQSLSQSSTVESSFPNLNLGSDSVSSRFPFPKIQVKAGMMVFDERSESDSSSVVMDVVRYEGRRVVLDLDLNFPPPPEN

SEQ ID NO: 5359 - protein, 222 aa, Arabidopsis thaliana
MAKMGLKPDPATTNQTHNNAKEIRYRGVRKRPWGRYAAEIRDPGKKTRVWLGTFDTAEEAARAYDTAARDFRGAKAKTNFPTFLELSDQKVPTGFARSPSQSSTLDCASPPTLVVPSATAGNVPPQLELSLGGGGGGSCYQIPMSRPVYFLDLMGIGNVGRGQPPPVTSAFRSPVVHVATKMACGAQSDSDSSSVVDFEGGMEKRSQLLDLDLNLPPPSEQA

SEQ ID NO: 5360 - protein, 261 aa, Arabidopsis thaliana
MTTSMDFYSNKTFQQSDPFGGELMEALLPFIKSPSNDSSAFAFSLPAPISYGSDLHSFSHHLSPKPVSMKQTGTSAAKPTKLYRGVRQRHWGKWVAEIRLPRNRTRLWLGTFDTAEEAALAYDKAAYKLRGDFARLNFPDLRHNDEYQPLQSSVDAKLEAICQNLAETTQKQVRSTKKSSSRKRSSTVAVKLPEEDYSSAGSSPLLTESYGSGGSSSPLSELTFGDTEEEIQPPWNENALEKYPSYEIDWDSILQCSSLVN

SEQ ID NO: 5361 - protein, 213 aa, Arabidopsis thaliana
MAKMGLKPDPATTNQTHNNAKEIRYRGVRKRPWGRYAAEIRDPGKKTRVWLGTFDTAEEAARAYDTAARDFRGAKAKTNFPTFLELSDQKVPTGFARSPSQSSTLDCASPPTLVVPSATAGNVPPQLELSLGGGGGGSCYQIPMSRPVYFLDLMGIGNVGRGQPPPVTSAFRSPVVHVATKMACGAQSDSDSSSVVDFEGGMEKRSQTVRSRS

SEQ ID NO: 5362 - protein, 292 aa, Arabidopsis thaliana
MDFDEELNLCITKGKNVDHSFGGEASSTSPRSMKKMKSPSRPKPYFQSSSSPYSLEAFPFSLDPTLQNQQQQLGSYVPVLEQRQDPTMQGQKQMISFSPQQQQQQQQYMAQYWSDTLNLSPRGRMMMMMSQEAVQPYIATKLYRGVRQRQWGKWVAEIRKPRSRARLWLGTFDTAEEAAMAYDRQAFKLRGHSATLNFPEHFVNKESELHDSNSSDQKEPETPQPSEVNLESKELPVIDVGREEGMAEAWYNAITSGWGPESPLWDDLDSSHQFSSESSSSSPLSCPMRPFF

SEQ ID NO: 5363 - protein, 229 aa, Arabidopsis thaliana
LPPTHHNNNNSFSNLLSPKPLLMKQSGVAGSCFAYGSGVPSKPTKLYRGVRQRHWGKWVAEIRLPRNRTRLWLGTFDTAEEAALAYDKAAYKLRGDFARLNFPNLRHNGFHIGGDFGEYKPLHSSVDAKLEAICKSMAETQKQDKSTKSSKKREKKVSSPDLSEKVKAEENSVSIGGSPPVTEFEESTAGSSPLSDLTFADPEEPPQWNETFSLEKYPSYEIDWDSILA

SEQ ID NO: 5364 - protein, 171 aa, Arabidopsis thaliana
MCGGAIISDFIWSKSESEPSQLGSVSSRKKRKPVSVSEERDGKRERKNLYRGIRQRPWGKWAAEIRDPSKGVRVWLGTFKTADEAARAYDVAAIKIRGRKAKLNFPNTQVEEEADTKPGGNQNELISENQVESLSEDLMALEDYMRFYQIPVADDQSATDIGNLWSYQDSN

SEQ ID NO: 5365 - protein, 244 aa, Arabidopsis thaliana
MRKGRGSSVVGPALPVTAGGSVKEPRYRGVRKRPWGRFAAEIRDPLKKSRVWLGTFDSAVDAARAYDTAARNLRGPKAKTNFPIDCSPSSPLQPLTYLHNQNLCSPPVIQNQIDPFMDHRLYGGGNFQEQQQQQIISRPASSSMSSTVKSCSGPRPMEAAAASSSVAKPLHAIKRYPRTPPVAPEDCHSDCDSSSSVIDDGDDIASSSSRRKTPFQFDLNFPPLDGVDLFAGGIDDLHCTDLRL

SEQ ID NO: 5366 - protein, 330 aa, Arabidopsis thaliana
MAVYEQTGTEQPKKRKSRARAGGLTVADRLKKWKEYNEIVEASAVKEGEKPKRKVPAKGSKKGCMKGKGGPDNSHCSFRGVRQRIWGKWVAEIREPKIGTRLWLGTFPTAEKAASAYDEAATAMYGSLARLNFPQSVGSEFTSTSSQSEVCTVENKAVVCGDVCVKHEDTDCESNPFSQILDVREESCGTRPDSCTVGHQDMNSSLNYDLLLEFEQQYWGQVLQEKEKPKQEEEEIQQQQQEQQQQQLQPDLLTVADYGWPWSNDIVNDQTSWDPNECFDINELLGDLNEPGPHQSQDQNHVNSGSYDLHPLHLEPHDGHEFNGLSSLDI

SEQ ID NO: 5367 - protein, 211 aa, Arabidopsis thaliana
MSQSFELYPWLGSASDGKKKQSSRYKGIRRRPWGRWAAEIRDPIKGVRVWLGTFNTAEEAARAYDLEAKRIRGAKAKLNFPNESSGKRKAKAKTVQQVEENHEADLDVAVVSSAPSSSCLDFLWEENNPDTLLIDTQWLEDIIMGDANKKHEPNDSEEANNVDASLLSEELLAFENQTEYFSQMPFTEGNCDSSTSLSSLFDGGNDMGLWS

SEQ ID NO: 5368 - protein, 262 aa, Arabidopsis thaliana
MCGGAVISDYIAPEKIARSSGKSSWRSNGVFDCSIYDFDGNFDELESDEPFVFSSTHKHHASGSASDGKKKQSSRYKGIRRRPWGRWAAEIRDPIKGVRVWLGTFNTAEEAARAYDLEAKRIRGAKAKLNFPNESSGKRKAKAKTVQQVEENHEADLDVAVVSSAPSSSCLDFLWEENNPDTLLIDTQWLEDIIMGDANKKHEPNDSEEANNVDASLLSEELLAFENQTEYFSQMPFTEGNCDSSTSLSSLFDGGNDMGLWS

SEQ ID NO: 5369 - protein, 334 aa, Arabidopsis thaliana
MMDEFMDLRPVKYTEHKTVIRKYTKKSSMERKTSVRDSARLVRVSMTDRDATDSSSDEEEFLFPRRRVKRLINEIRVEPSSSSTGDVSASPTKDRKRINVDSTVQKPSVSGQNQKKYRGVRQRPWGKWAAEIRDPEQRRRIWLGTFATAEEAAIVYDNAAIKLRGPDALTNFTVQPEPEPVQEQEQEPESNMSVSISESMDDSQHLSSPTSVLNYQTYVSEEPIDSLIKPVKQEFLEPEQEPISWHLGEGNTNTNDDSFPLDITFLDNYFNESLPDISIFDQPMSPIQPTENDFFNDLMLFDSNAEEYYSSEIKEIGSSFNDLDDSLISDLLLV

SEQ ID NO: 5370 - protein, 336 aa, Arabidopsis thaliana
MATAKNKGKSIRVLGTSEAEKKDEMELEEEFQFSSGKYKDSGPGSDMWLGDASSTSPRSLRKTRTFDRHNPYLVSSYATPQPPTTTTCSVSFPFYLPPAIQNQQRFLHPNDPSGQRQQQMISFDPQQQVQPYVAQQQQQQQHLLQYWRDILKLSPSGRMMMMNMLRQESDLPLTRPPVQPFSATKLYRGVRQRHWGKWVAEIRKPRNRTRLWLGTFDTAEEAAMAYDREAFKLRGETARLNFPELFLNKQEPTPVHQKQCETGTTSEDSSRRGEDDSSTALAVGGVSEETGWAEAWFNAIPEEWGPGSPLWDDYHFPISNHKDDLDATQNSSSDTI

SEQ ID NO: 5371 - protein, 245 aa, Arabidopsis thaliana
MTTEKENVTTAVAVKDGGEKSKEVSDKGVKKRKNVTKALAVNDGGEKSKEVRYRGVRRRPWGRYAAEIRDPVKKKRVWLGSFNTGEEAARAYDSAAIRFRGSKATTNFPLIGYYGISSATPVNNNLSETVSDGNANLPLVGDDGNALASPVNNTLSETARDGTLPSDCHDMLSPGVAEAVAGFFLDLPEVIALKEELDRVCPDQFESIDMGLTIGPQTAVEEPETSSAVDCKLRMEPDLDLNASP

SEQ ID NO: 5372 - protein, 335 aa, Arabidopsis thaliana
MEESNDIFQNNFSPKISEIRASLSQIILAGGPNTLDSIFSLLTPSSVESATTSFNTHNPPPPPQLGSSVYLRQRDIIEKFHLQNRAISTPHPPLFSSTYDHHQTSELMLQAAAGSPAAAFAAALAAGRVTKKKKLYRGVRQRHWGKWVAEIRLPQNRMRVWLGTYDTAEAAAYAYDRAAYKLRGEYARLNFPNLKDPSELLGLGDSSKLIALKNAVDGKIQSICQRVRKERAKKSVKVSKNSSATADSSCLSSPEILSSSPVTTTTTAVTSEDSYWVSPMGLCNSENSSPVSVSVPSEVPATAEEEAMMGVDTDGFLLARMPSFDPELIWEVLAN

SEQ ID NO: 5373 - protein, 272 aa, Arabidopsis thaliana
MAAIDMFNSNTDPFQEELMKALQPYTTNTDSSSPTYSNTVFGFNQTTSLGLNQLTPYQIHQIQNQLNQRRNIISPNLAPKPVPMKNMTAQKLYRGVRQRHWGKWVAEIRLPKNRTRLWLGTFDTAEEAAMAYDLAAYKLRGEFARLNFPQFRHEDGYYGGGSCFNPLHSSVDAKLQEICQSLRKTEDIDLPCSETELFPPKTEYQESEYGFLRSDENSFSDESHVESSSPESGITTFLDFSDSGFDEIGSFGLEKFPSVEIDWDAISKLSES

SEQ ID NO: 5374 - protein, 185 aa, Arabidopsis thaliana
MPNITMGLKPDPVAPTNPTHHESNAAKEIRYRGVRKRPWGRYAAEIRDPVKKTRVWLGTFDTAQQAARAYDAAARDFRGVKAKTNFGVIVGSSPTQSSTVVDSPTAARFITPPHLELSLGGGGACRRKIPLVHPVYYYNMATYPKMTTCGVQSESETSSVVDFEGGAGKISPPLDLDLNLAPPAE

SEQ ID NO: 5375 - protein, 197 aa, Arabidopsis thaliana
MVGANKKQRTVQASSRKGCMRGKGGPDNASCTYKGVRQRTWGKWVAEIREPNRGARLWLGTFDTSREAALAYDSAARKLYGPEAHLNLPESLRSYPKTASSPASQTTPSSNTGGKSSSDSESPCSSNEMSSCGRVTEEISWEHINVDLPVMDDSSIWEEATMSLGFPWVHEGDNDISRFDTCISGGYSNWDSFHSPL

SEQ ID NO: 5376 - protein, 294 aa, Arabidopsis thaliana
MKSRVRKSKYTVHRKITSTPFDGFPKIVKIIVTDPCATDSSSDEENDNKSVAPRVKRYVDEIRFCDEDDEPKPARKAKKKSPAAAAENGGDLVKSVVKYRGVRQRPWGKFAAEIRDPSSRTRLWLGTFATAEEAAIGYDRAAIRIKGHNAQTNFLTPPPSPTTEVLPETPVIDLETVSGCDSARESQISLCSPTSVLRFSHNDETEYRTEPTEEQNPFFLPDLFRSGDYFWDSEITPDPLFLDEFHQSLLPNINNNNTVCDKDTNLSDSFPLGVIGDFSSWDVDEFFQDHLLDK

SEQ ID NO: 5377 - protein, 206 aa, Arabidopsis thaliana
MSSIEPKVMMVGANKKQRTVQASSRKGCMRGKGGPDNASCTYKGVRQRTWGKWVAEIREPNRGARLWLGTFDTSREAALAYDSAARKLYGPEAHLNLPESLRSYPKTASSPASQTTPSSNTGGKSSSDSESPCSSNEMSSCGRVTEEISWEHINVDLPVMDDSSIWEEATMSLGFPWVHEGDNDISRFDTCISGGYSNWDSFHSPL

SEQ ID NO: 5378 - protein, 277 aa, Arabidopsis thaliana
MALNMNAYVDEFMEALEPFMKVTSSSSTSNSSNPKPLTPNFIPNNDQVLPVSNQTGPIGLNQLTPTQILQIQTELHLRQNQSRRRAGSHLLTAKPTSMKKIDVATKPVKLYRGVRQRQWGKWVAEIRLPKNRTRLWLGTFETAQEAALAYDQAAHKIRGDNARLNFPDIVRQGHYKQILSPSINAKIESICNSSDLPLPQIEKQNKTEEVLSGFSKPEKEPEFGEIYGCGYSGSSPESDITLLDFSSDCVKEDESFLMGLHKYPSLEIDWDAIEKLF

SEQ ID NO: 5379 - protein, 246 aa, Arabidopsis thaliana
RPWGKWAAEIRDPRKGSREWLGTFDTAEEAARAYDAAARRIRGTKAKVNFPEEKNPSVVSQKRPSAKTNNLQKSVAKPNKSVTLVQQPTHLSQQYCNNSFDNSFGDMSFMEEKPQMYNNQFGLTNSFDAGGNNGYQYFSSDQGSNSFDCSEFGWSDHGPKTPEISSMLVNNNEASFVEETNAAKKLKPNSDESDDLMAYLDNALWDTPLEVEAMLGADAGAVTQEEENPVELWSLDEINFMLEGDF

SEQ ID NO: 5380 - protein, 261 aa, Arabidopsis thaliana
METASLSFPVPNTSFGVNKSMPLGLNQLTPYQIHQIQNQLNHRRSTISNLSPNRIRMKNLTPSTSKTKNLYRGVRQRHWGKWVAEIRLPKNRTRLWLGTFETAEKAALAYDQAAFQLRGDIAKLNFPNLIHEDMNPLPSSVDTKLQAICKSLRKTEEICSVSDQTKEYSVYSVSDKTELFLPKAELFLPKREHLETNELSNESPRSDETSLLDESQAEYSSSDKTFLDFSDTEFEEIGSFGLRKFPSVEIDWDAISKLANS

SEQ ID NO: 5381 - protein, 335 aa, Arabidopsis thaliana
MAVYDQSGDRNRTQIDTSRKRKSRSRGDGTTVAERLKRWKEYNETVEEVSTKKRKVPAKGSKKGCMKGKGGPENSRCSFRGVRQRIWGKWVAEIREPNRGSRLWLGTFPTAQEAASAYDEAAKAMYGPLARLNFPRSDASEVTSTSSQSEVCTVETPGCVHVKTEDPDCESKPFSGGVEPMYCLENGAEEMKRGVKADKHWLSEFEHNYWSDILKEKEKQKEQGIVETCQQQQQDSLSVADYGWPNDVDQSHLDSSDMFDVDELLRDLNGDDVFAGLNQDRYPGNSVANGSYRPESQQSGFDPLQSLNYGIPPFQLEGKDGNGFFDDLSYLDLEN

SEQ ID NO: 5382 - protein, 328 aa, Arabidopsis thaliana
MDPLASQHQHNHLEDNNQTLTHNNPQSDSTTDSSTSSAQRKRKGKGGPDNSKFRYRGVRQRSWGKWVAEIREPRKRTRKWLGTFATAEDAARAYDRAAVYLYGSRAQLNLTPSSPSSVSSSSSSVSAASSPSTSSSSTQTLRPLLPRPAAATVGGGANFGPYGIPFNNNIFLNGGTSMLCPSYGFFPQQQQQQNQMVQMGQFQHQQYQNLHSNTNNNKISDIELTDVPVTNSTSFHHEVALGQEQGGSGCNNNSSMEDLNSLAGSVGSSLSITHPPPLVDPVCSMGLDPGYMVGDGSSTIWPFGGEEEYSHNWGSIWDFIDPILGEFY

SEQ ID NO: 5383 - protein, 328 aa, Arabidopsis thaliana
MEKALRNFTESTHSPDPNPLTKFFTEPTASPVSRNRKLSSKDTTVTIAGAGSSTTRYRGVRRRPWGRYAAEIRDPMSKERRWLGTFDTAEQAACAYDSAARAFRGAKARTNFTYPTAVIMPEPRFSFSNKKSSPSARCPLPSLPLDSSTQNFYGAPAAQRIYNTQSIFLRDASCSSRKTTPYNNSFNGSSSSYSASKTACVSYSENENNESFFPEESSDTGLLQEVVQEFLKKNRGVPPSPPTPPPVTSHHDNSGYFSALTIYSENMVQETKETLSSKLDRYGNFQANDDGVRAVADGGLSLGSNEWGYQEMLMYGTQLGCTCRRSWG

SEQ ID NO: 5384 - protein, 328 aa, Arabidopsis thaliana
MEKALRNFTESTHSPDPNPLTKFFTEPTASPVSRNRKLSSKDTTVTIAGAGSSTTRYRGVRRRPWGRYAAEIRDPMSKERRWLGTFDTAEQAACAYDSAARAFRGAKARTNFTYPTAVIMPEPRFSFSNKKSSPSARCPLPSLPLDSSTQNFYGAPAAQRIYNTQSIFLRDASCSSRKTTPYNNSFNGSSSSYSASKTACVSYSENENNESFFPEESSDTGLLQEVVQEFLKKNRGVPPSPPTPPPVTSHHDNSGYFSNLTIYSENMVQETKETLSSKLDRYGNFQANDDGVRAVADGGLSLGSNEWGYQEMLMYGTQLGCTCRRSWG

SEQ ID NO: 5385 - protein, 261 aa, Arabidopsis thaliana
METASLSFPVPNTSFGVNKSMPLGLNQLTPYQIHQIQNQLNHRRSTISNLSPNRIRMKNLTPSTSKTKNLYRGVRQRHWGKWVAEIRLPKNRTRLWLGTFETAEKAALAYDQAAFQLRGDIAKLNLPNLIHEDMNPLPSSVDTKLQAICKSLRKTEEICSVSDQTKEYSVYSVSDKTELFLPKAELFLPKREHLETNELSNESPRSDETSLLDESQAEYSSSDKTFLDFSDTEFEEIGSFGLRKFPSVEIDWDAISKLANS

SEQ ID NO: 5386 - protein, 153 aa, Arabidopsis thaliana
MDAGVAVKADVAVKMKRERPFKGIRMRKWGKWVAEIREPNKRSRLWLGSYSTPEAAARAYDTAVFYLRGPTATLNFPELLPCTSAEDMSAATIRKKATEVGAQVDAIGATVVQNNKRRRVFSQKRDFGGGLLELVDLNKLPDPENLDDDLVGK

SEQ ID NO: 5387 - protein, 329 aa, Arabidopsis thaliana
MGFALIHQNTSANTTTTTTTGERRGRRSKQAEPGRFLGVRRRPWGRYAAEIRDPTTKERHWLGTFDTAHEAALAYDRAALSMRGTQARTNFVYTPTDVHTILTNPNLHSLIVSPYNNNQSFLPNSSPQFVIDHHPHYQNYHQPQQPKHTLPQTVLPAASFKTPVRHQSVDIQAFGNSPQNSSSNGSLSSSLDEENNFFFSLTSEEHNKSNNNSGYLDCIVPNHCLKPPPEATTTQNQAGASFTTPVASKASEPYGGFSNSYFEDGEMMMMNHHEFGSCDLSAMITNYGAAAASMSMEDYGMMEPQDLSSSSIAAFGDVVADTTGFYSVF

SEQ ID NO: 5388 - protein, 306 aa, Arabidopsis thaliana
MEEAIMRLEGAEHRETNIHSLKRKPSRTSSTAPGSPGGVTTAKAASGAGASGVSTIRYRGVRRRPWGRYAAEIRDPLSKERRWLGTFDTAEEAACAYDCAARAMRGLKARTNFVYPMPSLDSYHHRIFSSPPMNMFLLRDVLNSQSLSPLTTFAYPPCNLSNVNDVVHESFTNVNDVCEDLSPKAKRSSTIENESLISNIFEPEPASSGLLQEIVQGFLPKPISQHASIPPKSNQQSVGVFPTMPESGFQTDVRLADFHVEGNGFGQVKYHGELGWADHENGFDSAKMQQNGNGGMFYQYCFHDDY

SEQ ID NO: 5389 - protein, 199 aa, Arabidopsis thaliana; identical to SEQ ID NO: 412

SEQ ID NO: 5390 - protein, 218 aa, Arabidopsis thaliana
MIASESTKSWEASAVRQENEEEKKKPVKDSGKHPVYRGVRKRNWGKWVSEIREPRKKSRIWLGTFPSPEMAARAHDVAALSIKGASAILNFPDLAGSFPRPSSLSPRDIQVAALKAAHMETSQSFSSSSSLTFSSSQSSSSLESLVSSSATGSEELGEIVELPSLGSSYDGLTQLGNEFIFSDSADLWPYPPQWSEGDYQMIPASLSQDWDLQGLYNY

SEQ ID NO: 5391 - protein, 194 aa, Arabidopsis thaliana
MERDDCRRFQDSPAQTTERRVKYKPKKKRAKDDDDEKVVSKHPNFRGVRMRQWGKWVSEIREPKKKSRIWLGTFSTAEMAARAHDVAALAIKGGSAHLNFPELAYHLPRPASADPKDIQAAAAAAAAAVAIDMDVETSSPSPSPTVTETSSPAMIALSDDAFSDLPDLLLNVNHNIDGFWDSFPYEEPFLSQSY

SEQ ID NO: 5392 - protein, 159 aa, Arabidopsis thaliana
MKRIVRISFTDMEATDSSSSEDESPPSSRRRGKKLVKEIVIDHSDPPEVGKTRFKIRIPASLLAARNTTANKKKFRGVRQRPWGKWAAEIRCGRVKGRPERIWLGTFETAEEAALAYDNAAIQLIGPDAPTNFGRPDVDSAVVKKQDSDASGGASEEVV

SEQ ID NO: 5393 - protein, 277 aa, Arabidopsis thaliana
MEKSSSMKQWKKGPARGKGGPQNALCQYRGVRQRTWGKWVAEIREPKKRARLWLGSFATAEEAAMAYDEAALKLYGHDAYLNLPHLQRNTRPSLSNSQRFKWVPSRKFISMFPSCGMLNVNAQPSVHIIQQRLEELKKTGLLSQSYSSSSSSTESKTNTSFLDEKTSKGETDNMFEGGDQKKPEIDLTEFLQQLGILKDENEAEPSEVAECHSPPPWNEQEETGSPFRTENFSWDTLIEMPRSETTTMQFDSSNFGSYDFEDDVSFPSIWDYYGSLD

SEQ ID NO: 5394 - protein, 256 aa, Arabidopsis thaliana
MENSYTVDGHRLQYSVPLSSMHETSQNSETYGLSKESPLVCMPLFETNTTSFDISSLFSFNPKPEPENTHRVMDDSIAAVVGENVLFGDKNKVSDHLTKEGGVKRGRKMPQKTGGFMGVRKRPWGRWSAEIRDRIGRCRHWLGTFDTAEEAARAYDAAARRLRGTKAKTNFVIPPLFPKEIAQAQEDNRMRQKQKKKKKKKVSVRKCVKVTSVAQLFDDANFINSSSIKGNVISSIDNLEKMGLELDLSLGLLSRK

SEQ ID NO: 5395 - protein, 199 aa, Arabidopsis thaliana
MVQTKKFRGVRQRHWGSWVAEIRHPLLKRRIWLGTFETAEEAARAYHEAAVLMSGRNAKTNFPLNNNNTGETSEGKTDISASSTMSSSTSSSSLSSILSAKLRKCCKSPSPSLTCLRLDTASSHIGVWQKRAGSKSDSSWVMTVELGPASSSQETTSKASQDAILAPTTEVEIGGSREEVLDEEEKVALQMIEELLNTN

SEQ ID NO: 5396 - protein, 196 aa, Arabidopsis thaliana
METATEVATVVSTPAVTVAAVATRKRDKPYKGIRMRKWGKWVAEIREPNKRSRIWLGSYSTPEAAARAYDTAVFYLRGPSARLNFPELLAGVTVTGGGGGGVNGGGDMSAAYIRRKAAEVGAQVDALEAAGAGGNRHHHHHQHQRGNHDYVDNHSDYRINDDLMECSSKEGFKRCNGSLERVDLNKLPDPETSDDD

SEQ ID NO: 5397 - protein, 259 aa, Arabidopsis thaliana
FFETSSLLRFRVPLLSSWPTCSSISPSACNRFAVNITSFFFFIFKISLDRFFCGFLKSPEKTTMETATEVATVVSTPAVTVAAVATRKRDKPYKGIRMRKWGKWVAEIREPNKRSRIWLGSYSTPEAAARAYDTAVFYLRGPSARLNFPELLAGVTVTGGGGGGVNGGGDMSAAYIRRKAAEVGAQVDALEAAGAGGNRHHHHHQHQRGNHDYVDNHSDYRINDDLMECSSKEGFKRCNGSLERVDLNKLPDPETSDDD

SEQ ID NO: 5398 - protein, 245 aa, Arabidopsis thaliana
MEFNGNLNAGSCSRSKKSHRQKQQQPQPQPQQHIEEIKYVGVRRRPWGRYAAEIRNPTTKERYWLGTFDTAEEAALAYDRAARSIRGLTARTNFVYSDMPRGSSVTSFVSPDESQRFISELFNPPSQLEATNSNNNNNNNLYSSTNNQNQNSIEFSYNGWPQEAECGYQSITSNAEHCDHELPPLPPSTCFGAELRIPETDSYWNVAHASIDTFAFELDGFVDQNSLGQSGTEGFNSLPSTFFYQ

SEQ ID NO: 5399 - protein, 236 aa, Arabidopsis thaliana
MAEEYYSLRSERVTQLLVPNSESDSVSDKSKAEQSEKKTKRGRDSGKHPVYRGVRMRNWGKWVSEIREPRKKSRIWLGTFPTPEMAARAHDVAALSIKGTAAILNFPELADSFPRPVSLSPRDIQTAALKAAHMEPTTSFSSSTSSSSSLSSTSSLESLVLVMDLSRTESEELGEIVELPSLGASYDVDSANLGNEFVFYDSVDYCLYPPPWGQSSEDNYGHGISPNFGHGLSWDL

SEQ ID NO: 5400 - protein, 236 aa, Arabidopsis thaliana
MTSLNSSASPTSSSSDQSDATTTTSTHLSEEEAPPRNNNTRKRRRDSSSASSSSSMQHPVYRGVRMRSWGKWVSEIRQPRKKTRIWLGTFVTADMAARAHDVAALTIKGSSAVLNFPELASLFPRPASSSPHDIQTAAAEAAAMVVEEKLLEKDEAPEAPPSSESSYVAAESEDEERLEKIVELPNIEEGSYDESVTSRADLAYSEPFDCWVYPPVMDFYEEISEFNFVELWSFNH

SEQ ID NO: 5401 - protein, 254 aa, Arabidopsis thaliana
MSHIHTKRRSKYQTRVQKMTSLNSSASPTSSSSDQSDATTTTSTHLSEEEAPPRNNNTRKRRRDSSSASSSSSMQHPVYRGVRMRSWGKWVSEIRQPRKKTRIWLGTFVTADMAARAHDVAALTIKGSSAVLNFPELASLFPRPASSSPHDIQTAAAEAAAMVVEEKLLEKDEAPEAPPSSESSYVAAESEDEERLEKIVELPNIEEGSYDESVTSRADLAYSEPFDCWVYPPVMDFYEEISEFNFVELWSFNH

SEQ ID NO: 5402 - protein, 184 aa, Arabidopsis thaliana
MENTYVGQRDYRFNVNQLSYRGIRRRKWGKWVSEIREPGKKTRIWLGSYETAEMAAAAYDAAALHLRGRGTNLNFPELVDSFPRPESSSSEHIQAAAQDAALMFKPGRLSEPALESGQGLSRVGLSPDQIQAINESPLDSPRMGWMQDLEVADYEELYGQFFGQHDRDEFFEMQQFQSIWNSNN

SEQ ID NO: 5403 - protein, 189 aa, Arabidopsis thaliana
MVHSKKFRGVRQRQWGSWVSEIRHPLLKRRVWLGTFDTAETAARAYDQAAVLMNGQSAKTNFPVIKSNGSNSLEINSALRSPKSLSELLNAKLRKNCKDQTPYLTCLRLDNDSSHIGVWQKRAGSKTSPNWVKLVELGDKVNARPGGDIETNKMKVRNEDVQEDDQMAMQMIEELLNWTCPGSGSIAQV

SEQ ID NO: 5404 - protein, 244 aa, Arabidopsis thaliana
MEKEDNGSKQSSSASVVSSRRRRRVVEPVEATLQRWEEEGLARARRVQAKGSKKGCMRGKGGPENPVCRFRGVRQRVWGKWVAEIREPVSHRGANSSRSKRLWLGTFATAAEAALAYDRAASVMYGPYARLNFPEDLGGGRKKDEEAESSGGYWLETNKAGNGVIETEGGKDYVVYNEDAIELGHDKTQNPMTDNEIVNPAVKSEEGYSYDRFKLDNGLLYNEPQSSSYHQGGGFDSYFEYFRF

SEQ ID NO: 5405 - protein, 183 aa, Arabidopsis thaliana
MAGLRNSGNSDKAQNDGKGVPSAYRGVRKRKWGKWVSEIREPGTKNRIWLGSFETPEMAATAYDVAAFHFRGREARLNFPELASSLPRPADSSSDSIRMAVHEATLCRTTEGTESAMQVDSSSSSNVAPTMVRLSPREIQAINESTLGSPTTMMHSTYDPMEFANDVEMNAWETYQSDFLWDP

SEQ ID NO: 5406 - protein, 161 aa, Arabidopsis thaliana
MKRIIRISFTDAEATDSSSDEDTEERGGASQTRRRGKRLVKEIVIDPSDSADKLDVCKTRFKIRIPAEFLKTAKTEKKYRGVRQRPWGKWVAEIRCGRGACKGRRDRLWLGTFNTAEEAALAYDNASIKLIGPHAPTNFGLPAENQEDKTVIGASEVARGA

SEQ ID NO: 5407 - protein, 283 aa, Arabidopsis thaliana
MKGKGGPENGICDYRGVRQRRWGKWVAEIREPDGGARLWLGTFSSSYEAALAYDEAAKAIYGQSARLNLPEITNRSSSTAATATVSGSVTAFSDESEVCAREDTNASSGFGQVKLEDCSDEYVLLDSSQCIKEELKGKEEVREEHNLAVGFGIGQDSKRETLDAWLMGNGNEQEPLEFGVDETFDINELLGILNDNNVSGQETMQYQVDRHPNFSYQTQFPNSNLLGSLNPMEIAQPGVDYGCPYVQPSDMENYGIDLDHRRFNDLDIQDLDFGGDKDVHGST

SEQ ID NO: 5408 - protein, 341 aa, Arabidopsis thaliana
MPSEIVDRKRKSRGTRDVAEILRQWREYNEQIEAESCIDGGGPKSIRKPPPKGSRKGCMKGKGGPENGICDYRGVRQRRWGKWVAEIREPDGGARLWLGTFSSSYEAALAYDEAAKAIYGQSARLNLPEITNRSSSTAATATVSGSVTAFSDESEVCAREDTNASSGFGQVKLEDCSDEYVLLDSSQCIKEELKGKEEVREEHNLAVGFGIGQDSKRETLDAWLMGNGNEQEPLEFGVDETFDINELLGILNDNNVSGQETMQYQVDRHPNFSYQTQFPNSNLLGSLNPMEIAQPGVDYGCPYVQPSDMENYGIDLDHRRFNDLDIQDLDFGGDKDVHGST

SEQ ID NO: 5409 - protein, 181 aa, Arabidopsis thaliana
MARPQQRFRGVRQRHWGSWVSEIRHPLLKTRIWLGTFETAEDAARAYDEAARLMCGPRARTNFPYNPNAIPTSSSKLLSATLTAKLHKCYMASLQMTKQTQTQTQTQTARSQSADSDGVTANESHLNRGVTETTEIKWEDGNANMQQNFRPLEEDHIEQMIEELLHYGSIELCSVLPTQTL

SEQ ID NO: 5410 - protein, 244 aa, Arabidopsis thaliana
MTESSIISVKQSSPVPEEEDHHHHQQDSHRTNTKKRVRSDPGYRGVRMRTWGKWVSEIREPRKKSRIWLGTFSTPEMAARAHDAAALTIKGTSAVLNFPELATYLPRPASSSPRDVQAAAAVAAAMDFSPSSSSLVVSDPTTVIAPAETQLSSSSYSTCTSSSLSPSSEEAASTAEELSEIVELPSLETSYDESLSEFVYVDSAYPPSSPWYINNCYSFYYHSDENGISMAEPFDSSNFGPLFP

SEQ ID NO: 5411 - protein, 184 aa, Arabidopsis thaliana
MEGGGVADVAVPGTRKRDRPYKGIRMRKWGKWVAEIREPNKRSRLWLGSYSTPEAAARAYDTAVFYLRGPTARLNFPELLPGEKFSDEDMSAATIRKKATEVGAQVDALGTAVQNNRHRVFGQNRDSDVDNKNFHRNYQNGEREEEEEDEDDKRLRSGGRLLDRVDLNKLPDPESSDEEWESKH

SEQ ID NO: 5412 - protein, 161 aa, Arabidopsis thaliana
MKRIIRISFTDAEATDSSSDEDTEERGGASQTRRRGKRLVKEIVIDPSDSADKLYVCKTRFKIRIPAEFLKTAKTEKKYRGVRQRPWGKWVAEIRCGRGSCKGRRDRLWLGTFNTAEEAALAYDNASIKLIGPHAPTNFGLPAENQEDKTVIGASEVARGA

SEQ ID NO: 5413 - protein, 196 aa, Arabidopsis thaliana
METATEVATVVSTPAVTVAAVATRKRDKPYKGIRMRKWGKWVAEIREPNKRSRIWLGSYSTPEAAARAYDTAVFYLRSPSARLNFPELLAGVTVTGGGGGGVNGGGDMSAAYIRRKAAEVGAQVDALEAAGAGGNRHHHHHQHQRGNHDYVDNHSDYRINDDLMECSSKEGFKRCNGSLERVDLNKLPDPETSDDD

SEQ ID NO: 5414 - protein, 225 aa, Arabidopsis thaliana
MVDSHGSDTECSSKKKKEKTKEKGVYRGARMRSWGKWVSEIREPRKKSRIWLGTFPTAEMAARAHDVAALSIKGSSAILNFPELADFLPRPVSLSQQDIQAAAAEAALMDFKTVPFHLQDDSTPLQTRCDTEKIEKWSSSSSSASSSSSSSSSSSSSMLSGELGDIVELPSLENNVKYDCALYDSLEGLVSMPPWLDATENDFRYGDDSVLLDPCLKESFLWNYE

SEQ ID NO: 5415 - protein, 187 aa, Arabidopsis thaliana
MKLSPPPVTNNEPTATASAVKSCGGGGKETSSSTTRHPVYHGVRKRRWGKWVSEIREPRKKSRIWLGSFPVPEMAAKAYDVAAFCLKGRKAQLNFPEEIEDLPRPSTCTPRDIQVAAAKAANAVKIIKMGDDDVAGIDDGDDFWEGIELPELMMTGGGWSPEPFVAGDDATWLVDGDLYQYQFMACL

SEQ ID NO: 5416 - protein, 192 aa, Arabidopsis thaliana
MSPQRMKLSSPPVTNNEPTATASAVKSCGGGGKETSSSTTRHPVYHGVRKRRWGKWVSEIREPRKKSRIWLGSFPVPEMAAKAYDVAAFCLKGRKAQLNFPEEIEDLPRPSTCTPRDIQVAAAKAANAVKIIKMGDDDVAGIDDGDDFWEGIELPELMMSGGGWSPEPFVAGDDATWLVDGDLYQYQFMACL

SEQ ID NO: 5417 - protein, 307 aa, Arabidopsis thaliana
MEEEQPPAKKRNMGRSRKGCMKGKGGPENATCTFRGVRQRTWGKWVAEIREPNRGTRLWLGTFNTSVEAAMAYDEAAKKLYGHEAKLNLVHPQQQQQVVVNRNLSFSGHGSGSWAYNKKLDMVHGLDLGLGQASCSRGSCSERSSFLQEDDDHSHNRCSSSSGSNLCWLLPKQSDSQDQETVNATTSYGGEGGGGSTLTFSTNLKPKNLMSQNYGLYNGAWSRFLVGQEKKTEHDVSSSCGSSDNKESMLVPSCGGERMHRPELEERTGYLEMDDLLEIDDLGLLIGKNGDFKNWCCEEFQHPWNWF

SEQ ID NO: 5418 - protein, 187 aa, Arabidopsis thaliana
MKLSSPPVTNNEPTATASAVKSCGGGGKETSSSTTRHPVYHGVRKRRWGKWVSEIREPRKKSRIWLGSFPVPEMAAKAYDVAAFCLKGRKAQLNFPEEIEDLPRPSTCTPRDIQVAAAKAANAVKIIKMGDDDVAGIDDGDDFWEGIELPELMMSGGGWSPEPFVAGDDATWLVDGDLYQYQFMACL

SEQ ID NO: 5419 - protein, 177 aa, Arabidopsis thaliana
MPRKRKSRGTRDVAEILRKWREYNEQTEADSCIDGGGSKPIRKAPPKRSRKGCMKGKGGPENGICDYTGVRQRTWGKWVAEIREPGRGAKLWLGTFSSSYEAALAYDEASKAIYGQSARLNLPLLPLCQARLLHFLMNLKFVHVRIQMQDLVLVRSLTSRISKMLSPITALVKLGRY

SEQ ID NO: 5420 - protein, 189 aa, Arabidopsis thaliana
MVHSRKFRGVRQRQWGSWVSEIRHPLLKRRVWLGTFETAEAAARAYDQAALLMNGQNAKTNFPVVKSEEGSDHVKDVNSPLMSPKSLSELLNAKLRKSCKDLTPSLTCLRLDTDSSHIGVWQKRAGSKTSPTWVMRLELGNVVNESAVDLGLTTMNKQNVEKEEEEEEAIISDEDQLAMEMIEELLNWS

SEQ ID NO: 5421 - protein, 187 aa, Arabidopsis thaliana
MPPSPPKSPFISSSLKGAHEDRKFKCYRGVRKRSWGKWVSEIRVPKTGRRIWLGSYDAPEKAARAYDAALFCIRGEKGVYNFPTDKKPQLPEGSVRPLSKLDIQTIATNYASSVVHVPSHATTLPATTQVPSEVPASSDVSASTEITEMVDEYYLPTDATAESIFSVEDLQLDSFLMMDIDWINNLI

SEQ ID NO: 5422 - protein, 186 aa, Arabidopsis thaliana
MVHSKKFRGVRQRQWGSWVSEIRHPLLVWLGTFDTAETAARAYDQAAVLMNGQSAKTNFPVIKSNGSNSLEINSALRSPKSLSELLNAKLRKNCKDQTPYLTCLRLDNDSSHIGVWQKRAGSKTSPNWVKLVELGDKVNARPGGDIETNKMKVRNEDVQEDDQMAMQMIEELLNWTCPGSGSIAQV

SEQ ID NO: 5423 - protein, 179 aa, Arabidopsis thaliana
MQDSSSHESQRNLRSPVPEKTGKSSKTKNEQKGVSKQPNFRGVRMRQWGKWVSEIREPRKKSRIWLGTFSTPEMAARAHDVAALAIKGGSAHLNFPELAYHLPRPASADPKDIQEAAAAAAAVDWKAPESPSSTVTSSPVADDAFSDLPDLLLDVNDHNKNDGFWDSFPYEDPFFLENY

SEQ ID NO: 5424 - protein, 150 aa, Arabidopsis thaliana
MVIQYKRKQEFPMVKEGMVMTEKPKRNLISSNEKRYKGIRMRKWGKWVAEIREPNKRSRIWLGSYKTAVAAARAYDTAVFYLRGPSARLNFPEEVFKDGNGGEGLGGDMSPTLIRKKAAEVGARVDAELRLENRMVENLDMNKLPEAYGL

SEQ ID NO: 5425 - protein, 341 aa, Arabidopsis thaliana
MPSEIVDRKRKSRGTRDVAEILRQWREYNEQIEAESCIDGGGPKSIRKPPPKGSRKGCMKGKGGPENGICDYREVRQRRWGKWVAEIREPDGGARLWLGTFSSSYEAALAYDEAAKAIYGQSARLNLPEITNRSSSTAATATVSGSVTAFSDESEVCAREDTNASSGFGQVKLEDCSDEYVLLDSSQCIKEELKGKEEVREEHNLAVGFGIGQDSKRETLDAWLMGNGNEQEPLEFGVDETFDINELLGILNDNNVSGQETMQYQVDRHPNFSYQTQFPNSNLLGSLNPMEIAQPGVDYGCPYVQPSDMENYGIDLDHRRFNDLDIQDLDFGGDKDVHGST

SEQ ID NO: 5426 - protein, 295 aa, Arabidopsis thaliana
MARQINIESSVSQVTFISSAIPAVSSSSSITASASLSSSPTTSSSSSSSTNSNFIEEDNSKRKASRRSLSSLVSVEDDDDQNGGGGKRRKTNGGDKHPTYRGVRMRSWGKWVSEIREPRKKSRIWLGTYPTAEMAARAHDVAALAIKGTTAYLNFPKLAGELPRPVTNSPKDIQAAASLAAVNWQDSVNDVSNSEVAEIVEAEPSRTVVAQLFSSDTSTTTTTQSQEYSEASCASTSACTDKDSEEEKLFDLPDLFTDENEMMIRNDAFCYYSSTWQLCGADAGFRLEEPFFLSE

SEQ ID NO: 5427 - protein, 295 aa, Arabidopsis thaliana
MARQINIESSVSQVTFISSAIPAVSSSSSITASASLSSSPTTSSSSSSSTNSNFIEEDNSKRKASRRSLSSLVSVEDDDDQNGGGGKRRKTNGGDKHPTYRGVRMRSWGKWVSEIREPRKKSRIWLGTYPTAEMAARAHDVAALAIKGTTAYLNFPKLAGELPRPVTNSPKDIQAAASLAAVNWQDSVNDVSNSEVAEIVEAEPSRAVVAQLFSSDTSTTTTTQSQEYSEASCASTSACTDKDSEEEKLFDLPDLFTDENEMMIRNDAFCYYSSTWQLCGADAGFRLEEPFFLSE

SEQ ID NO: 5428 - protein, 221 aa, Arabidopsis thaliana
MADSSSDKEKKENNKQPVYRGVRMRSWGKWVSEIREPRKKSRIWLGTFPTAEMAMRAHDVAAMSIKGTSAILNFPELSKLLPRPVSLSPRDVRAAATKAALMDFDTTAFRSDTETSETTTSNKMSESSESNETVSFSSSSWSSVTSIEESTVSDDLDEIVKLPSLGTSLNESNEFVIFDSLEDLVYMPRWLSGTEEEVFTYNNNDSSLNYSSVFESWKHFP

SEQ ID NO: 5429 - protein, 176 aa, Arabidopsis thaliana
METEAAVTATVTAATMGIGTRKRDLKPYKGIRMRKWGKWVAEIREPNKRSRIWLGSYATPEAAARAYDTAVFYLRGPSARLNFPELLAGLTVSNGGGRGGDLSAAYIRRKAAEVGAQVDALGATVVVNTGGENRGDYEKIENCRKSGNGSLERVDLNKLPDPENSDGDDDECVKRR

SEQ ID NO: 5430 - protein, 411 aa, Arabidopsis thaliana
MSVLSSRTGRDRQRYDNNFRLVSGCIPYRLMKADETEEDSGVDFVNKLEVLMVSSPNRHDLVFPKGGWEDDETVLEAASREAIEEAGVKGILRELPLGVWEFRSKSSTVEDECLGGCKGYMFALKVTEELEDWPERKNRERRWLTVKEALELCRYEWMQRALEEFLRVMEDERRLRTEEETVHDSSKLEEESQIDPCNKRKSKEEKKLQEGKYLGVRRRPWGRYAAEIRNPFTKERHWLGTFDTAEEAAFAYDVAARSISGSLATTNFFYTENTSLERHPQQSLEPHMTWGSSSLCLLQDQPFENNHFVADPISSSFSQKQESSTNLTNTFSHCYNDGDHVGQSKEISLPNDMSNSLFGHQDKVGEHDNADHMKFGSVLSDEPLCFEYDYIGNYLQSFLKDVNDDAPQFLM

SEQ ID NO: 5431 - protein, 219 aa, Arabidopsis thaliana
MLKSSNKRKSKEEKKLQEGKYLGVRRRPWGRYAAEIRNPFTKERHWLGTFDTAEEAAFAYDVAARSISGSLATTNFFYTENTSLERHPQQSLEPHMTWGSSSLCLLQDQPFENNHFVADPISSSFSQKQESSTNLTNTFSHCYNDGDHVGQSKEISLPNDMSNSLFGHQDKVGEHDNADHMKFGSVLSDEPLCFEYDYIGNYLQSFLKDVNDDAPQFLM

SEQ ID NO: 5432 - protein, 256 aa, Arabidopsis thaliana
MGKQINIESSATHHQDNIVSVITATISSSSVVTSSSDSWSTSKRSLVQDNDSGGKRRKSNVSDDNKNPTSYRGVRMRSWGKWVSEIREPRKKSRIWLGTYPTAEMAARAHDVAALAIKGNSGFLNFPELSGLLPRPVSCSPKDIQAAATKAAEATTWHKPVIDKKLADELSHSELLSTAQSSTSSSFVFSSDTSETSSTDKESNEETVFDLPDLFTDGLMNPNDAFCLCNGTFTWQLYGEEDVGFRFEEPFNWQND

SEQ ID NO: 5433 - protein, 216 aa, Arabidopsis thaliana
MDASPKYTGVRKRKWGKWVAEIRLPNSRDRIWLGSFDSAEKAARAFDAALYCLRGPGARFNFPDNPPEIPGGRSLTPQQIQVVASRFACEEELLPPEQHHPSPPRGDHNTEEEVIISARGEINSGSGGPTLGQVGEDNNNEGNSNDTSSYWPLIWEEENFVGPPNSDHEFGFFTDDSTNLYFPTQQQQQHQLSSDFYYDGACEDDFSHYNINLWNF

SEQ ID NO: 5434 - protein, 259 aa, Arabidopsis thaliana
MVYIGNQKVAAIGIRVSKWITYHGLALNVTTDLTPFNWIVPCGIRDRKVGNIKGLLEDGEHGMVDDLRLIDIVHESLLKEFSEAFQLQIEKQTVSDPNILGVRKRSWGKWVSEIRVPKTGRRIWLGSYDAPEKAARAYDAALFCIRGEKGVYNFPTDKKPQLPEGSVRPLSKLDIQTIATNYASSVVHVPSHATTLPATTQVPSEVPASSDVSASTEITEMVDEYYLPTDATAESIFSVEDLQLDSFLMMDIDWINNLI

SEQ ID NO: 5435 - protein, 153 aa, Arabidopsis thaliana
MEREQEESTMRKRRQPPQEEVPNHVATRKPYRGIRRRKWGKWVAEIREPNKRSRLWLGSYTTDIAAARAYDVAVFYLRGPSARLNFPDLLLQEEDHLSAATTADMPAALIREKAAEVGARVDALLASAAPSMAHSTPPVIKPDLNQIPESGDI

SEQ ID NO: 5436 - protein, 148 aa, Arabidopsis thaliana
EESTMRKRRQPPQEEVPNHVATRKPYRGIRRRKWGKWVAEIREPNKRSRLWLGSYTTDIAAARAYDVAVFYLRGPSARLNFPDLLLQEEDHLSAATTADMPAALIREKAAEVGARVDALLASAAPSMAHSTPPVIKPDLNQIPESGDI

SEQ ID NO: 5437 - protein, 144 aa, Arabidopsis thaliana
MRKRRQPPQEEVPNHVATRKPYRGIRRRKWGKWVAEIREPNKRSRLWLGSYTTDIAAARAYDVAVFYLRGPSARLNFPDLLLQEEDHLSAATTADMPAALIREKAAEVGARVDALLASAAPSMAHSTPPVIKPDLNQIPESGDI

SEQ ID NO: 5438 - protein, 248 aa, Arabidopsis thaliana
MADPNNPITEPKAIIQSSTSSSVTIVPVPTCGDSLSDSATCENPCPLDTITTTTTTVCFAAPSSTASGNDINTLMATDTDISRRKKNPVYRGIRCRSGKWVSEIREPKKTTRVWLGTYPTPEMAAAAYDVAALALKGGDTLLNFPDSLGSYPIPLSSSAAHIRCAAAAAAATRGAAGAAVKVGQKKEDKVYDTAESSTMGFVDEEELLNMPGLLADMAKGMMVAPPWMGSPPSDDSPENSDGESLWSY

SEQ ID NO: 5439 - protein, 238 aa, Arabidopsis thaliana
MADPNNPITEPKAIIQSSTSSSVTIVPVPTCGDSLSDSATCENPCPLDTITTTTTTVCFAAPSSTASGNDINTLMATDTDISRRKKNPVYRGIRCRSGKWVSEIREPKKTTRVWLGTYPTPEMAAAAYDVAALALKGGDTLLNFPDSLGSYPIPLSSSAAHIRCAAAAAAATRGAAGAAVKVGQKKEDKVYDTAESSTMGFVDEEELLNMPGLLADMAKGMMVAPPWMGSPPSDDSPE

SEQ ID NO: 5440 - protein, 188 aa, Arabidopsis thaliana
MASAGLGSRRKDPVYRGIRCRSGKWVSEIREPRKTTRIWLGTYPMAEMAAAAYDVAAMALKGREAVLNFPGSVGSYPVPESTSAADIRAAAAAAAAMKGCEEGEEEKKAKEKKSSSSKSRARECHVDNDVGSSSWCGTEFMDEEEVLNMPNLLANMAEGMMVAPPSWMGSRPSDDSPENSNDEDLWGY

SEQ ID NO: 5441 - protein, 185 aa, Arabidopsis thaliana
MEGSSSSMQSKYKGVRKRKWGKWVSEIRLPNSRERIWLGSYDTPEKAARAFDAALYCLRGNNAKFNFPDNPPVISGGRNLSRSEIREAAARFANSAEDDSSGGAGYEIRQESASTSMDVDSEFLSMLPTVGSGNFASEFGLFPGFDDFSDEYSGDRFREQLSPTQDYYQLGEETYADGSMFLWNF

SEQ ID NO: 5442 - protein, 255 aa, Arabidopsis thaliana
KNMEHQTTPKQKTKEKSKGNKTKFVGVRQRPSGKWVAEIKDTTQKIRMWLGTFETAEEAARAYDEAACLLRGSNTRTNFANHFPNNSQLSLKIRNLLHQKQSMKQQQQQQHKPVSSLTDCNINYISTATSLTTTTTTTTTTAIPLNNVYRPDSSVIGQPETEGLQLPYSWPLVSGFNHQIPLAQAGGETHGHLNDHYSTDQHLGLAEIERQISASLYAMNGANSYYDNMNAEYAIFDPTDPIWDLPSLSQLFCPT

SEQ ID NO: 5443 - protein, 184 aa, Arabidopsis thaliana
MQGTSKDNGGRHPLYRGVRQRKNSNKWVSEIREPRKPNRIWLGTFSTPEMAAIAYDVAALALKGSQAELNFPNSVSSLPAPTSMSPADIQAAAASAAAAFGAARDAIVMANNNSQTSGVACMNSSYDNTNMNGFMDEDLVFDMPNVLMNMAEGMLLSPPRPTVFDAAYDADGFPGGDDYLWNFP

SEQ ID NO: 5444 - protein, 253 aa, Arabidopsis thaliana
MEHQTTPKQKTKEKSKGNKTKFVGVRQRPSGKWVAEIKDTTQKIRMWLGTFETAEEAARAYDEAACLLRGSNTRTNFANHFPNNSQLSLKIRNLLHQKQSMKQQQQQQHKPVSSLTDCNINYISTATSLTTTTTTTTTTAIPLNNVYRPDSSVIGQPETEGLQLPYSWPLVSGFNHQIPLAQAGGETHGHLNDHYSTDQHLGLAEIERQISASLYAMNGANSYYDNMNAEYAIFDPTDPIWDLPSLSQLFCPT

SEQ ID NO: 5445 - protein, 232 aa, Arabidopsis thaliana
MSNNNNSPTTVNQETTTSREVSITLPTDQSPQTSPGSSSSPSPRPSGGSPARRTATGLSGKHSIFRGIRLRNGKWVSEIREPRKTTRIWLGTYPVPEMAAAAYDVAALALKGPDAVLNFPGLALTYVAPVSNSAADIRAAASRAAEMKQPDQGGDEKVLEPVQPGKEEELEEVSCNSCSLEFMDEEAMLNMPTLLTEMAEGMLMSPPRMMIHPTMEDDSPENHEGDNLWSYK

SEQ ID NO: 5446 - protein, 178 aa, Arabidopsis thaliana
MQSKYKGVRKRKWGKWVSEIRLPNSRERIWLGSYDTPEKAARAFDAALYCLRGNNAKFNFPDNPPVISGGRNLSRSEIREAAARFANSAEDDSSGGAGYEIRQESASTSMDVDSEFLSMLPTVGSGNFASEFGLFPGFDDFSDEYSGDRFREQLSPTQDYYQLGEETYADGSMFLWNF

SEQ ID NO: 5447 - protein, 211 aa, Arabidopsis thaliana
MVKTLQKTPKRMSSPSSSSSSSSSTSSSSIRMKKYKGVRMRSWGSWVSEIRAPNQKTRIWLGSYSTAEAAARAYDAALLCLKGSSANNLNFPEISTSLYHIINNGDNNNDMSPKSIQRVAAAAAAANTDPSSSSVSTSSPLLSSPSEDLYDVVSMSQYDQQVSLSESSSWYNCFDGDDQFMFINGVSAPYLTTSLSDDFFEEGDIRLWNFC

SEQ ID NO: 5448 - protein, 195 aa, Arabidopsis thaliana
MVKQAMKEEEKKRNTAMQSKYKGVRKRKWGKWVSEIRLPHSRERIWLGSYDTPEKAARAFDAAQFCLRGGDANFNFPNNPPSISVEKSLTPPEIQEAAARFANTFQDIVKGEEESGLVPGSEIRPESPSTSASVATSTVDYDFSFLDLLPMNFGFDSFSDDFSGFSGGDRFTEILPIEDYGGESLLDESLILWDF

SEQ ID NO: 5449 - protein, 213 aa, Arabidopsis thaliana
MNSFSAFSEMFGSDYEPQGGDYCPTLATSCPKKPAGRKKFRETRHPIYRGVRQRNSGKWVSEVREPNKKTRIWLGTFQTAEMAARAHDVAALALRGRSACLNFADSAWRLRIPESTCAKDIQKAAAEAALAFQDETCDTTTTNHGLDMEETMVEAIYTPEQSEGAFYMDEETMFGMPTLLDNMAEGMLLPPPSVQWNHNYDGEGDGDVSLWSY

SEQ ID NO: 5450 - protein, 213 aa, Arabidopsis thaliana
MNSFSAFSEMFGSDYEPQGGDYCPTLATSCPKKPAGRKKFRETRHPIYRGVRQRNSGKWVSEVREPNKKTRIWLGTFQTAEMAARAHDVAALALRGRSACLNFADSAWRLRIPESTCAKDIQKAAAEAALAFQDETCDTTTTDHGLDMEETMVEAIYTPEQSEGAFYMDEETMFGMPTLLDNMAEGMLLPPPSVQWNHNYDGEGDGDVSLWSY

SEQ ID NO: 5451 - protein, 227 aa, Arabidopsis thaliana
MNSFSAFSEMFGSDYESPVSSGGDYSPKLATSCPKKPAGRKKFRETRHPIYRGVRQRNSGKWVCELREPNKKTRIWLGTFQTAEMAARAHDVAAIALRGRSACLNFADSAWRLRIPESTCAKEIQKAAAEAALNFQDEMCHMTTDAHGLDMEETLVEAIYTPEQSQDAFYMDEEAMLGMSSLLDNMAEGCFYRRRRFNGTIILMSREMMTCPYGAIKIRFLFPFLVL

SEQ ID NO: 5452 - protein, 216 aa, Arabidopsis thaliana
MNSCSAFSEMFGSDYESPVSSGGDYSPKLATSCPKKPAGRKKFRETRHPIYRGVRQRNSGKWVCELREPNKKTRIWLGTFQTAEMAARAHDVAAIALRGRSACLNFADSAWRLRIPESTCAKEIQKAAAEAALNFQDEMCHMTTDAHGLDMEETLVEAIYTPEQSQDAFYMDEEAMLGMSSLLDNMAEGMLLPSPSVQWNYNFDVEGDDDVSLWSY

SEQ ID NO: 5453 - protein, 216 aa, Arabidopsis thaliana
MNSFSAFSEMFGSDYESPVSSGGDYSPKLATSCPKKPAGRKKFRETRHPIYRGVRQRNSGKWVCELREPNKKTRIWLGTFQTAEMAARAHDVAAIALRGRSACLNFADSAWRLRIPESTCAKEIQKAAAEAALNFQDEMCHMTTDAHGLDMEETLVEAIYTPEQSQDAFYMDEEAMLGMSSLLDNMAEGMLLPSPSVQWNYNFDVEGDDDVSLWSY

SEQ ID NO: 5454 - protein, 224 aa, Arabidopsis thaliana
MNPFYSTFPDSFLSISDHRSPVSDSSECSPKLASSCPKKRAGRKKFRETRHPIYRGVRQRNSGKWVCEVREPNKKSRIWLGTFPTVEMAARAHDVAALALRGRSACLNFADSAWRLRIPETTCPKEIQKAASEAAMAFQNETTTEGSKTAAEAEEAAGEGVREGERRAEEQNGGVFYMDDEALLGMPNFFENMAEGMLLPPPEVGWNHNDFDGVGDVSLWSFDE

SEQ ID NO: 5455 - protein, 239 aa, Stylosanthes hamata
MAPREKTPAVKVNAGVKEVHFRGVRKRPWGRYAAEIRDPGKKSRVWLGTFDTAEDAARAYDAAAREFRGPKAKTNFPFPDSDDINSNNNNIVVVKNNNRSPSQSSTVESSSRDRDSYSAAAAATAVADSSPLDLNLAPAGAGFAGSIRFPFQQPFAVFPGGMPAAKQALYLDAVLRASMASHGQFGFGYNRPAAAAAGAQSDSDSSSVIDLNQNEGDVAKNNGRGLVLDLNEPPPQEMA

SEQ ID NO: 5456 - protein, 238 aa, Stylosanthes hamata
MAPREKTPAVKVNGKSNAGVKEVHFRGVRKRPWGRYAAEIRDPGKKSRVWLGTFDTAEDAARAYDAAAREFRGPKAKTNFPFPDSDDINNNNIVVVKNNNRSPSQSSTVESSSRDRDSYSAAAATAVADSSPLDLNLAPQELDSPDPFGSHSTQPFAVFPGGMPAAKQALYLDAVLRASMASHGQFGFGYNRPAAAGAQSDSDSSSVIDLNQNEGDVAKNNGRGLVLDLNEPPPQEMA

SEQ ID NO: 5457 - protein, 344 aa, Cicer arietinum
GFREFKDDSDFDEDEEDDDDDEGLLVGGKGFTFSSNNTKSFKTFSRGSTAAKSVSPKSNEQAEKACKRKRKNQYRGIRQRPWGKWAAEIRDPRKGVRVWLGTFNTAEEAARAYDAEARRIRGKKAKVNFPEEAPVTSSKRFKPNLENKLVNKNLNSFNPNGNKMFNFGENVENYYSPMDQVEQKPLVNNNNQYANMGPFSGNGVQHSQISPSADVTAYFSSEHSSNSFDYSDLGWGEQGPKTPEISSMLSAAAPLESESQYVQNNMQSNNNQNMLPVEDNSAKTLSEELADIESQLKFFETPYDDNWGDASLASFLGGDATQDGGNPMNLWSFDDLPSISGGVF

SEQ ID NO: 5458 - protein, 250 aa, Glycine max
  unsure (1)..(250): unsure at all Xaa locations
MYGRSDSYESDLALLDSIRRHLLGESELIFGAPNFGSGRSSSFSSLDSCLSDDWGELPFKEDDSEDMVLYGVLRDAVNVGWVPSLDAGSPERSGFPAVKLEPDVMPALINPCPPPAXXAVEEKKVVPPKGKHYRGVRQRPWGKFAAEIRDPAKNGARVWLGTFETAEDAALAYDRAAYRMRGSRALLNFPLRVNSGEPDPVRVTSKRSSSPESMAAAAPKRKKVMVVGTVQEQVGSQVVECTRGEQLLVS

SEQ ID NO: 5459 - protein, 324 aa, Glycine max
  unsure (1)..(324): unsure at all Xaa locations
MYGQSSYESDLALLDSIRRHLLGDSEEHKFGAPNVSSGNTPAYSRSSCFSRLYPCLSNDWGELPLKEDDSEDMLLYGVLRDAINAGWVPSLDASSPESFSSGFIPAVTVKSEPDLFPAPEPVYIPPAAQKAEPAVVPAKGKHYRGVRQRPWGKFAAEIRDPAKNGARVWLGTFETAEDAALAYDRAAYRMRGSRALLNFPLRINSGEPRPVRVTAKRASAEXXCSSSESGSWVKKRKKVVGXERGTWRAVVGEVICDAKKGWNKWVGMLTHCSSGTVGLIKSKAKKENKPHLEKLIRVEVLFGFVNTVTRFLIFWFNSIIISVT

SEQ ID NO: 5460 - protein, 325 aa, Glycine max
  unsure (1)..(325): unsure at all Xaa locations
MYGQSCYESDLALLDSIRRHLLGDSEEHRFGAPNVNSGSTPLYSRSSSFGRLYPCLSNDWGELPLMEDDSEDMLLYGVLRDAVNVGWVPSLDASSPESFSSAFMPPVTVKSETDLFPAPEPICNPPVVQGPAPAVVPAKGKHYRGVRQRPWGKFAAEIRDPAKNGARVWLGTFETAEDAALAYXDRAAYRMRGSRALLNFPLRINSGEPEPVRVTAKRASAEXXCSSSESGSWVKKRKKVVGXERGTSRAVVGEVICDAKKGWNKWVGMLTHCSSGTVGLIKSKAKKENKPHLEKLIRVEVLFGFVNTVTRFLIFWFNSIIISVT

SEQ ID NO: 5461 - protein, 210 aa, Glycine max
  unsure (1)..(210): unsure at all Xaa locations
MYGQSSSSSSSYESDLALLDSIRHHLLGESESIFGAPNFGSGRSSSFSSLDSCLSDNWGELPFKEDDTEDMVLYGVLRDAVNVGWVPSLDAGSPESVSSGFPAVKLEPDLMPALISLVSASGGCGGGEEXVVPAKGKHYPGVRQRPWGKFAAEIRDPAKNGARVWLGTFDTAEDAALAYDRAAYRLVGTVQEQVGSQVAECTRGEQLLVS

SEQ ID NO: 5462 - protein, 337 aa, Glycine max
  unsure (1)..(337): unsure at all Xaa locations
VYLPSSRTIAFINTLIQFPFQVRIFKTPSLILFSKHDTNIKKKPPEICTDSSYFFESDLALLDSIRRHLXLGESEMKFGAPNFGSGRSSCFSSLYPCLSDDWGELPLKEDDSEDMVLYGVLRDAVNAGXWVPSLDASSPGRVLSGFPALQLEPDVMLVGFHPGGDREIRTGSISPAVVPAKGKHYRGVRQRPWGKFAAEIRDPAKNGARVWLGTFETAEDAALAYDRAAYRMRGSRAWWHSXPLRRTSGEARPVRVTARWGSVQACXEAGGGTCGEELEEGGGLLVGYVVXQLLVGKWVRRTRGRIKVDSGTSKAQVRLRAGHTRRPNEETNHIWEN

SEQ ID NO: 5463 - protein, 197 aa, Glycine max
TRPNHTTYESNETSNLYGAMSSHALNTNVNALDHFEIPSFRNIFLTENWAELPLKENDTNDMVIYGALRDAAATGWFPANGNEVSNVSVAVKMENEGQNSKTTAARGTRTPPKKGLSYRGVRRRPWGKYAAEIRDTKRNGVRVWLGTYETAEDAALAYDRAAFKMRGSKAKLNFPHLIGSDHEPIKVKKKKRTLKKH

SEQ ID NO: 5464 - protein, 215 aa, Glycine max
  unsure (1)..(215): unsure at all Xaa locations
MSSTTTDSDCSYLEQIQQYLLHNDSTILXXPPQAFPSPSHDSSSDASVHFEHPSEAHDVXXAPPKWRRYRGVRRRPWGKFAAEIRDPKKNGSRVWLGTYVNEEEAALAYDKAAFNMRGQKAKLNFPHLIGSAVQXXEPPCLAVSKRSLPESSPPTSPXXDSCESKGSKRRKSLVDLLNNLAKNKSQAKVVEMALEANEVEQWVNELNDCTLFWCS

SEQ ID NO: 5465 - protein, 277 aa, Glycine max
  unsure (1)..(277): unsure at all Xaa locations
MANALEVSALNRIKLHLLGELSPLTQFQEPNTTSLCSQSSTSDSFTTVDQIFSEFLDFPTTTTSSTEQNQFSAFEFEPKPEIIEPQXXEFSFPTTRCKSSRRPSLQISLPKKTEWIQFGEPEVTETVSQSNPNAEEKKHYRGVRQRPWGKFAAEIRDPNKRGSRVWLGTFDTAIEAAKAYDRAAFRLRGSKAILNFPLEAGADDRKRQREEKVEPVLEVVKREKIGESDVSLIKNNPLTPSSWLGFWGSDANGIFTVPPLSPLSPHPALGFPQLMVV

SEQ ID NO: 5466 - protein, 182 aa, Glycine max
MGSNKTYEEEESTVLFSHSQTQTELLPFNENDPQDMVIYQVLNEANALTNTFLPQRLHQPQLCLEPTRNITKKHYRGVRRRPWGKYAAEIRDSARHGARIWLGTFQTAEEAAMAYDRAAFKMRGSKALLNFPAEIVAATVSFNNTNSNNHDAVSDSSAGSSCTNNSVQLNRNQSESCTSSTG

SEQ ID NO: 5467 - protein, 243 aa, Glycine max
  unsure (1)..(243): unsure at all Xaa locations
MQSSISQSDIFITDYLVPQEVPFQFQFQDMSKNDNNMPMNHTNNNLQMPQITSFSKPPRSSSNLSNRKPSLKNITIPSITSANNTKDDKHYRGVRRRPWGKYAAEIRDPNRKGSRVWLGTFDTAIEAAKAYDKAAFKMRGSKAILNFPLEIGSDQSKEESSSSSSSVSKRKRVKGRTTMRKVSLTTIXNSNKHVKKEECPLTPSCWKGFWDTDVMGTIFSVPPLSPLSPLMVVXDFVELLLFQ

SEQ ID NO: 5468 - protein, 187 aa, Glycine max
  unsure (1)..(187): unsure at all Xaa locations
EETNKHGKQENLRGRRKHGSIFPFPNTNRLAXLPFNENDPQDMVIYQVLHEANALTNTFLPQPTRNITKKHYRGVRRRPWGKYAAEIRDSARHGARIWLGTFQTAEEAAMAYDRAAFKMRGSKALLNFPAEIVAAATATDFKSSSNNNNNNNNNNPDAVSDSSAGSSCTNNSTWVNRNQSEITSGTG

SEQ ID NO: 5469 - protein, 300 aa, Glycine max
  unsure (1)..(300): unsure at all Xaa locations
TQHTPLLSLPSXRTKRSEKRFLTXVMANAAEVSALNRIKLHLLGELSPLATPLNYFDESNPSPSESSNSQSSSVSLNHYFTDLFEFDSKPQIIDLQTPKTLXFSSEXKPQLXXRKPSLLIAVPKKTEWIQFGSPDPNPVMAAPENLPQKNHYRGVRQRPWGKFAAEIRDPNKRGSRVWLGTFDTAVEAAKAYDRAAFRLRGSKAILNFPLEVSAXWRSAAAEGNVERKRRREEEEVVVEEVKPVVKKEKITEQDVSCFREMPVXTPSMWTGFWDSDVKDIFNVPPLSPLSPFGFSPLVAV

SEQ ID NO: 5470 - protein, 280 aa, Glycine max
  unsure (1)..(280): unsure at all Xaa locations
MANAAEVSALKRIKLHLLGELSPLATPQNKFDQTNPSPSESSNSESSSISLNHYFTDLLEPEXXNFLXFEFDSKPQVIDLXNPENPNFSXEEASIXNRKPSLLIAVPKKTEWIQFGNPEVAAPENQPEKKHYRGVRQRPWGKFAAEIRDPNKRGSRVWLGTFDTAIEAAKAYDRAAFRLRGSKAILNFPLEVNTAAETVSVAAVDVERKRRREEEEVVVEDVKAVVKKEKITEHDVSCFRGMPLTPSMWTGFWDSDVKDIFNIPPLSPLSPFGFSPLVAV

SEQ ID NO: 5471 - protein, 202 aa, Glycine max
MVSATVDSDFAFLESVQQYLLGHDSINLMSETHQAASHDPFSDPNKCDGDSGNIAFRSEDATAVVARDHAPPTWKHYRGVRRRPWGKFAAEIRDPKKNGARVWLGTYDTEEKAALAYDKAAFKMRGQKAKLNFPHLIDSDNSDELSEPVMMTTSKRSLLEISSPSSSCSDDSSESQGTKRRKSLAELLNKLAKNRSQVKVEC

SEQ ID NO: 5472 - protein, 202 aa, Glycine max; identical to SEQ ID NO: 5471

SEQ ID NO: 5473 - protein, 278 aa, Glycine max
  unsure (1)..(278): unsure at all Xaa locations
MANALEVSALNRIKLHLLGELSPLTQFQEPNTTSLCSQSSTSDSFTTVDQIFSEFLDFPTTTTSSTEQNQFSAFEFEPKPEIIEPQXXEFSFPTTRCKSSRRPSLQISLPKKTEWIQFGEPEVTETVSQSNPNAEEKKHYRGVRQRPWGKFAAXEIRDPNKRGSRVWLGTFDTAIEAAKAYDRAAFRLRGSKAILNFPLEAGADDRKRQREEKVEPVLEVVKREKIGESDVSLIKNNPLTPSSWLGFWGSDANGIFTVPPLSPLSPHPALGFPQLMVV

SEQ ID NO: 5474 - protein, 274 aa, Glycine max
  unsure (1)..(274): unsure at all Xaa locations
IIKPFTVLNPISLFAPQTPYKPQFHNQKCKVQSHNLRFXITDYLLPQEVPSQFQFPDMSNNNIPMNHTNLQMPQITSFSKPPRSSSNLSNRKPSLRNITIPSITSDETNNIKENKHYRGVRRRPWGKYAAEIRDPNRKGSRVWLGTFDTAIEAAKAYDKAAFKMRGSKAILNFPLEIGESEESVSSCIKVGVKREREEESKSNNYEKSEFNNNNNSNKHVKKEECSPKAVCPLTPSCWKGFWDTDVMGTIFSVPPLSPLSPLMVVXDCGLSLFQ

SEQ ID NO: 5475 - protein, 94 aa, Glycine max
  unsure (1)..(94): unsure at all Xaa locations
XRARARNPARVMCSDXAAEEKKVVPAKGKHYRGVRQRPWGKFAAEIRDPAKNGARVWLGTFETAEDAALAYDRAAYRLPAKRKKVVNGLIVNCL

SEQ ID NO: 5476 - protein, 239 aa, Glycine max
  unsure (1)..(239): unsure at all Xaa locations
MATAEEISTLKLLRQYLLGDIXXDPFLTNLIPVKLEDPSSGLDMGSNFSEQSSFCKFLECFDFEAEVVGLTSHHKVQSSIATSPPQNFNFPEEPMVSMKKEATCYATRHYRGVRRRPWGKFAAEIRDPKKKGSRVWLGTFDTEIDAAKAYDCAAFRMRGHKAVLNFPLEAGMYPEPNSSGRKRRREYTXQLPQVQGMLCHEKXFSVGEPCFSFGIFCQLHKLKQGFIVTLQLSMMRSVI

SEQ ID NO: 5477 - protein, 173 aa, Glycine max
  unsure (1)..(173): unsure at all Xaa locations
MDIHSNHGATSEGILENVWAKIMSSDRADGRKGDAAECSNSWEELPNLDGREGSMEILQRLPSLGRWISMGADFWEEVLEGIILPNTSNTDPVAITTWKLEALMKLITSVTKHYRGVRRRPWGKYAAEIRDSSKKGARVWLGTFDTAEEAALSYDKAALRIRGPKAYLNFPLX

SEQ ID NO: 5478 - protein, 232 aa, Glycine max
  unsure (1)..(232): unsure at all Xaa locations
INTKIRNTIVSITIQNMATTISCDFSSVESIQHYLLELEHDFNTLMNASNHEICYSPTYNSFRVHDAEGSLACKREHXXKVEREFHAPPAWKRYRGVRRRPWGKFAAEIRDPKKNGARIWLGTYETEEEAGLAYDRAAFKMRGSKAKLNFPHLIGSHAPLKPIRVLTKTLKQNLLESDLSYSSAXXQTQESKKRKNLTDLLNRLAKNRKQVEVFEMSLHASNDVNVDQWWSN

SEQ ID NO: 5479 - protein, 220 aa, Glycine max
  unsure (1)..(220): unsure at all Xaa locations
MDSPSSFFNSPSSGFCSESSSPEAFSWEGXXLPFNENDPEEMLLYGMIAGATTEEHSGERASSEESAAARKEKSYRGVRRRPWGKFAAEIRDSTRHGMRVWLGTFDSAEAAALAYDQAAFSMRGSAAILNFPAEIVRESLKEMNYAHDDSNNEEGCSPVVALKRKHSLRRKINVRKKKNNNNNSKLQSSTVDNAVVFEDLGPDYLEQLLMSSDHHIPTTF

SEQ ID NO: 5480 - protein, 218 aa, Glycine max
  unsure (1)..(218): unsure at all Xaa locations
KKITPKSEKTIVFITIQNMATTISCDFSSMESIQHYLLEPEHDSNALMNISNHAATYNAFPSPTFSLEGDDANDSLACKREHPREERDHAPPVWKHYRGVRRRTWGKFAAEIRDPKKNGARIWLGTYETEEAAGLAYDRAAFKMRGSKAKLNFPHLIGSHAPXXQPVRVTKALKRNSPXXKRKNLADLLNRLAKNRSQILIQVLEMGLHANYVNVEQW

SEQ ID NO: 5481 - protein, 177 aa, Glycine max
  unsure (1)..(177): unsure at all Xaa locations
MYNTLTYHTLIQHFTFQVPKDQSQMNNFNTTLESDDFALLESIQRYLLDDNEVNALTEVLATPNNNVDAVNSPLSSSGHATTAATAARGASAAVARAXATPVAKXYKGVRRRPWGKFAXAEIRDPSRNGARVWLGTYESAEDAALAYDRAAFEMRGSKAKLNFPHLIWVQGCRAEPK

SEQ ID NO: 5482 - protein, 204 aa, Glycine max
  unsure (1)..(204): unsure at all Xaa locations
MTTAEETSNLDLIRQHLLGENIISDSSFFSNQFDFTSYISDNTSFFTFLEGYDLMADMKFVDSDNTIXLQRRLRNAXXISPEPLVSSKEKPKKLEYDKAKRYRGVRRRPWGKFAAEIRDPTRKGTRVWLGTFDSEIDAAKAYDCAAFKMRGQKAILNFPLEAGLSDPKPNSCGRKRRRESHDHEXGAATSPSSSWCFLRKSEKI

SEQ ID NO: 5483 - protein, 179 aa, Glycine max
  unsure (1)..(179): unsure at all Xaa locations
MENNTIYCDLSPLESVQHYLLEHENDSXXHYLQCLQPRNLLGRCPXDSKGLFSCKSEQHVDAREFHTHPVWKHYRGVRRRPWGKFAAEIWVPKSKGGRVWLGTYETEEEAGLAYDRAAFKMRGSKAKLNFPHLVXXEHVFLEPKRIXXKASKQNSSKPDQSFSPTPETQGSKKRKKFFS

SEQ ID NO: 5484 - protein, 132 aa, Glycine max
LRHTMEEESKEKKKDTKEARYRGVRRRPWGKFAAEIRDPARHGARVWLGTFLTAEEAARAYDRAAYEMRGALAVLNFPNEYPSCSSMNSSSTLAPSSSSSNSIIEFECLDDKLLEDLLDCDDYAYEKDLPKN

SEQ ID NO: 5485 - protein, 203 aa, Glycine max
  unsure (1)..(203): unsure at all Xaa locations
SHFFHHSPEVTTAEKTSNLDLIRQHLFGENIISDSSSFVSNLHHXXPVKLEPPSSPEFECTSYILEVIKKCNINSPEEQPMVSSSSEEKPTMKKSEHYDEAKRYRGVRRRPWGKFAAEIRDPTRKGTRVWLGTFDSEIDAAKAYDCAAFKMRGQKAILNFPLEAGEYPKPNNSCGRKRRRDXEPXSXIRASISSSSSWCFMRK

SEQ ID NO: 5486 - protein, 217 aa, Glycine max
  unsure (1)..(217): unsure at all Xaa locations
MAPRDKTSAVKPSGNAGVKDLHFRGVRKRPWGRFAAEIRDPAKKTRVWLGTFDTAEEAARAYDAAAREFRGPKAKTNFPLPSENFXXNASPSQSSTVESSSRDRDVAADSSPLDLNLAPGRXSPPLDSPSXNQFPVFPGAVPAANQVMYFDAVLRAGMAGPRGFAFGYNPHPVAASATSDSDSSSVIDLNHNEGVVKGNGSRMFDLDLNHPPPHEIA

SEQ ID NO: 5487 - protein, 270 aa, Glycine max
  unsure (1)..(270): unsure at all Xaa locations
HKEYRAANVKVDPRRLHGKLPLSSQASEEKEDTVEEFDAYNNYASWSSETDMSEMVSALAQVMGNQSEPIHATINLLSXFSTSVVKDQPQPYPSQPPPDQEVAKKPHYRGVRQRPWGKWAAEIRDPKKAARVWLGTFETAEDAALAYDKAALKFKGTKAKLNFPERVHQDTSSATGSGSSVDAVAPPSLSTHDQHGHQVFPNLYQYAQILSSDDAQLPYFTSHLXQSTTTTATATTFXNSQFSSTFSSTSSYFYNQQQQYDQQGHDHSNH

SEQ ID NO: 5488 - protein, 165 aa, Glycine max
  unsure (1)..(165): unsure at all Xaa locations
FLSSKRRTMEGGRSSASNGNGEVRYRGIRRRPWGKFAAEIRDPTRKGTRIWLGTFDTAEQAARAYDAAAFHFRGHRAILNFPNEYQSHNPNSSLPMPLAVPAPPSYSSSSSTSNYSGDXDDTFELEYLDNKLLEELLQMQDNRXXYKXNIXQANQXGSTAMYGMK

SEQ ID NO: 5489 - protein, 138 aa, Glycine max
  unsure (1)..(138): unsure at all Xaa locations
MEGGRSSVSNGXXVEVRYRGIRRRPWGKFAAEIRDPTRKGTRIWLGTFDTAEQAARAYDAAAFHFRGHRAILNFPNEYQSHNPNSSLPMPLAVSAPPSYSSSSSTSNYSDHDDDTFELEYFDNKLLEELLQMQDNRHF

SEQ ID NO: 5490 - protein, 114 aa, Glycine max
  unsure (1)..(114): unsure at all Xaa locations
SCXNALRLEQTQKTRRYRGVRRRPWGKFAAEIRDPKKKGSRVWLGTFDTEIDAAKAYDCAAFRMRGHKAVLNFPLEAGMYPEPNSSGRKRRRXIIQQLSQVQVMSCHEKXFSVG

SEQ ID NO: 5491 - protein, 265 aa, Glycine max
KKKKKQLEGELVSKVDRRQGKRSLPPHEEKKEAFNFPIIHPTPSQNRKEQASPSPFSLLMSNNKNNTFFPTPHGQISTSEFVNSQNNPSQATNQGIDDIRKKHYRGVRQRPWGKWAAEIRDPKKAARVWLGTFDTAEAAAMAYDAAALRFKGNKAKLNFPERVVMPIQPQTNNNNSTSSSAPEGFPNLEEYARLLSCSDDDDFQLALGLYQHHNNEDFICGSSQPPPVPFFVSSSSSSSAMTSSYSDFLGQGGSTGFDEGNKRGS

SEQ ID NO: 5492 - protein, 263 aa, Glycine max
  unsure (1)..(263): unsure at all Xaa locations
MDLDFDSTFFLNHSFFPENSSIFGDTFSWDYNFVLDDIFNNLSDNSSQSQTKETSSASNVSSCIGSVELQEVSSNTTYKEVKKVRPPPPEPRMYRGVRKRPWGKFAAEIRDSTRNGVRVWIGTFDTAEAAALAYDQAAFSTRGSLAVLNFPEEVVRESLKDMPSKPWEEASPVLALKRKHTMRTKSNSKKKTKVDQREQLDFSRTSQNVLVFKNLGAEYLKQLLTSSXSASLFSSSLFFELFVNNFLLCNSFITRIQRYILFX

SEQ ID NO: 5493 - protein, 127 aa, Glycine max
  unsure (1)..(127): unsure at all Xaa locations
FSSTIQNPPQATNQGIDDIRKKHYRGVRQRPWGKWAAEIRDPKKAARVWLGTFDTAEAAAMAYDAAALRFKGNKAKLNFPERAQTNNNNSTSSSAPTTQSSSSRFYYSNYKITPEVXKIYNTHLSSL

SEQ ID NO: 5494 - protein, 82 aa, Glycine max
  unsure (1)..(82): unsure at all Xaa locations
LQNNKERSYIGVRKRPWGKFAAEIRDTTRNGARVWLGTFDSAEAAALAYDQAAFTMRGDNAVLNFPVKTVKESLQEIQYSCX

SEQ ID NO: 5495 - protein, 133 aa, Glycine max
  unsure (1)..(133): unsure at all Xaa locations
XACGTHVPXRXXLSFRGVRRRPWGKYAAEIRDAKRNGVRVWLGTYETAENAALAYDRAAFKMHGSKAKLNFPHLIASAHHHVEPIRIALKKHSFDVSLSSSEVAAKRSKNGTASTNLELNDSKLQFPMDNRWQ

SEQ ID NO: 5496 - protein, 132 aa, Glycine max
  unsure (1)..(132): unsure at all Xaa locations
MEDLKEKVNEGEPTQIKYRGVRRRPWGKFAAEIRDSARHGARVWLGTFNTAEEAARAYDRAAFEMRGATAILNFPDEHPPCNVTSLSKKSSSSNTEIGKQVVVFECLDDKLLEELLDCDGENHQXKLGLLGR

SEQ ID NO: 5497 - protein, 242 aa, Glycine max
  unsure (1)..(242): unsure at all Xaa locations
XXKQSNSVILFSSSLQTPNTLNGLFLRSXHSSNSSFFPFNENDPEEMLLYGMITSYQEKVIIKEEEVNSEENSNKNKKSINKSSFRGVRSRPWGKFAAEIRDSTRHGVRVWLGTFDSAEAAALAYDQAAFSMRGSAAVLNFPVEKVKESLRDMNCTLSQLDGSSPVVALKRRHSLGRKMAAKKKXXVEETHGDVRLENVVVLEDLGAEYLEHLLMMSSHDTTSCSCTFFSXPWSLWSLNFSL

SEQ ID NO: 5498 - protein, 174 aa, Glycine max
  unsure (1)..(174): unsure at all Xaa locations
XTSSVSHGSGSVVEAEVSVSYRGVRRRPWGKFAAEIRDSTRNGVRVWLGTFDTAEAAALAYDQAALVMRGSMAVLNFPAEIVRQSLRNMEQYVQEGSSPVLELKKRHSMKRKSETKKHQLHDVMVLEDLGAEYLEHLLTLSQDMDMDACXLSYIYLLRQTLPFPSPPLSFLSLS

SEQ ID NO: 5499 - protein, 232 aa, Glycine max
  unsure (1)..(232): unsure at all Xaa locations
MSSSSFSPATLTTEQELSVIVAALTNVVAGSTSASSSFSLPEFRLPQTSDPLAAACLMPPPPPPSMDTCRECNIAGCLGCNFFPEEKKIRKQKRAKKKYRGVRQRPWGKWAAEIRDPRRAARVWLGTFGTAEDAARAYDKAAIEFRGPRAKLNFPLVDESLTLQQSEPERVQTEEEQIKTENLNQGMEMDSWNKDTEFCNEADFHQLMMMMDFAGDSSDSATGNALSSXNIQ

SEQ ID NO: 5500 - protein, 177 aa, Glycine max
  unsure (1)..(177): unsure at all Xaa locations
NSVYSSGVRMDSSSHQLLPFNENDPEDMLLYGIITSCXXEKKVTINQEQVNKKRSSFRGVRRRPWGKFAAEIRDSTRHGVRVWLGTFDNAEAAALAYDQAAFSMRGSGAVLNFPVEKVKESLRDMKLDGCSPVVALKRRHSLAAKRKXXEDVLVFHDLGADYLEHLVMCSDLPSTTI

SEQ ID NO: 5501 - protein, 279 aa, Glycine max
MMSRFMHAPSPVLSSSHPHLGVGHKREREDDTGAGASGGVAIAAASSQTQTQEIESAGGDRRRRYRGVRQRPWGKWAAEIRDPHKAARVWLGTFDTAEAAARAYDEAALRFRGNRAKLNFPENVVPVPPPPPVPDLPASAVAGSDSISGSGSVVAGFSPTLMQGAPFQGSSAFLRDYWGYSQLLRSTGDFHGLDQWFFDSQMAAFQSSSSSLLPSPPPPSFSPSSASYPLFSSSQQMGIFRPPGEQGHGGEDGGSGSEFSELPPSTWSDTSGYPPPPPG

SEQ ID NO: 5502 - protein, 279 aa, Glycine max; identical to SEQ ID NO: 5501

SEQ ID NO: 5503 - protein, 279 aa, Glycine max; identical to SEQ ID NO: 5501

SEQ ID NO: 5504 - protein, 273 aa, Glycine max
  unsure (1)..(273): unsure at all Xaa locations
IQDNEEPFIELNKVDRRHGKRPLPSDQSRERREGFNFFNQSPPKSQGGEASQFSFMHPINTGDDSTLSSPIPQYGQISNSCFETQDPSLQPLNQXXGNGRKRHYRGVRQRPWGKWAAEIRDPKKAARVWLGTFDTAEAAAAAYDAAALKFKGSKAKLNFPEHVLLPPPPISSSSPPCNNTQEEGFPNLMQYAHWSRDDDDLQRIASGLHQHHHHNEAFYDSSSSTLFSSTSTTYSMTVSDQQQNIGDDTSTPKGAEYNYGGCFFRGSDFHDKN

SEQ ID NO: 5505 - protein, 165 aa, Glycine max
  unsure (1)..(165): unsure at all Xaa locations
MASSSASREGHYRGVRKRPWGRYAAEIRDPWKKTRVWLGTFDTPEEAALAYDGAARSLRGAKAKTNFPPAPPLCLXPQRPFLRSPLAPRPPSQPRPXASSSTPPFSETLNRRNYLFXXPPPPSSLTEAPTXGGVQVVESSPTASFLGLVRRGIPIDLNEPPPLWL

SEQ ID NO: 5506 - protein, 114 aa, Glycine max
  unsure (1)..(114): unsure at all Xaa locations
MDEEGSXGEGXGGXAGDVRYRGVRRRPWGKFAAEIRDSTRQGQRVWLGTFNTAEEAARAYDRAAYAMRGPFAILNFPDEYPMTAGGATNAATYSSAASSSSSASSSRHANVARX

SEQ ID NO: 5507 - protein, 229 aa, Glycine max
  unsure (1)..(229): unsure at all Xaa locations
MCGGAIISDFIDVNLNSGRKLTTHNTHHQLHTFSDFHATSSSNYSSVLKTKTLITLSLSKVKMCGGAIISDFIDVNLNSGRKLTTHNTHHQLHTFSDFHATXFFQTSTILPGSKPPXASSASKQPRSEVEGSGRVRKNVYRGIRQRPWGKWAAEIRDPRKGVRVWLGTFNTAEEAARAYDNAAKRIRGDKAKLNFPDSKNPCLNPFQPNTSFPTSNPSKKKKKLGLDSL

SEQ ID NO: 5508 - protein, 301 aa, Glycine max
  unsure (1)..(301): unsure at all Xaa locations
IQDNEKPFIELNKVDRRHGKRPLPSDQSRERREGFNFFNQSPPKSQGGEASQFSFMHPINTGDDSTLSSPIPQYGQISNSCFETQDPSLQPLNQXXGNGRKRHYRGVRQRPWGKWAAEIRDPKKAARVWLGTFDTAEAAAAAYDAAALKFKGSKAKLNFPEHVLQNNHSYCYGSSALAPPPPLPLPSSQHVYDQPQQPLLSSSSQEEGFPNLMQYAQLHDDXSTTCCFRPSSSTTSSSSSSSQXSFLXFKFFNFVXSSSSTTSSMAVSDQQQIGDDTSTAPKRGEYYDSCFFRGNDFHDKN

SEQ ID NO: 5509 - protein, 381 aa, Glycine max
  unsure (1)..(381): unsure at all Xaa locations
NKKRNMEDSILCKHTVHHTVTKKLTPKKSSQTNSTTERRIVRISYTDPDATDSSSDEEGFPFVRQRMKRYVNQIEIEXRRRRKSCSXXRPAGEACRRPAKLHSGKKFRGVRQRPWGKWAAEIRDPARRVRLWLGTYDTAEEAAMVYDNAAIRLRGPDALTNFVTPPQRDSPSPSPPPAAAETPAEVCEMKVVVTEEASGSGYDSSEDHCHHNLSSPTSVLQFRSNSSEENSESQQKAEQVLRECEGETETSLFEETGEFLALDNMPLPAWDDVFNFETPEYPXLFSCPSPSSLCQVDDFFQDILFASDPLVLLXTLLKLTKLSFVNRQSSTSRLAQYSWQIFASGGKKKMPSFYLIKILYIYIYIYIYIYIYIYSFICVFI

SEQ ID NO: 5510 - protein, 175 aa, Glycine max
  unsure (1)..(175): unsure at all Xaa locations
MAPSSSASASREGHYRGVRKRPWGRYAAEIRDPWKKTRVWLGTFDTPEEAALAYDGAARSLRGAKAKTNFPPAXRPSASTSXRPFLRSPLAPPRPPPQPRPQRXFLHTAVLRDXSTRPNNLSHPPPQXLTEIPTAELCPXGGGVQVMEGSPTASFLGFVRRGIPIDLNEPPPMWL

SEQ ID NO: 5511 - protein, 222 aa, Glycine max
  unsure (1)..(222): unsure at all Xaa locations
ESIPQSHAHKRRGKENKNKTAEFWCQSTLRFQEMDFDSSFFQYQNFNSSFVNLSSNLTHASHQLKETHASPQPQPPKETNKDKRPFRGVRRRPWGKFAAEIRDSTRNGVRVWIGTFDTAEAAALAYDQAALSTRGSMAVLNFPEEVVRESLKDMQSNNKPISLEDGSSPVLALKRKHTMRRKSNAKKNKRDHGMESRNVNSITQNALVLEDXGSEYLEQLLX

SEQ ID NO: 5512 - protein, 236 aa, Glycine max
IPLFVQNHFLGRTFFSSMKKTPPPPPLIPSPSLNSSQSRIKESSSSDYSNSSGSLVSTESQLEVSSNLTHASHQLETHASPQPPKESNKDKRPFRGVRRRPWGKFAAEIRDSTRNGVRVWIGTFDTAEAAALAYDQAALSTRGSMAVLNFPEEVVRESLKDIKPSLEDGSSPVLALKRKHTMRRKSKATNKKTKRGHGMELENIVLSQNVLVLEDLGSEYLEQLLSLTSSDDDFLC

SEQ ID NO: 5513 - protein, 222 aa, Glycine max
  unsure (1)..(222): unsure at all Xaa locations
MCGGAIISDFIGVKRGRNLAAQELWSELDPFSDLLGFDTTTTTTNQPPLPDKKVVSSCEKKKKKSVSAERRARKNVYRGIRQRPWGKWAAEIRDPHKGXSRVWLGTFPTAEEAARAYDDAAKRIRGDKAKLNFPXPPLRHPPKNNAASALTPPPNKXSSSQSTTGSTGSPPSAAFHGGGDELDLKQLERFLGLDNMGAEWDNMXXDLWMLDDVVVPNRHLIY

SEQ ID NO: 5514 - protein, 217 aa, Glycine max
  unsure (1)..(217): unsure at all Xaa locations
MRRGRTAAAAAAVVDPTPDQAKETTRFRGVRKRPWGRFAAEIRDPWKKQRVWLGTFDSAEDAARAYDKAARSFRGPKAKTNFPPPPARQRRTTTRRFRSTRPMXXFPPSSSPXVQVNRPTSSGMSSTVESFSGPRVXPPPPPRXAPCCGCXPYHPSQRRXEDDCHSDCDSSSSVVDDGQDCVLISSFRQPLPFDLNLPPSDADDDNDDDLPATALCL

SEQ ID NO: 5515 - protein, 351 aa, Glycine max
  unsure (1)..(351): unsure at all Xaa locations
GTYHIYIYYMQQGEVTTQGGTLVSGYNRGDPDLREMVSALTHVVSSGSGQRSTEWTQQSGFPMMSASSLSGHKRGREEEESSTSHNMIQQQQQSAPRLFRNIGDFMVPSQGDSSSVTEEAPTSTTTSVTAVTENPPGGGERRRKYRGVRQRPWGKWAAEIRDPHKAARVWLGTFDTEEAAARAYDEAALRFRGNRAKLNFPENVRAVPPIQPFQATTRLTVSDSTTSQFRPLSATTCNTLRQSDFQQQQIQQQQQQQRQQQQRQRQQRQQQQQQQQQPSSLLQQLYYNAQFASLQSPSMLSSSPSFSSSFPLFSSQQIFQPPESRNPAGGVPXXFPTSTWSDTSSQPPPSG

SEQ ID NO: 5516 - protein, 336 aa, Glycine max
  unsure (1)..(336): unsure at all Xaa locations
XSLFTPHKSNHIFQFSHLNPHHTLSMPMMFSGLNREKEMSAMISALTHVVCGEDEHHGAVVGDDDFTVTSNMASGSMPPSSTCSSQGGNSVLKRRREYDNTNDFSRGGSFPAISTIAESSSXGNKKNGEYSIRLRIQNRERESSGXEEPRRKYRGVRQRPWGKWAAEIRDPFKATRVWLGTFETAEDAARAYDQASLRFRGNKAKLNFPENVRLRQPSSQQEPPLNLNPPPPPNHGAILSIPSTTVHTEALQGSLGSSNFYEHSYSHLHEFPVSLYDQIAESTSTTMASHHLQFLPPASSSTMTMTSPQAPPSIYPTHPAAWSSGYSYNSSSSASG

SEQ ID NO: 5517 - protein, 221 aa, Glycine max
  unsure (1)..(221): unsure at all Xaa locations
SSSASPAPPQPPARKRERKTMYRGIRRRPWGKWAAEIRDPAKGARVWLGTFATAEAAARAYDRAARRIRGAKAKVNFPNDFXXAXGPAARVRRRRRRPRPRPRRRGAGDARHVRRRRQGRPPSRLRRRRRXGHGRLLPXPRVRAXRXXAXEMCXGRXLXXXPLXXXXRXXRXNXXXXFXXPXXVXXXEXXXSXWWGXLXXXXXFFSXXKKXXXPGXIFXRP

SEQ ID NO: 5518 - protein, 111 aa, Glycine max
  unsure (1)..(111): unsure at all Xaa locations
RKRKFLKRRHYRGVRQRPWGKWASEIRDPKKAARVWLGTFETAEAAALAYDEAALRFKGTKAKLNFPERVHXXSKEFGYLTNRPSLFHASATPLSDQHSHTATNNDAMXSF

SEQ ID NO: 5519 - protein, 222 aa, Glycine max
  unsure (1)..(222): unsure at all Xaa locations
MRKGRGGGASAXXAAAAVNGSVLKEPRYRGVRKRPWGRFAAEIRDPLKKARVWLGTFDSAEDAARAYDTAARNLRGSKAKTNFPLSPFCYPPPRILSSTLVSTTTKTTATTTTTTLTTXQRPTSSGMSSTVESFSGPRPPTTTTTTTTPFLTTTRRYPRTPPLVPEDCHSDCDSSSSVVDDSDDNIVSSSFRPPLPFDLNALPFDDDAAVVDDDLRCTALCL

SEQ ID NO: 5520 - protein, 203 aa, Glycine max
  unsure (1)..(203): unsure at all Xaa locations
MRKGRGGGASAXXAAAAVNGSVLKEPRYRGVRKRPWGRFAAEIRDPLKKARVWLGTFDSAEDAARAYDTAARNLRGSKAKTNFPLSPFCYPPPRILSSTLVSTTTKTTATTTTTTLTTXQRPTSSGMSSTVESFSGPRPPTTTTTTTRRYPRTPPLVPEDCHSDCDSSSSVVXXPPLPFDLNALPFDDAXXADDDLRRTALCL

SEQ ID NO: 5521 - protein, 145 aa, Glycine max
  unsure (1)..(145): unsure at all Xaa locations
NXXEXXIIKGVDHDPFHDCLSFDMIDNSRDPQEESHHQVIEEAMKTKKKSYIGVRRRPWGRFAAEIRDTTRKGIRVWLGTFDSAEEAALAYDQAAFSMXXSXAVLNFPVKXVKESLQEMNYSGCSRRCSPALELKERHNIRRKXX

SEQ ID NO: 5522 - protein, 346 aa, Glycine max
  unsure (1)..(346): unsure at all Xaa locations
MCGGAIISDFIPAAAIAGSRRLTADYLWPDLKKRKSDLDVDFEADFRDFKDDSDIDDDDDDHQVKPFAFAASSRLSTAAKSVAFQGRAEISANRKRKNQYRGIRQRPWGKWAAEIRDPRKGVRVWLGTFNTAEEAARAYDAEARRIRGKKAKVNFPEAXXGTSSVKRSKVNPXXENLKTVQPNLGHKFSAGNNHMDLVEQKPLVSQYANMASFPGSGNGLRSLPSSDDATLYFSSDQGSNSFDYAPEISSMLSAPLDCESHFVQNANQQQPNSQNVVSIEDDSAKTLSEELVDIESELNFQMPYLEGSWGDTSLESLLSGDTTQDGGNLMNLWCFDDIPSMAGGVF

SEQ ID NO: 5523 - protein, 221 aa, Glycine max
  unsure (1)..(221): unsure at all Xaa locations
MCGGAIISDFIGVKRGRNLAAQELWSELDPFSDLLGFDTTTTTTNQPPLPDKKVVSSCEKKKKKSVSAERRARKNVYRGIRQRPWGKWAAEIRDPHKGVRVWLGTFPTAEEAARAYDDAAKRIRGDKAKLNFPXPPLRHPPKNNAASALTPPPNKXSSSQSTTGSTGSPPSAAFHGGGDELDLKQLERFLGLDNMGAEWDNMXXDLWMLDDVVVPNRHLIY

SEQ ID NO: 5524 - protein, 104 aa, Glycine max
  unsure (1)..(104): unsure at all Xaa locations
XPAKNGARVWLGTFETAENAALAYDRAAYRMRGSRALLNFPLRINSGEPEPVRVTSKEASSSSSDSASSTKRRKKVVGSTGIEKGASGKSSGTQCTRGEQLLVN

SEQ ID NO: 5525 - protein, 352 aa, Glycine max
  unsure (1)..(352): unsure at all Xaa locations
XLEGTYHIYIYYMQQGEVTMQGGSLVSGYNRGDPELREIVSALTHVVSSGSGQRSTEWTQQSGFPMMSASSLSGHKRGREEEENSTSHIDATTTTKCSKTLQNGDFMVPSQGDSSSVTEEAPTSTTTTVTAVTENPPGGGERRRKYRGVRQRPWGKWAAEIRDPHKAARVWLGTFDTEEAAARAYDEAALRFRGNRAKLNFPENVRAVPPIQPFQATTRLTVSDSTTSQFRPLSATTCNTLRQSDFQQQQIQQQQQQQRQQQQRQRQQRQQQQQQQQQPSSLLQQLYYNAQFASLQSPSMLSSSPSFSSSFPLFSSQQIFQPPESRNPAGGVPXXFPTSTWSDTSSQPPPSG

SEQ ID NO: 5526 - protein, 345 aa, Glycine max
  unsure (1)..(345): unsure at all Xaa locations
PTRPPTRPQRSGSLVSGYNRGDPELREIVSALTHVVSSGSGQRSTEWTQQSGFPMMSASSLSGHKRGREEEENSTSHIDATTTTKCSKTXFRNIGDFMVPSQGDSSSVTEEAPTSTTTTVTTVTTAVTETGGGERRRKYRGVRQRPWGKWAAEIRDPHKAARVWLGTFDTEEAAARAYDEAALRFRGNRAKLNFPENVRAVPPIQPFQATTRLTVSDSTTSQFRPLSAVAPPFIQQPQNYLQYSQLLQSDFQQQQIQQQQQQQRQQQQQQQPSSLLQQLYYNAQFASLQSPSMLSSSPSFSSSFPLFSSQQIFQPPESRNPAGGVPXXFPTSTWSDTSSQPPPSG

SEQ ID NO: 5527 - protein, 228 aa, Glycine max
  unsure (1)..(228): unsure at all Xaa locations
MCGGAIISDFIGVKRGRNLAAQELWSELDPFSDFLGFDTTNSKNQPPLQKIKKKSVVGAEKKKSDSGRARKNVYRGIRQRPWGKWAAEIRDPHKGVRVWLGTFPTAEEAAQAYDDAAIRIRGDKAKLNFPXPPPFPPPPLXPPSKKQRCLSPDIITEESSSSSSHSTTGSTGXXSGGGNDELDLKQIEWFLGLENELPVSNNIGAEWDNMDDLWMLDDVVVPNRHLIY

SEQ ID NO: 5528 - protein, 189 aa, Glycine max
  unsure (1)..(189): unsure at all Xaa locations
MAPRDIKSNVVVAGGSNPTRKEIRYRGVRKRPWGRYAAEIRDPGKKTRVWLGTFDTAEEAARAYDAAAREFRGAKAKTNFPTHAELTXXAAARSPSQSSTLDSSSPPTPPLDLTLAAPLAAGGALVFPVARPVVFFDAFERAEVRASFDLPVAAFSDSDSSTVMDYERGSRRRXXLDLDLNVPPPPEVA

SEQ ID NO: 5529 - protein, 194 aa, Glycine max
  unsure (1)..(194): unsure at all Xaa locations
MAPRDSRATAFAGPGPGPSPAHKEIRYRGVRKRPWGRYAAEIRDPGKKTRVWLGTFDTAEEAARAYDTAAREFRGAKAKTNFPTPSELILNNNIRSPSQSSTLDSSSPPSXXPPPLDLTLTPLSVAVTVFPVARPVLFFDAFARADAMIAVSRREMCGFERPAADFRRNDSDSDYNRRVLLDLDLNVPPLPEVA

SEQ ID NO: 5530 - protein, 198 aa, Glycine max
  unsure (1)..(198): unsure at all Xaa locations
RTRGFYPDATDSSFDEEGFPLVRKRMKRYVNQIEIETAAEKVVRKRPAGEPCRRPAKLHSGKKFRGVRQRPWGKWAAEIRDPARRVRLWLGTYDTAEEAAMVYDNAAIRLRGPDALTNFLTPPQRESPSQATTVAVTERSLRLXATTPATTIASTXLSSPTSVLHFRSNSESDQKSEFFSLXQVLRECEGEGEFWPLG

SEQ ID NO: 5531 - protein, 185 aa, Glycine max
  unsure (1)..(185): unsure at all Xaa locations
XGSSVTACTLSHEVHFRGVRKRPWGRYAAEIRDPGKKTRVWLGTFDTAEDAARAYDVAARNFRGPKAKTNFPFLPDNNTNVNLNKKNNNVNREFTRRAAPAAMDRFPFLPIQQQILVTHPVAPMRPVYFLDRAHFMTQPFPLRFEPGPVQSDSDSSSVVVDCQPKRELNLDLNLAPXXMNINLFF

SEQ ID NO: 5532 - protein, 266 aa, Glycine max
  unsure (1)..(266): unsure at all Xaa locations
XRLREDDRRVRLREDDRRVRLREDDRRVRLREDDRRENKRNRESRLFPGLNREREMSAMVSALTHVVSGEVPITGDSSSSSSXGSSSSTSXDDTVIVTPTMPSSSSSSTYVVGTSSLKRSRENDTYTSSLFSHPPSSSPAMPTRAEYATREMGNSVYEYRTTTENATRDEGRRKYRGVRQRPWGKWAAEIRDPFKAARVWLGTFDTAEAAARAYDEAALRFRGNKAKLNFPENVTLRQPQFTEIMVLKPSQKKKKKQKKKKKKKKK

SEQ ID NO: 5533 - protein, 215 aa, Glycine max
  unsure (1)..(215): unsure at all Xaa locations
LSHFFLFISSFHHHHGQGEEERGXSRTRSQTTMXDELHFRGVRKRPWGRYAAEIRDPGKKTRVWLGTFDTAEDAARAYDAAARNFRGPKAKTNFPVPPDDNNNNNVNVNKNKTEREATRRSTSAAIDRFPFLPIQQQILMTHPVAAPMRPVFFLDRAHFMTQSFPLRFEPGPVQSDSDSSSVVVDCQPKRELNLDLNLAPXXMNINPFFYLFIFS

SEQ ID NO: 5534 - protein, 153 aa, Glycine max
  unsure (1)..(153): unsure at all Xaa locations
TDHASSYFNXSKNGERGGEEEVKYRGVRKRPWGKFGAEIRDPTKPTGRQWLGTFDTAEEAARAYDRAAIALRGALAILNFPHEFHFHLPFILSNSSTKGNGSSFDKEVIELEYLDDKVLEELLELEEKRRNNEDXDHWSTIHCFEIPGPFYFL

SEQ ID NO: 5535 - protein, 400 aa, Glycine max
MLKFCTPLLYNRFILYSISKGVLRRNHTREILGGSWQFKFGPKIVRKKTIVYIVFMSLLTVAHQRGSGEFMRFTESHGGGGGGDGDGEYGYGHDDGRGGGGGGSLGLNFNQVMQQGEVTTQGGTLVSGYNRGDPDLREMVSALTHVVVSSGSGQRSTEWIQQSGFPMMSASSLSCLSSFSSPSSSGASWVGHKRGREEEESSSSHNMIQQQQQSAPSVTAVATTVTETPPPPGGGERRRKYRGVRQRPWGKWAAEIRDPHKAARVWLGTFDTEEAAARAYDEAALRFRGNRAKLNFPENVRAVPPIQPFQATTRLTVSDSGSSDLINYLQYSQLLQSDFQQQHIQHQQQQQRHLQHHSHYSQPLLLSPCFPTNGLFPATGKPQSRWRRAGVSNVHMVGYQ

SEQ ID NO: 5536 - protein, 387 aa, Glycine max
MSLLTVAHQRGSGEFMRFTESHGGGGGGDGDGEYGYGHDDGRGGGGGGSLGLNFNQVMQQGEVTTQGGTLVSGYNRGDPDLREMVSALTHVVVSSGSGQRSTEWIQQSGFPMMSASSLSCLSSFSSPSSSGASWVGHKRGREEEESSSSHNMIQQQQQSAPSVTAVATTVTETPPPPGGGERRRKYRGVRQRPWGKWAAEIRDPHKAARVWLGTFDTEEAAARAYDEAALRFRGNRAKLNFPENVRAVPPIQPFQATTRLTVSDSGSSDLINYLQYSQLLQSDFQQQQIQQQSPSSLLQQLYYNAQLASLQSPSVLSSSPSFSSSVSPTPFPLFSTSAQFSSASFPMFSSQQMGYFQLPESCPPAGGVPEFPPSTWSGTSGQPPPSG

SEQ ID NO: 5537 - protein, 174 aa, Glycine max
  unsure (1)..(174): unsure at all Xaa locations
TKTDAFXLFFESLREMCGGAIISDFILLFDILRVFWENWLKNGSTTAKSVAFQVRAEKFANRKRKNQYRGIRQRPWGKWAAEIRDPRKGVRVWLGTFNTAEEAARAYDAEARRIRGKKAKVNFPEEAPXXTSVKRXKVNPQENLSHKFGAGNNHMDLVEQKPXVYQYANMASFX

SEQ ID NO: 5538 - protein, 334 aa, Glycine max
NILVFLSASPPPKVFPNVSIPPQHIHLLVHFSPIPSKFFSYSLNPTLHALQPTPSHNNLPSSLSHSNKNILNHSKNTLLGMSVHAKLKHHPMNLASPSSHFEDDPPCKTKTKTQRRLLRIIITDHDATDSDSSEQQQKTRRVNREITQINMQPEQNLKCKRPNKKPPPSSAEARRRNKFRGVRQRPWGRWAAEIRDPTRRKRLWLGTFDTAEEAATEYDRAAVKLKGPNAVTNFPLAPEATAQSPPLAADNLSSDGGASYSDLVASPTSVLAYDDSTPFDGFRYLDVDAFGFHIDAPLSLPEVNVNVALTCHHGKKQEEAFDEFDLDEFMTWPY

SEQ ID NO: 5539 - protein, 198 aa, Glycine max
  unsure (1)..(198): unsure at all Xaa locations
LLPSISXMANSLEVSALNRIKLHLLGELSPLPLTTSSQSSSICSQSSCSDSSATLDQIFSEFLYFPTSSSENHFSALEFEAKPEIIYLETPNPQLEFTSLTTQDSKKPQSSRKPSLQISLPKKTEWIQFGAEVTETVSQSNPNAEEKKHYRGVRQRPWGKFAAEIRDPNKRGSRVWLGTVDTGIEAAKAYDRAAFRLR

SEQ ID NO: 5540 - protein, 157 aa, Glycine max
  unsure (1)..(157): unsure at all Xaa locations
MCGGAIIADFIPRQRPRTLTASELWPKRSDSTSTSSSSRXVNIFFSFNINFPTNKTSSRDVTVKRQRKNLYRGIRQRPWGKWAAEIRDPRKGVRVWLGTFNTAEEAARAYDKEARKIRGKKAKVNFPNEDDPLPQKQPENENKKSIYHKFSSKKKKK

SEQ ID NO: 5541 - protein, 230 aa, Glycine max
  unsure (1)..(230): unsure at all Xaa locations
XDHASATCCTAAPLVVNANXXFSGFNREKEMSAMITALTRVVCGDYGGGGGDDVSNMASGSMPPSSTSLSHGGNSVLKRRREDXXNTSDFLRGGSFPAILTTAEGSSTIRRRRANTVYDYEXTEERRXKLEEEEEARRKYRGVRQRPWGKWAAEIRDPLKARRVWLGTFETAEDAARAYDQASLRFRGNKAKLNFPENVRLRPLTLRLFRVHVLQAIFMTTLIRMFMIYP

SEQ ID NO: 5542 - protein, 353 aa, Glycine max
  unsure (1)..(353): unsure at all Xaa locations
MAATMNFYNETSQQVQSGGELMEVLEPFMKTCPSSTPSILSSDSPSPSSYSPLLPPHPSFSTYTPSAYLLENQERIEGVEEQPSSLLGLNHLSTSQISQIQAQAXXAQNSLSLNFLGPKPVPMKXXVGGPAKPTKLYRGVRQRHWGKWVAEIRLPKNRTRLWLGTFDTAEEAALAYDKAAYRLRGDLARLNFPNLKGSCPGEEYKPMQAAVDAKLDAICANLAEMQKQGKNEKGARSGKKSKQGPNLEAKPEPEASGSGAAALSPESEGSADSSALSDLTFDVTEPQWEEHFNLQKFPSYEIDWDSLXRLFVFLFLCLVLWVINNLVIIRIALVAAAIEFLKIAVLLVGFGLC

SEQ ID NO: 5543 - protein, 396 aa, Glycine max
  unsure (1)..(396): unsure at all Xaa locations
MCGGAIISDFIPAGPXPAGLRRVXTADILWPSLRKRFSKSAXLDDDFEAGFREFKDDSEIEDVDDEDDEDEEELKKXKPFGFSXAPATSASKPLSRGSATVESKGQAEKCAKRKRKNQYRGIRQRPWGKWAAEIRDPRKGVRVWXLGTFSTAEEAARAYDAEAGRIRGKKAKVNFPXMSLQAPAASSKRLKVNPEAQPMKENLNTVKPKMNQMFNFGHNLEGYSIDQVEQKPLVNQYVNPAPFPGNGVQVSPVTPSADVTAYFSSEHSSNSFDYSDXFGWGEQGPXKTPEISSLLSAAPLEGAADQVQKTNNSAXXVVAAQDDSAKTLSEELADIESQLNFETPSFLDEAWADATLASFGGDATHDAAGNPMNLWSFDDLPSMAGVFXTPFISPFM

SEQ ID NO: 5544 - protein, 396 aa, Glycine max
  unsure (1)..(396): unsure at all Xaa locations
MCGGAIISDFIPAGPAGGAQRVXTADILWAXNLRKRFSKSLLARXFRGRXFREFEDDSEIEDVDDEDDEEEEDKPLSRGATTVKSVESKGQAXEKCAKRKRKNQYRGIRQRPWGKWAAEIRDPRKGXVRVWLGTFSTAXEEAARAYDAEARRIRGKKAKVNFPDEPXSGAASSKRLKANPEGSANEEXNLNSVKPKINQMFNFGDNLEGYYSPIDQVEQKPLVNQYXXNRAPFAGNGVQVSPVTPSADVTAYFSXSEHSSSSFDYSDLGWGEQVPKTPEISSMLSAAPLDGESQFVQGAADQNQKKNNLLDMGTVQDDSAKTLSEELADIESQLKFFETPSFLDEAWGXDAGIGXSLLSEDASQDAAGNPMNLWSFDDLPSMAGVFXTPSYPFLCK

SEQ ID NO: 5545 - protein, 253 aa, Glycine max
  unsure (1)..(253): unsure at all Xaa locations
EKVKGCNFFLTNLTTFCNVFSGSVWFSGSSWNSKKIPTLKMGRGGTAAAAVEIAEPGSRPVFFKEPRYRGVRKRPWGRFAAEIRDPLKKARVWLGTFDTAEEAARAYDTAARTLRGPKAKTNFPLXSAVLPPXDPFSDHRYFDGAGAGEDFQDHRRPTSSGMSSTVESFSGPRAAVPAKAPVIVNRRYPRTPPVVPEDCRSDCDSSSSVVDDGDGDNVASSFRREPLPFDLNVLPLDDADVATDDLFCTVLCL

SEQ ID NO: 5546 - protein, 264 aa, Glycine max
  unsure (1)..(264): unsure at all Xaa locations
HTPTFHVRTTTHEAPQPPIXPTSLKLKFXRRPTMQNRRKNKTTSQKLLRVILTDHDATDSDSSGDDEDPKNTKKTQXKVKRQITHITINPSSSLDPTRSTRPKKRPAVPRRRNKFRGVRQRPWGRWTAEIRDPTQRKRVWLGTFDTAEEAAAVYDEAAVKLKGPNAVTNFPLSAAGNTEHDTPPPETVFSGEGLSSPTSVLTYCDGDSTPFDGFRYGEVDAFGFEFDIDAPFSLTAVNLGVLSQRFGKEEFGEFDPNEFLTWPS

SEQ ID NO: 5547 - protein, 318 aa, Glycine max
  unsure (1)..(318): unsure at all Xaa locations
MCGGAIIADFIPRRGGRRLTASELWPNSFGKDGDFDFDSPTSPINNVPLSKCPHLXKASEQVENKPVKRQRKNLYRGIRQRPWGKWAAEIRDPRKGVRVWLGTFNTAEEAARAYDREARKIRGKKAKVNFPNEDDEYSIQARHPIPPLPFTPQTQNPPLYQQQTRWLSPAMKIQGXRRVQRVLIRQRSXMGSSQNGNGYLGVTAMEKNEKETEVIEAQEEKNKVQELSEELMAYENYMKFYRIPYYDGQSTAPPNNVQESLVGDLWSFDXRGIYQRMFFSCMCLFLRQCCESFCXLISLRFSRDGQKCKLGASVEMVS

SEQ ID NO: 5548 - protein, 225 aa, Glycine max
  unsure (1)..(225): unsure at all Xaa locations
MMNNPALLEIEGSRLFPGINREREMSAMVSALTHVVSGEVPTGDSSSVLHHQPHDDDAVTVKPNMPSTTPFSSTYVVATSSLKRSRQHDTYTPSFSHPPSSFPAMPTSAECSKSGMGNAVYEYRTRGTENXXKKEEGRRKYRGVRQRPWGKWAAEIRDPFKAARVWLGTFETVEAAARAYDEAALRFRGSKAKLNFPENVTLRQPQFTIPLPKKKKKKKTPNAVR

SEQ ID NO: 5549 - protein, 345 aa, Glycine max
  unsure (1)..(345): unsure at all Xaa locations
NLLHPFLSCRKLFKFFCQWVFXLTTCSSSFRKTQVELISIMAALMDFYSSRPSSTSLRSIQGRTNGSSXTXFMKSPSPNYFPSSPSLPNLYSNGLSSTQPTSLVGLNHLTPSQISQIQAQIXXIQAQQHQNHSNTLSFLGPKPIPMKXXAGMPPKPTKLYRGVRQRHWGKWVAEIRLPKNRTRLWLGTFDTAEEAALAYDKAAYKLRGDFARLNFPNLRHQGSSVGGDFGEYKPLHSAVDAKLQAICEGLAELQKQGKTEKPPRKSRSKLAEKVVSDKXXEQQLLXGGSCVLXSSEGSSPLSDLTFADVSEXXQWEGDSDNYNLQKYPSYEIDWDSLXSVLLCMV

SEQ ID NO: 5550 - protein, 183 aa, Glycine max
  unsure (1)..(183): unsure at all Xaa locations
MCGGAIIADFIPRQRPRTLTASELWPKRSDSTSTSSSSRXVNIFFSFNINFPTNKTSSRDVTVKRQRKNLYRGIRQRPWGKWAAEIRDPRKGVRVWLGTFNTAEEAARAYDKEARKIRGKKAKVNFPNEDDPHSXXCRNTDLARASTWSSVTISTKQGFSLLLTLMRIAGPTWLTPLRKPTTK

SEQ ID NO: 5551 - protein, 329 aa, Glycine max
  unsure (1)..(329): unsure at all Xaa locations
MAAMMDFYTSSTEFQFHSDPFRGELMEVLEPFMKSPFSTPSPSNSCFLSTSYSPSPNNYSXLPILKRDHPYPTPPKTYGFGQGQPTSLVGLNHLTPSQISQIQAQIXXIQNHSNTLSFLGPKPIPMKHXXGMPPKPTKLYRGVRQRHWGKWVAEIRLPKNRTRLWLGTFDTAEEAALAYDKAAYKLRGDFARLNFPNLRHQGSSVGGDFGEYKPLHSAVDAKLQAICXRALAELQKQGKTEKPPRKTRSKLASPXXENDNNNDNNSCKVEAASSSSEGSSPLSVLTFADVSEPQWEGDSDNFNLQKYPSYEIDWDSLXSRVFLVSYVVM

SEQ ID NO: 5552 - protein, 224 aa, Glycine max
  unsure (1)..(224): unsure at all Xaa locations
MRKGRGGGASAAAVDVNGSILKEPRYRGVRKRPWGRFAAEIRDPLKKARVWLGTFNSAEDAARAYDAAARTLRGPKAKTNFPPLSPFCYPHXXPPILSSTLVSTXQHHHHNNNNLNNPQRPTSSGMSSTVESFSGPRPPTTTTTTTTTTATPFLTATRRYPRTPPLVPEDCHSDCDSSSSVVDDGDDNIVSSSFRXXPLPFDLNALPFDDAAADDDLRRTALCL

SEQ ID NO: 5553 - protein, 296 aa, Glycine max
  unsure (1)..(296): unsure at all Xaa locations
GSRTSMSSPLNGSDSTCSCXMFRSSSLLSPHPNFYTHTPPPSYLLQSQQSLIGFEQPPSSLLGLNHLSPSQISQIQAQIEXXQQSQNQNPHSLNFLGPKPVPMKHXXGGPPKPTKLYRGVRQRHWGKWVAEIRLPKNRTRLWLGTFDTAEEAALAYDKAAYRLRGDFARLNFPSLKGSCPGEEYKPVHSAVDAKLDAICANLAEMQKQGKTEKGARSAKKSKQGPNQEAKPEPQASAESEGSADSSPLSDLTFDVTEPQWEHFNLQKFPSYEIDWDSLXTSSLFLCLVLWLIIIII

SEQ ID NO: 5554 - protein, 325 aa, Glycine max
  unsure (1)..(325): unsure at all Xaa locations
MAATMNFYNETSQQVQSGGELMEVLEPFMKSPSSTPSILSSDSPSPSPLNFPSSSLLSPHPNFYTHTPPPSYLLQSQQSLIGFEQPPSSLLGLNHLSPSQISQIQAQIEXXQQSQNQNPHSLNFLGPKPVPMKHXXGGPPKPTKLYRGVRQRHWGKWVAEIRLPKNRTRLWLGTFDTAEEAALAYDKAAYRLRGDFARLNFPSLKGSCPGEEYKPVHSAVDAKLDAICANLAEMQKQGKTEKGARSAKKSKQGPNQEAKPEPQASAESEGSADSSPLSDLTFDVTEPQWEHFNLQKFPSYEIDWDSLXTSSLFLCLVLWLIIIII

SEQ ID NO: 5555 - protein, 214 aa, Glycine max
  unsure (1)..(214): unsure at all Xaa locations
MRRGRATAAVVDPTAEQAKETRFRGVRKRPWGRFAAEIRDPWKKQRVWLGTFDSAEDAARAYDKAARSFRGPKAKTNFXXPSPARRTTTPRSRFRRSTRXHGLSTKFEPXXQVNRPTTSGMSSTVESFSGPRVPPSSSSSRKPLVVVNPIIPLDDDDDDCHSDCDSSSSVVDDQDCVLTSSFRQPLPFDLNLPPPDAAYDDDDDDDVPATALCL

SEQ ID NO: 5556 - protein, 240 aa, Glycine max
  unsure (1)..(240): unsure at all Xaa locations
XSARGSDSSSLLHQHHHHQQQHQQHQQQLLQYWSDALNLSPRGMLTRLGXXDGRPLFRLPTQPINTTKLYRGVRQRHWGKWVAEIRLPRNRTRLWLGTFDTAEDAAMAYDREAFKLRGENARLNFPELFLNKDKKEEQQQQEQEASSPSGDATVSDDQVHATTESSEGVSQEMVWGEMSAWFNAIPAAWGPGSPMWDDLDATIANHTFLFPIPINKNSMMLRDKNKTLDQVTCGRIRIEI

SEQ ID NO: 5557 - protein, 302 aa, Glycine max
  unsure (1)..(302): unsure at all Xaa locations
MCGGAIIADFIPRRGGRRLTASELWPNSXSPKTMTLTWITPTSLPNNPPXLKRSQPPKVSEQVENKPVKRQRKNLYRGIRQRPWGKWAAEIRDPRKGVRVWLGTFNTAEEAARAYDREARKIRGKKAKVNFPNEDDEYSIQARNPIPPLPFVHNTLPCTSNXYRCDLNNASPLMKIRGQRRVQRVLIRQRSSXGSVQNGNGYLGGTVMEKKEKETEVIEAEEEXXNKVLELSEELMAYENYMKFYQIPYYDGQSTTNNVQESLVGDLWSFDXRGIYQGCSFHACVLFLRQCCESFCFLPPFC

SEQ ID NO: 5558 - protein, 260 aa, Glycine max
  unsure (1)..(260): unsure at all Xaa locations
MSDTHQTFMSVQPPLNLXTTPLTHKPQAQILTATHHXQNRRKNQTSAXXKLLRVILTDHDATDSDSSGDDDDPKNPPKHKTPIPTPSSSSSIDPTRLTLPKKRPAVPRRRSKFRGVRQRPWGRWTAEIRDPNQRKRVWLGTFDTAEEAAAVYDDAALKLKGPNAVTNFPLSAAGKTEHDTAPPEAAFSGEGFSSPTSVLTYFDGDSTPLYGFRYGEVDAFGFDIDAPFSLTDVNLGVLSQRFGKEDFREVDPDELLTWPS

SEQ ID NO: 5559 - protein, 195 aa, Glycine max
  unsure (1)..(195): unsure at all Xaa locations
LSHPFSLFPLSPTPSLHRFPYYSFQRQCYPQXSNNMTAPPSKYTHHSKLLIPSEEDPPKHPYPRLVRITVTDTEATDSSSDEEQHTSTRHRHRKFVNEISIESSCASENDGAASRKRIRRRSTATPKGRASDTRLVSNGKKFRGVRQRPWGKWAAEIRDPSRRVRLWLGTYDTAEEAALVYDNAAIRLRGPHALT

SEQ ID NO: 5560 - protein, 151 aa, Glycine max
  unsure (1)..(151): unsure at all Xaa locations
ATTEFPSRAQPPKPVSDFSDPGPDRGPTEPKPEPTLSXNFLGPKPVPMKHVGGPPKPTKLYRGVRQRHWGKWVAEIRLPKNRTRLWLGTFDTAEEAALAYDKXAYRLRGDFARLNFPSLKGSCPGXXEYKXCASRXDAKLDAICAHLAEMX

SEQ ID NO: 5561 - protein, 223 aa, Glycine max
  unsure (1)..(223): unsure at all Xaa locations
MAPRDHKTSNAKANGNGNSGVKEVHFRGVRKRPXWGRYAAEIRDPGKXKSRVWLGTFDTAEEAARAYDAXAAREFRGPXKAKTNFPLPLENVKNSSPSQSSTVESSSRDRDVAADSSPLDLNLAPAAVASARFPFQHQFPVFTGAVPAANQVLYFDAVLRAGMAGPRGFAFGYNHHPVAASEFQSDSDSSSVIDLNHNEGEVKGNGSRIFDLDLNHPPPHEIA

SEQ ID NO: 5562 - protein, 138 aa, Glycine max
  unsure (1)..(138): unsure at all Xaa locations
XTRPPDERSKHVWRSNHRRFHTSAASPHPHSLRTLAQAQRTSTSTSSSSSXKRQRKNLYRGIRQRPWGKWAAEIRDPRKGVRVWLGTFNTAEEAARAYDKEARKIRGKKAKVNFPNEDDPQNRKQPENDIIKAIXXKK

SEQ ID NO: 5563 - protein, 135 aa, Glycine max
  unsure (1)..(135): unsure at all Xaa locations
MAPREATALIGPGPSLSPAHKEIRYRGVRKRPWGRYAAEIRDPGKKTRVWLGTFDTAEEAARAYDTAAREFRGAKAKTNFPTPSELILNNNNINARSPSQTSTLDSSSPPPDSYSEYLMVVSAISQNIXNIPISI

SEQ ID NO: 5564 - protein, 246 aa, Glycine max
  unsure (1)..(246): unsure at all Xaa locations
MKEEAPLATWISHIPAKFNGHEDIKNGKEKNQSNSIFPVSDIKNSSIPLNLLETLPPLTIAPCFDDPVASLASSSARNHVPPKFPNLTLFLPEPSMVYSSISSSNINPSYHVSQFGQNQHQAGSGDAHKMNNNLTNSRSKSFNENWLSATRTQPLKYGGRXXKLFKGVRQRHWGKWVAEIRLPTNRTRVWLGTFDSAEDAAIAYDTAAYILRGEYAQLNFPELSMXFKQILXKATTAALVEAKYKQ

SEQ ID NO: 5565 - protein, 307 aa, Glycine max
  unsure (1)..(307): unsure at all Xaa locations
RNHGGNARHKVTAXNPRPRGSNIGSSLSKLILASGSGTNTLDSIFSNCPQTTNGSTSSNSVLDXFRTHSVPGCEPLGSSVYLRQRDILQKFYQESRGNGSYNVPTSSLSNSLTNPCKKKLYRGVRQRHWGKWVAEIRLPQNRMRVWLGTYDTAEAAAYAYDRAAYKLRGEYARLNFPNLKDPTKLGFGDSARLNALKSSVDAKIQAICQKVKRERAKKSEKPSSSSSPSPSPSPSPSPSIFNDNWANQLFSPAVSEDGFWKGENSHSPASVLTECQTEETELLXXEGCSLARLPSFDPELIWEVLTV

SEQ ID NO: 5566 - protein, 126 aa, Glycine max
  unsure (1)..(126): unsure at all Xaa locations
PVKVKNSGSVKKFRGVRQRPWGKWAAEIRDPVQRVRIWLGTFETAEEAALCYDNAAIMLRGPDALTNFGIRSKETLEKEERKELDEKEEIRTEKPEMKSCFYDSADEFCLNLSSPTSVLRFNESGX

SEQ ID NO: 5567 - protein, 218 aa, Glycine max
  unsure (1)..(218): unsure at all Xaa locations
MSSSSSSFFPAHITTDQEFSLIVAALTNVVSGSTSSSSVPEFRFPHSSPPLSSASLMPPPPPSIHTCRECNIAGCLGCNFFPERLEQRKKYRGVRQRPSGKWAAEIRDRHRSARVWLGTFETAEDAARAYDKASFELRGPRAKLNFPLVDESLTLQPEMAATXXSRLTTRIISIKAWEWTRTNSGTGXNEADFHPFMMMMDFTGDSSDSAATGYTLSS

SEQ ID NO: 5568 - protein, 216 aa, Glycine max
  unsure (1)..(216): unsure at all Xaa locations
MRRGRTAAAAAAVVDPTPDQAKETTRFRGVRKRPWGRFAAEIRDPWKKQRVWLGTFDSAEDAARAYDKAARSFRGPKAKTNFXXPSPARQRXDHHSQIPLYQAHGLSTKFEPVVQVNRPTSSGMSSTVESFSGPRVPSSSSRAKPLVVVVNPIIPLNDDEDDCHSDCDSSSSVVDDGQDCVLISSFRQPLPFDLNLPPSDADDDNDDDLPATALCL

SEQ ID NO: 5569 - protein, 109 aa, Glycine max
  unsure (1)..(109): unsure at all Xaa locations
MCGGAVIADFVPAGAXXARMAPPPTSPAPSSPVGRXKEKPLAPGRKTAYRGIRRRPWGRWAAEIRDPTKGARVWLGTYATAEEAARAYDVAARDIRGPKAKLNFPPXXX

SEQ ID NO: 5570 - protein, 280 aa, Glycine max
  unsure (1)..(280): unsure at all Xaa locations
MTTFMDMYNTTSSIMTPDFLDQCSDQELMKALEPFMTSTPNHASSIKLNQLTPSQMFQIQARIQVPRGQXXLSPKPIPMKHVRASPSSKPTKLYRGVRQRHWGKWVAEIRLPKNRTRLWLGTFDTAEEAALAYDNAAFKLRGENARLNFPHLRHHGGAYGEFGNYKPLPSAVDAKLQAICQSLGTNSQKLKTQNPIVLDTHKAETETSEFQDFNKVENSFSDEYSSSSSSSSPESDITLLDFSDSSMDNLGLDLEKYPSVEIDWAALSXLMNNQWLTGIV

SEQ ID NO: 5571 - protein, 213 aa, Glycine max
  unsure (1)..(213): unsure at all Xaa locations
XLIPSPNLFITIFILNSGNSSKPTKLYRGVRQRHWGKWVAEIRLPKNRTRLWLGTFDTAEEAALAYDNAAFKLRGENARLNFPHLRHHGARAYGEFGNYKPLPSAVDAKLQAICQSLANSQKLKTQNPIVLDTHKAETETSEFQDFNKVENYQTSSSSAFSDEYSSSSSSSSPESDITLLDFSDSCXKQWXNLGLDLEKYPSVEIDWAALSDS

SEQ ID NO: 5572 - protein, 324 aa, Glycine max
  unsure (1)..(324): unsure at all Xaa locations
MTTFMDMYNTTSSIMTPDFLDQCSDQELMKALEPFMKSDSSSTTSSSITTYPSFXXSFSSSPNLSSTTWSTQFCSSSYHQKGPTPTQASSFKLNQLTPSQIFQIQTQIQVPRAQVLSPKPITMKHVRASPSSKPTKLYRGVRQRHWGKWVAEIRLPKNRTRLWLGTFDTAEEAALAYDNAAFKLRGENARLNFPHLRHHGARAYGEFGNYKPLPSAVDAKLQAICQSLANSQKLKTQNPIVLDTHKAETETSEFQDFNKVENYQTSSSSAFSDEYSSSSSSSSPESDITLLDFSDSCXKQWXNLGLDLEKYPSVEIDWAALSDS

SEQ ID NO: 5573 - protein, 120 aa, Glycine max
  unsure (1)..(120): unsure at all Xaa locations
MKPYTSSPSSSKSKKKPTTTQQDHETAWGGRYLGVRRRPWGRYAAEIRDPSTKERHWLGTFDTAEEAALAYDKAARSMRGSRARTNFIYPDTPPGSSVTSILSPDEXNPNPNPPGPRRAX

SEQ ID NO: 5574 - protein, 185 aa, Glycine max
  unsure (1)..(185): unsure at all Xaa locations
MAPRDINRSNVVVVAGVSNPTHKEIRYRGVRKRPWGRYAAEIRDPGKKTRVWLGTFDTAEEAARAYDTAAREFRGTKAKTNFPTHAAVARSPSQSSXRWTPRLRRRWTLLLPPHSPPRARXVFPVARPVVFFDAFARAEVRASXRSSRGGVQRLGLVLGRGLRXRVPHRKVLDLDLNVPPPPEVA

SEQ ID NO: 5575 - protein, 311 aa, Glycine max
  unsure (1)..(311): unsure at all Xaa locations
MGTAIDMYNSSNIVADFLDPYSEELMKALKPFTLESQPCSFSSNSLPTSYPSSNQIKLNQLTPDQIVQIQAQIHIQQQQQHVAPHLGPKRVPMKHAGTAAKPTKLYRGVRQRHWGKWVAEIRLPKNRTRLWLGTFDTAEEAALAYDNAAFKLRGEFARLNFPHLRHHGAFVFGEFGDYKPLPSSVDSKLQAICESLAKQEDAELAEVESDVAKSNAEYVYPEFGILRSSTRTXMFSGESSSPESSVTFLDFSDFSDSNNQWDEMENFGLEKFPSVEIDWEAIXXLGEFSLCQMVGLVLLCFWVLVCTYYVL

SEQ ID NO: 5576 - protein, 182 aa, Glycine max
  unsure (1)..(182): unsure at all Xaa locations
XGVRKRPWGRFAAEIRDPLKKARVWLGTFDTAEEAARAYDTAARTLRGPKAKTNFPLSPPFYHPDPFSDHRHFANTGEDFHDHRRPTSSGMSSTVESFSGPRAAVPATAPVATGRRYPRTPPVIPEDCRSDCDSSSSVVDDGEGDNVASSFPREPLPFDLNALPLDDADVATDDLFCTVLCL

SEQ ID NO: 5577 - protein, 108 aa, Glycine max
  unsure (1)..(108): unsure at all Xaa locations
MAPRDSRATAFAGPGPGPSPAHKEIRYRGVRKRPWGRYAAEIRDPGKKTRVWLGTFDTAEEAARAYDTAAREFRGAKAKTNFPTPSELILNNNIRSPSQSSTIXAKCE

SEQ ID NO: 5578 - protein, 116 aa, Glycine max
  unsure (1)..(116): unsure at all Xaa locations
PSQTPTQPTPPATKRLENKPTFPRATDTESSSTRFLSPELQTLGAXQKFRGVRQRPLGKWSAEIRDPSQRGVRLWLGTYNTAEEAALVYDNAAIKLRGPHALTNFITPPITDYSRR

SEQ ID NO: 5579 - protein, 92 aa, Glycine max
  unsure (1)..(92): unsure at all Xaa locations
XLEFSSMPVHALPFSKDSPPPKPKEAHFRGVRKRPWGRFAAEIRDPWKKTRKWLGTFDTAEEAARAYDAAARTLRGPKAKTNFSYKYVQLHX

SEQ ID NO: 5580 - protein, 371 aa, Glycine max
  unsure (1)..(371): unsure at all Xaa locations
PATCFVDPHFFFFSGSLPPKATKTIFVSYIAGKRDQFFSVTFFQYIGFLVDKILQKSWRECETETHSLNSKTKSTNIGSSLSKLILTSGTNTLDSIFSNXXPTTTNGSTRSNSVLDYLEPFGSLGYEPLGSSVYLRQRDILQKFYQESRGNGSYNVPTSSLSNSLTNPCKKKLYRGVRQRHWGKWVAEIRLPQNRMRVWLGTYDTAEAAAYAYDRAAYKLRGEYARLNFPNLKDPTKLGFGDSARLNALKSSVDAKIQAICQKVKRERAKKNAAKKLHNSTDPKRGQSEKPSSSSSPSPSPSPSIFNDNWANQLFSPAVSEDGFWKGENSHSPASVLTECQTEETELLFEGCSLARLPSFDPELIWEVLTV

SEQ ID NO: 5581 - protein, 266 aa, Glycine max
  unsure (1)..(266): unsure at all Xaa locations
XDPRVRTAARRRQKGKRTSAVNKRALREDXXGGGGGGGAMRYRGVRRRPWGRYAAEIRDPQSKERRWLGTFDTAEEAACAYDCAARAMRGLKARTNFVYPTSPQPSSPSKPFFSQHASLSXPYSLXXPSLLSSSSTQNFHXXPVLQQEYXSTFSSLPVSPSLAPPSYSMNNSCGGSLSVKMNTFPTCGTNFAENDDGDGFFSRESSDSGLLEEIVNKFLRRSRGLERSLVNARLLLQILRRSRFFSLRLFLNQRLFPPGNNTMMMT

SEQ ID NO: 5582 - protein, 330 aa, Glycine max
  unsure (1)..(330): unsure at all Xaa locations
RNHGGNARHKVTAXNPRPRGSNIGSSLSKLILASGSGTNTLDSIFSNXXPQTTNGSTSSNSVLDDLEPFRSSGCESLGSSVYLRQRDILQKFYQESRGXXGNNNGSYNIPRSLANTSINSVCRSSSLSCYSLTKPCKKKLYRGVRQRHWGKWVAEIRLPQNRMRVWLGTYDTGEAAAYAYDRAAYKLRGEYARLNFPNLKDPTKLGFGDSARMNALKSSVDGKIPALCQKVKKERAXKKNATKKKLHDSSGSTDPNGGQKINSSSCSSSSLSQPLSPPSIFYDNWANDLFSPASVSTECQSMETEELXXEGCSLARLPSFDPELIWEVLA

SEQ ID NO: 5583 - protein, 202 aa, Glycine max
  unsure (1)..(202): unsure at all Xaa locations
FKCYFSIFFFFLDGEGQLACTCXVKNHNKGDGSKSLADTLAKWKEYNAWLDNNEAEKPARKVPAKGSKKGCMKGKGGPENSRCNYRGVRQRTWGKWVAEIREPNRGSRLWLGTFPTAISAALAYDEAARAMYGSCARLNFPNVQVSTLSEESSRNSPAAANRSRNSPAASQSGHALMILESSECMILPNNSCGDATQDDDMX

SEQ ID NO: 5584 - protein, 254 aa, Glycine max
  unsure (1)..(254): unsure at all Xaa locations
HASGNLSLSLSFFPFFTFSFILISISISLHQPTPPFPLSFHAIMASSSIKHTHHLNRTKLFMKEETLLKKKHHYPKIIRIRVTDADATDSSSDDDEPSMSSTRRRVKNFVNEITIQGGGGGGGDVNVVSKKRRFKSGAXSSVMSAEDXXGRKKFRGXVRQRPWGKWAAEIRDPSRRVRLWXLGTYDTAEEAAIVYDNAAIQLRGADALTNFITPPPEXTEKPVTAPAXESRNNDDLRSPTSAISISNKAANSIX

SEQ ID NO: 5585 - protein, 236 aa, Glycine max
  unsure (1)..(236): unsure at all Xaa locations
GSSGSSSSRIGSRAELPSSEASSSASTRKHSHSVYRGVRMRAWGKWVSEIREPRKKNRIWLGTFATAEMAARAHDVAALAIKGNSAILNFPELASSLPRPDSNSPRDVQAAAAKAAAMEVNDAPTTPTSSSSASLSQSSSWSSLAVSSSSGEDPSTPEELGEIVELPSLGTSFXXIPDPSGELVFFDPWPYSQAWSHGIYDESESYFFGDQISMQDSETESMVLCGFAFEASLWQH

SEQ ID NO: 5586 - protein, 145 aa, Glycine max
  unsure (1)..(145): unsure at all Xaa locations
MCGGAIISDFIXXFLRLLISSGFFGXELAKKWLYDPCLCYDVIFIFSXXFNGSECLCSYCDFYTFXNYIKGSTTAKSVAFQVRAEKFANRKRKNQYRGIRQRPWGKWAAEIRDPRKGVRVWLGTFNTAEEAARAYDAEARKIRGX

SEQ ID NO: 5587 - protein, 94 aa, Glycine max
  unsure (1)..(94): unsure at all Xaa locations
NKCESHIKHHRSDNANRRLRFRSLRXKPWGRFAAEIRDPWKKQRVWLGTFDSAEDAARAYDKASRRLTLPKAKTNFPPFPGPAEADHHSQIPFX

SEQ ID NO: 5588 - protein, 285 aa, Glycine max
  unsure (1)..(285): unsure at all Xaa locations
XHASGRKCKGKGXGPDNNKFRYRGVRQRSWGKWVAEIREPRKRTRKWLGTFATAEDAARAYDRAAIILYGSRAQLNLQPSGSSSQSSSSRSSSSSTQTLRPLLPRPSGFTFNFPFNSAPYPIDNSKNHNINTVQVHHPHHYPRVREVVQVPHSESDLGGLGGNNNIVVDGSINQPRTSGMVLDNINNNNNHVHVQVQHGVFSNQQQQHQNSVVEGVNSSVVGSVSSSMDASSVDPDLALVGTMGLGSSSPFWSMANEDDYTGSLWDYNDPFFFDLXRNLSIKLLG

SEQ ID NO: 5589 - protein, 320 aa, Glycine max
  unsure (1)..(320): unsure at all Xaa locations
PRVRQPQPQETKPTATTTTETTPSETSNSNTNNKISSRKCKGTRPPDNNKFRYRGVRQRSWGKWVAEIREPRKRTRKWLGTFATAEDAARAYDRAAIILYGSRAQLNLQPSGSSSQSSSSRSSSSSTQTLRPLLPRPSGFSVNFPFNTATVPYPYNNSHNYTYSPPVLCPNDNHNNNIVQVHHPHHHRCPEELVQVQVAHTLSTSYQHNSESDVGLGVNNNVQVQHGVLSNQQQQQHQNGVVVEGVNNSPVVGSVASAMDASSVDPDLALVGTVGLGSSSPFWSMANEDDYTGSLWDYNDPFFFDLXRNLIFILVHGELG

SEQ ID NO: 5590 - protein, 282 aa, Glycine max
  unsure (1)..(282): unsure at all Xaa locations
XHASGRKCKGKGXGPDNNKFRYRGVRQRSWGKWVAEIREPRKRTRKWLGTFATAEDAARAYDRAAIILYGSRAQLNLQPSGSSSQSSSSRSSSSSTQTLRPLLPRPSGFTFNFPFNSAPATTVPYPYNNSHNYTYTPPVLYPIDNSKNHNINTVQVHHPHHYRCPEEVVQVPHSESDLGGLGGNNNIAVHVQVQHGVFSNQQQQHQNSVVEGVNSSVVGSVSSSMDASSVDPDLALVGTVGLGSSSPFWSMANEDDYTGSLWDYNDPFFFDLXRNLSLKLLD

SEQ ID NO: 5591 - protein, 232 aa, Glycine max
  unsure (1)..(232): unsure at all Xaa locations
KNPSLFSLSLSLLVTPLVCYKYLSIVCAMLKSGMGIQERKKVKKPAQASSRKGSARGKGGPENATCTYKGVRQRTWGKWVAEIREPNRGARLWLGTFDTAREAALAYDAAARKLYGPDAKLNLPELSVPYAAGVMNPXSHATTATATATTSGSPNDXCNNNSLSCTLPLTLSIFWGPTMDDTMPVSDESIWTEAAMSLDYPIVGGGGGFVTTENLFGEATAWXSLQTPSFCM

SEQ ID NO: 5592 - protein, 391 aa, Glycine max
  unsure (1)..(391): unsure at all Xaa locations
VLRCTVLRSLCIRFVDMGAYDQVSLKPLDSSRKRKSRSRGDGSKSVAETIAKWKEYNEHLYSGKDDSRTTRKAPAKGSKKGCMKGKGGPQNSQCNYRGVRQRTWGKWVGEIREPNRGSRLWLGTFSSAQEAALAYDEAARAMYGPCARLNFPSMAASSSCSSAATAASDTTTTTSNQSEVCAVEDVIEKPANVNDKFNDCHKAYVSASPTSRMKQEPKXXEAVDHMDTGAGEIQDVGLEGTHDTGQVAENVNKDQMDLSWIDGFDFIDDYLKSFSADELFQVDELLGLIDNNPIDNSVLMQGLDFGQMGFPGDGNHDTPSSFIYQLQNPDAKLLGSLPHMEQTPSGVDYGLDFLKTVEPGDYNGGGEEPPFLNLDDDLNHDSNGMQARKGG

SEQ ID NO: 5593 - protein, 56 aa, Glycine max
KEIHAKRGNGRKRHYRGVRQRPWGKWAAEIRDPKKAARVWLGTFDTAEAAAAAYDA

SEQ ID NO: 5594 - protein, 99 aa, Glycine max
  unsure (1)..(99): unsure at all Xaa locations
MANEKNHLDNTNMMPCNADEAHLRGVQKRPWGRYADEIRDPGKKTRVWLGTFDTDEDASRAYDVTVRNFRGPRVKTNFPLLPDNNINVNLNXXKSNNVY

SEQ ID NO: 5595 - protein, 217 aa, Glycine max
MVQSKKFRGVRQRHWGSWVSEIRHPLLKRRVWLGTFETAEEAARAYDQAAILMSGRNAKTNFPITQTPEGDPKSTTSEDTPSTTSKDLEEILHAKLRKCGKVPSPSMTCLRLDPENSHIGVWQKRAGRRSDSNWVMTVQLGKKSVNVNNNDTHHQSPSLAVTGNLHHQEVVRGEIDEEERIALQMIEELLNDRNCPSPSFNNNIQERDGADHDHFFL

SEQ ID NO: 5596 - protein, 165 aa, Glycine max
  unsure (1)..(165): unsure at all Xaa locations
MCGGAIIADFIPRRGGRRLAASELWPNSFAIGDAFDLDSPTSLPNNPPLSKGRQPPKGXNKPVKRQSKNLFRGIRQRPWGKWAAEIRDPREGVSVWLGTFNTAEECREXAYDREARKHLRAKKAKVNFPNEADEYSIQARNPIPPLPFAPQHPPLYQQQYRCDLN

SEQ ID NO: 5597 - protein, 374 aa, Glycine max
  unsure (1)..(374): unsure at all Xaa locations
MGAYDQVSLKPLDSSRKRKSRSRGYGTRSVAETIAKWKEYNEHLYSGKDDSRTTPKAPAKGSKKGCMKGKGGPQNSQCNYRGVRQRTWGKWVGEIREPNRGSRLWLGTFSSAQEAALAYDEAARAMYGPCARLNFPGITDSSSCCSSAETATSDTTTTSNQSEVCAAEDVKEESSTCQCEXXKVNDCHKAYVSASPTSRMKQEPKDEAVDHMDTGAGEIQDVGPEGTHDTGQVAENVNKDQMDLSSFSTDELFQVDELLGLIDNNPIDDSVLMQTQVDDTPSSFIYQLQNPDAKLLGSLPHMEQTPSGFDYGLDFLKTVEPGDYNGGGEEPRFLNLDDDXEPXFKGHASKEGXLEKATCISLSSASFSTGSSIC

SEQ ID NO: 5598 - protein, 170 aa, Glycine max
  unsure (1)..(170): unsure at all Xaa locations
FVDMGAYDQVSLKPLDSSRKRKSRSRDGTRSVAETIAKWKEYNEHLYSGKDDSRTTPKAPAKGSKKGCMKGKGGPQNSQCNYRGVRQRTWGKWVGEIREPNRGSRLWLGTFSSAQEAALAYDEAARAMYGPCARLNFPGITAASSSCSSAETATSDTTTTSNQSEVCAGX

SEQ ID NO: 5599 - protein, 392 aa, Glycine max
  unsure (1)..(392): unsure at all Xaa locations
VLRCTVLRSLCIRFVDMGAYDQVSLKPLDSSRKRKSRSRDGTRSVAETIAKWKEYNEHLYSGKDDSRTTPKAPAKGSKKGCMKGKGGPQNSQCNYRGVRQRTWGKWVGEIREPNRGSRLWLGTFSSAQEAALAYDEAARAMYGPCARLNFPGITAASSSCSSAETATSDTTTTSNQSEVCAAEDVKENPRLVNVNDKVNDCHKAYEAASPTSRMKQEPKDEAVDHMVPGAGKILDVRPEGTHDAGQVAEDVNKDQMDLPWIXXGFDFSDNYLNRFSTDELFQVDELLGLIDNNPIDESALMQSLDFGQMGFPGDGNHDTLSSFIYQLQNPDAKLLGSLPHMEQTPSGFDYGLDFLKTVESGDYNGGGEEPRFLNLDDDLNPDSKGMQARKDD

SEQ ID NO: 5600 - protein, 169 aa, Glycine max
  unsure (1)..(169): unsure at all Xaa locations
AKWKEYNEHLYSGKDDSRTTPKAPAKGSKKGCMKGKGGPQNSQCNYRGVRQRTWGKWVGEIREPNRGSRLWLGTFSSAQEAALAYDEAARAMYGPCARLNFPGITDYASFKESLKESPMAASSSCSSAETATSDTTTTSXTSRMKQEPKDEAVDHMVPGAGKILDVRPX

SEQ ID NO: 5601 - protein, 229 aa, Glycine max
  unsure (1)..(229): unsure at all Xaa locations
LVVGVCWKSTSLFSSSSSPPLPNQRCAPQHICTKAFNFSAXPFRFLLAKTHNKGDGSKSLAKILAKWKEYNAQIDSSSDADKPVRKVPAKGSKKGCMKGKGGPENSRCNYRGVRQRTWGKWVAEIREPNRGNRLWLGTFPTAIGAALAYDEAARAMYGSCARLNFPNVSVSSFSEESSKDSPSANHCGSSMAVSANESMISPSNSGVDAEDDGAALSSQLXLPQSYFSX

SEQ ID NO: 5602 - protein, 186 aa, Glycine max
NLRIMEQELQRNSVHDDEAATTTSSGDKPATPRGGGTRHPLFRGVRKRRWGKWVSEIREPRKKSRIWLGSFPAPEMAAKAYDVAAYCLKGRKAQLNFPDEVHRLPLLPSSCTARDIQAAAAKAAHMMMVQAASADSPEKSSGGDDFWGEIELPELLNGKWWASDRHVTPWPETELPPQLPFTTACL

SEQ ID NO: 5603 - protein, 203 aa, Glycine max
  unsure (1)..(203): unsure at all Xaa locations
MLKSGMGIEERKQVKKPAQASSRKGCMRGKGGPENASCTYKGVRQRTWGKWVAEIREPNRGARLWLGTFETSHEAALAYDAAARKLYGSDAKLNLPELSIKSQSQCPPPPSSVSNNTQIPQMENLQQQIQNNYMDMATCSNNFNNTSWGTMNEGLPVFDDSIWAEAAMSLDFPQIAAGLRFIHRVTTXADVGVWDSLQTPWCM

SEQ ID NO: 5604 - protein, 132 aa, Glycine max
  unsure (1)..(132): unsure at all Xaa locations
MVQSRKFRGVRQRHWGSWVAEIRHPLLKRRVWLGTFETAEEAARAYDEAASLMSGRNAKTNFPVGENXNSGKSXSSNTSSSSTTTLSAVLSAKLRKCGKSPSPSLTCLRLDTENSHIGVWQKRAGPRSDSNW

SEQ ID NO: 5605 - protein, 241 aa, Glycine max
  unsure (1)..(241): unsure at all Xaa locations
MAELPSSEASSSSASSRKHSSSEAHLPAPDQKRPKQARDSSSKHPVYRGVRMRAWGKWVSEIREPRKKNRIWLGTFATAEMAARAHDVAALAIKGNSAILNFPELAASLPRPDSNSPRDVQAAAAKAAAMEVNDVPTTPSSSSSSASLSLSQSSSWSSLAVSSSSGASTPEELGEIVELPSLGTSFXXIPDPSGELVYLDPWPYSQAWSHGIYDESEGYFIGDSETESMILCGFEGSLWQH

SEQ ID NO: 5606 - protein, 280 aa, Glycine max
  unsure (1)..(280): unsure at all Xaa locations
VAPNIKYCSLTKKKNRMAELPSSEASSSSASSRKHSSSKRPKQARDSSSKHPVYRGVRMRAWGKWVSEIREPRKKNRIWLGTFATAEMAARAHDVAALAIKGNSAILNFPELAASLPRPDSNSPRDVQAAAAKAAAMEVNDVPTTPSSSSSSTPVSLSQSSSWPSLGTSFEIPDPSGELVFFDPWPYSQAWSPGIYDESESGELVYLDPWPYSQAWSMVICGFGEGYFIGDHEXCGHDTLWLRGFIVAALKRWLSLFFFFWVIDFPIMWGPFPIFGFKVS

SEQ ID NO: 5607 - protein, 207 aa, Glycine max
  unsure (1)..(207): unsure at all Xaa locations
LVVGVCWKSTSLFSSSSSPPLPNQRCAPQHICTKAFNFSAXPFRQMLAKTHNKGDGSKSLAKILAKWKEYNAQIDSSSDADKPVRKVPAKGSKKGCMKGKGGPENSRCNYRGVRQRTWGKWVAEIREPNRGNRLWLGTFPTAIGAALAYDEAARAMYGSCARLNFPNVSVSSFSEESSKDSPVANHCGSSMAVLSIFVCKRVHDFTK

SEQ ID NO: 5608 - protein, 233 aa, Glycine max
  unsure (1)..(233): unsure at all Xaa locations
MVMEESNPLDNEVQPTTSSSSFTITTPSTSSSSSIEEATNTTTKEKKKKRAISNIEGKHPTYRGVRMRQWGKWVSEIREPRKKSRIWLGTFPTPDMAARAHDVAALTIKGSSAYLNFPELAAKLPRPASTSPKDIQAAAAKASALDFGHQSHEAESELSQAVSSSIQTQSSSSSSNSSLKGVDDTFLDLPDLSLDLSHGADEFHYSSAXXLVAGAEHIELGFRLEEPFLWESY

SEQ ID NO: 5609 - protein, 198 aa, Glycine max
RKHGVPNSLHSFFMDQETTRRNTMQESYRGVRQRKWGKWVSEIREPGKKSRIWLGSYESPEMAAAAYDVAALHLRGRAARLNFPELVETLPRPTSSKPEDVQVAAQQAAVMFRISPTMSPINNHQGCVRVGLSPTQIQAINESPLDSPKMWMVQMAEALSFDDHSMMMLPSDDDDYALELSGWEEIQHESLWDSPEYM

SEQ ID NO: 5610 - protein, 263 aa, Glycine max
  unsure (1)..(263): unsure at all Xaa locations
TLISCRCLLEELISVFFVIFPNQRCAPQQILTKAFNXXPTPFQMLAKAHNKXXDGSKSLAKILAKWKEYNAQIDSSSDADKPIRKVPAKGSKKGCMKGKGGPENSRCNYRGVRQRTWGKWVAEIREPNRGNRLWLGTFPTAIGAALAYDEAAXRAMYGSCARLNFPNVSVSSFSEESSKDSPSANHCGSSMAHVVSANESMISPSNSGVDAEEDVDMEPISLSLSVKHENGEGESGDKFIPSFFLMMYIGTWLNFLAHVLVNG

SEQ ID NO: 5611 - protein, 289 aa, Glycine max
  unsure (1)..(289): unsure at all Xaa locations
MDTCKKSPLKPWKKGPTRGKGGPQNASCEYRGVRQRTWGKWVAEIREPKKRTRLWLGSFATAEEAAMAYDEAARRLYGPDAYLNLPHLQPRSXXSTITSGKFKWFPSKNFISMFPSCGLLNVNAQPSVHLIHQRLQELKRNSVVSQSSSSSSNDPKAEIQNVXTAKITEKMKXSSKRCSNIIRGGAWRSXQEKPQIDLHEFLQQMGILKEERQSERTDSSEFNSAXSWTDDCDHLGVFSDKSVNWEALIEMHGLAGIQESEVTQLEAYEPNDDLTFSTSIWNFXXKLSI

SEQ ID NO: 5612 - protein, 201 aa, Glycine max
  unsure (1)..(201): unsure at all Xaa locations
LTVPLLIGPSPPNPNWVSQSFQIECKNRNFFLKCLLGRSSFYPDYEDFGRQKNHNKGDGSKSLADTLAKWKEYNAWLDNNEAEKPVRKVPAKGSKKGCMKGKGGPENLRCNYRGVRQRTWGKWVAEIREPNRGSRLWLGTFPTAISAALAYDEAAMAMYGFCARLNFPNVQVSTFSEEPSRNSPAAAYQSDGXTSTIAYEX

SEQ ID NO: 5613 - protein, 124 aa, Glycine max
  unsure (1)..(124): unsure at all Xaa locations
YDYYEEKREAKAAAPTTREXPYRGIRMRKWGKWVAEIREPNKRSRIWLGSYATPVAAARAYDTAVFHLRGPSARLNFPELLXPGRRRFDRKMSADSIRKKATQVGARVDALQTALQNSTDPVYV

SEQ ID NO: 5614 - protein, 136 aa, Glycine max
  unsure (1)..(136): unsure at all Xaa locations
ARAQQRLVTAGCVVAVKCAMRERINHSRGIRQCSWGKWAAEIRDPXKGVRVRLGTFNSAEEAARAYDAAAGRFLGKRANVNLTDEPVGAAVYERLKENAEAESMKENLNTVKPNMNQMLNSGHNXXQGYYSPVDHV

SEQ ID NO: 5615 - protein, 130 aa, Glycine max
  unsure (1)..(130): unsure at all Xaa locations
YDYYEEKREAKAAAPTTREXPYRGIRMRKWGKWVAEIREPNKRSRIWLGSYATPVAAARAYDTAVFHLRGPSARLNFPELLXPGRRRFDRKMSADSIRKKATQVGARVDALQTALQQSKYTDTPENXDEA

SEQ ID NO: 5616 - protein, 218 aa, Glycine max
MVQTRKFRGVRQRHWGSWVSEIRHPFLKRRVWLGTFETAEEAARAYDQAAILMSGRNAKTNFPILQTPEGDPKTTLTPIDHETSSSSTTTSKELEEILHAKLRKCGKLPSPSMTCLRLDPENSHIGVWQKRAGQRSDSNWVMMVPPLGKKGGANEGGTGGDASCSNSFPFSECDPTPQVARQELLRTEMDEEERIALQMIEELLSRNCPTSPSFNNLY

SEQ ID NO: 5617 - protein, 235 aa, Glycine max
  unsure (1)..(235): unsure at all Xaa locations
KSKIQWEPQRYSVEDSGVHKPPSTRLKPKLLIXALLMCSISEKAKRKRQSAFRGVRKRSWGRYVSEIRLPGQKTRIWLGSFGSPEMAARAYDSAAFFLKGTSATLNFPDLVHSLPRPLSSSRRDIQSAAAEAALHSPPPKEEQESIFTSTTTSSFHDVMEAPLMSPLXGWTPLSEISHGTNSSISTMTFSSWDQLLPLLSLNAAFAIRHPLLLETSWIFFHFLLITLLCFSKTCF

SEQ ID NO: 5618 - protein, 191 aa, Glycine max
  unsure (1)..(191): unsure at all Xaa locations
NLRIMEQELQRNSVHDDEAATTTSSGDKPATRGGGTRHPLFRGVRKRRWGKWVSEIREPRKKSRIWLGSFPAPEMAAKAYDVAAYCLKGRKAQLNFPDEVHRLPLLPSACTARDIQAAAAKAAHMMIVHSSITSDCGGGGGGDDFWGEIELPELLNAKWWASDHDVTPWPESELXAPAALHHGVLVVCNNQ

SEQ ID NO: 5619 - protein, 171 aa, Glycine max
  unsure (1)..(171): unsure at all Xaa locations
PASAHASAHAXRPRVRREDDRRGGKWAAEIRDPFKAARVWLGTFDTAEAAARAYDEAALRFRGNKAKLNFPENVTLRQPQFTVSNPPSSLVSITTSIDPVVHSTRPLLLPSQASTATNVYEYFQLSGFPTNTNLYDGNRMFVTSNAMASHHLQSSSSLLASSSSAFGSSVX

SEQ ID NO: 5620 - protein, 75 aa, Glycine max
  unsure (1)..(75): unsure at all Xaa locations
RPXXGXXAAEIRDPNRKGSRVWLGTFDTAIXAXKAYDXXAFKMXGSKAILNFXLEIGSXQXKXEXSSSSSSVSSX

SEQ ID NO: 5621 - protein, 197 aa, Glycine max
  unsure (1)..(197): unsure at all Xaa locations
YVHXNLRIMEQELQRNSVHDDEAATTTSSGDKPATPRGGGTRHPLFRGVRKRRWGKWVSEIREPRKKSRIWLGSFPAPEMAAKAYDVAAYCLKGRKAQLNFPDEVHRLPLLPSACTARDIQAAAAKAAHMMIVQAASTSDCGDGGGGDDFWGEIELPELLNAKWWASDHDVTPWPESELXAPAALHHGVLVVVCNNQ

SEQ ID NO: 5622 - protein, 175 aa, Glycine max
MARPQQRYRGVRQRHWGSWVSEIRHPILKTRIWLGTFETAEDAARAYDEAARLMCGARARTNFPFNPNVSPSSSSKLLSATLTAKLHRCYMASLQVTRQALASESQRTPPSVQNATTSTTTQESEANRGVKRVKAVENVPLQFKPLEEDHIEQMIEELLDYGSIELCSVISPQAL

SEQ ID NO: 5623 - protein, 210 aa, Glycine max
  unsure (1)..(210): unsure at all Xaa locations
MARSQQRYRGVRQRHWGSWVSEIRHPILKTRIWLGTFETAEDAARAYDEAARLMCGARARTNFPFNPNVSHSSSSKLLSATLTAKLHRCYMASLQMTRQALASESQRMAPPNATTSTTSNNFMKSNQXXHAVLLPHKRQEEEQEAEANWVFKKVKVENXXQQFKPLEEDHIEQMIEELLDYGSIELCSVISPQALXLNVHVFELNLKSQL

SEQ ID NO: 5624 - protein, 194 aa, Glycine max
MARSQQRYRGVRQRHWGSWVSEIRHPILKTRIWLGTFETAEDAARAYDEAARLMCGTRARTNFPYNPNASQSSSSKLLSATLTAKLHRCYMASLQMTRPSSQPETQRVVASPNVITSSASNFSLKRNQTETMLLPQKRQEEEQEGEGNWVFKKVKVENAQQFKPLEEDHIEQMIEELLHYGSIELCSVIPAQAL

SEQ ID NO: 5625 - protein, 186 aa, Glycine max
  unsure (1)..(186): unsure at all Xaa locations
MVQTKKFRGVRQRQWGSWVSEIRHPLLKRRVWLGTFETAEAAARAYDQAAILMNGQNAKTNFPTSKNQAEADDNNNTDTFLSPKALSELLSTKLRKYCKDPAPSLTCLRLDADNSHIGVWQKGAGPHSGSNWVMRLELGXXKQITEEGSESTESPQSSTNGATENNEVEEEDRVALQMIEELLNWN

SEQ ID NO: 5626 - protein, 149 aa, Glycine max
  unsure (1)..(149): unsure at all Xaa locations
MVEPAVAASSELSDSTRNTNTNTPSPSSSSSLSPSPSPSSSSSKKRARDNNNSRNNSNKHSVYRGVRMRTWGKWVSEIREPRKKNRIWLGTFATAEMAARAHDVAALTIKGSSAILNFPELAASLPRXSVCNSPRDVHAAVVXKTVSWE

SEQ ID NO: 5627 - protein, 99 aa, Glycine max
  unsure (1)..(99): unsure at all Xaa locations
DHASREEREGFNFSVLPSPPNQGIGRKRHFIGVRQRPWXLWAAEFRDPKKAAXVWLGSFDTAXAAAAASXAAAXKFIGSXANLNFPEHVLVPPPPFXPS

SEQ ID NO: 5628 - protein, 211 aa, Glycine max
  unsure (1)..(211): unsure at all Xaa locations
MSESFFSLWSIRVNXTMRVSTEKLETEPESKKIKRIRGGGGGDSSNKHPLYRGVRMRNWGKWVSEIREPRKKSRIWLGTFPTPEMAARAHDVAALSIKGSAAILNFPHFANSLPRPASLAPRDVQAAAAKAAHMDPSSLSSLVSAMDLSSASDELSQIIELPSLESTDDGSVVLEKEFVFVDSLDAWMYQPPFGFDTEQDTGFXXGLMWNY

SEQ ID NO: 5629 - protein, 194 aa, Glycine max
  unsure (1)..(194): unsure at all Xaa locations
VGLCGSRYTVNGPSTSTVXXAAASATDNPRGGTRHPMYRGVRKRRWGKWVSEIREPRKKNRIWLGSFPVPEMAARAYDVAAYCLKGRKAQLNFPDDVDSLPLPSSRTARDIQTAAAQAARMMKASGNDEKSGIASDDGDSGCDDFWGEIELPELMDGECCWGCPAGASSWTSSGDLAEWPEEDSPQQPSFMACL

SEQ ID NO: 5630 - protein, 211 aa, Glycine max
  unsure (1)..(211): unsure at all Xaa locations
MARPQQRYRGVRQRHWGSWVSEIRHPLLKTRIWLGTFETAEDAARAYDEAARLMCGPKARTNFPYNPNEPLSSSSKLLSATLTAKLHKCHMASLSLQMSKQKQSQTEPHQGSSSDSGNAIAGTSSDNTGFRWPEEEAQVEVPPAQQQQFQPVLQDDHIEQMIQELLDYGSMELSFVDSAXALYYKLTMQTPFQGEGFYYLLMRHVIKYSEL

SEQ ID NO: 5631 - protein, 170 aa, Glycine max
  unsure (1)..(170): unsure at all Xaa locations
MEGEEGGIATKKRGKEGXXTETTRYKGIRMRKWGKWVAEIREPNKRSRIWLGSYSTPVAAARAYDTAVFHLRGPSARLNFPELVAAEGPAADMSAASIRKKATEVGARVDALHRQHPHALPAGEFADRVDLNKMPEPENSDCDYWDRDXECCLVVNLEFFKNKYKIITLF

SEQ ID NO: 5632 - protein, 101 aa, Glycine max
  unsure (1)..(101): unsure at all Xaa locations
NYTAQVSKTKPMENLSPLIYKNPIRRTSRRSTMYLGVRKRPWGRYAAEIRNPYTKERHWLGTFDTAEEAAIAYDLSSIKICGINARTNFHYPFVIFNYLYX

SEQ ID NO: 5633 - protein, 233 aa, Glycine max
  unsure (1)..(233): unsure at all Xaa locations
MEGEGRRREGGERETATAAATRKVVEGADQRRYKGIRMRKWGKWVAEIREPNKRSRIWLGSYSTPVAAARAYDTAVFYLRGPSARLNFPELLIGEGAAALTGGCDMSAASIRKKASEVGARVDALQATLHXTITTMLCHHGSFSLPAVAXGSGDFAVRVVDLNKMPEPESSDCEWNVNXRKKKKGACFHIQVMVVVNVRRLRQNDVVDEACGGGGGGAEYCTVSFFPSTFSLG

SEQ ID NO: 5634 - protein, 256 aa, Glycine max
  unsure (1)..(256): unsure at all Xaa locations
QGPCPGPLQTQNTFTILNFTHLQITMTQQATTSSETTTSSSSSSSSSSSTFSPSQHSGPKAQAQKQSKRPRDCSKHPVYHGVRKRNWGKWVSEIREPRKKSRIWLGTFATPEMAARAHDVAALTIKGQSAILNFPEIADLLPRPVTCSPRDIQTAATAAASMVKFDPVTQSSDSETPESSVSEIVELPNIEDSSVDSTPEFSQIFQXVLVDVVDSWVFPPMGMGSEGIEFCAAFSDELFPQQSFIGSEIEILPIWD

SEQ ID NO: 5635 - protein, 189 aa, Glycine max
  unsure (1)..(189): unsure at all Xaa locations
MRSSNGASSSRASNANTGRHPVYRGVRRRSSGKWVSEIREPKKPNRIWLGTFATPEMAAIAYDVAALALKGKDAELNFPNSASSLPVPTSSAARDIQMAAASAAAAVGAANDALEGSRGGNASVSLTEEFSGGNLNHFVDEDLIFDMPNILVNMAEGMLLSPPRFDNFAATDYXXYMDEDPNLWGFPNY

SEQ ID NO: 5636 - protein, 217 aa, Glycine max
  unsure (1)..(217): unsure at all Xaa locations
MARPQQRYRGVRQRHWGSWVSEICHPLLKTRIWLGTFETAEDAARAYDEAARLMCGSKARTNFPYNPNEPHSSSSKLLSATLTAKLHKCHMASLSLQMAKPTTEQRASTITWVIQSICLSMSLLDQALTPVFDGQIXRHEEFRWLEXGIGLXVEGQVEVSHQQFQPVLEDDHIEQMIQELLDYGSIELCSVGLTXTLKYNSIQGFKKRSATVFSAAT

SEQ ID NO: 5637 - protein, 186 aa, Glycine max
MAKPSSEKPEEHSDSKYYKGVRKRKWGKWVSEIRLPNSRQRIWLGSYDTPEKAARAFDAAMFCLRGRNAKFNFPDNPPDIAGGTSMTPSQIQIAAAQFANAGPHEGHSGRPEHPPMESPSPSVSVNGSVTDLFTPVGSSGYASDYGIFPGFDDFSGDFYVPEMPNVNYGEENGEGFIVDESFLWNF

SEQ ID NO: 5638 - protein, 177 aa, Glycine max
  unsure (1)..(177): unsure at all Xaa locations
FKLIQPWKTGITVVPTIQRXSQQQRKERXRRSPTSDKLKNHTARRKPYRGIRMRKWGKWVAEIREPNKRSRIWLGSYTTPVAAARAYDTAVFYLRGPTARLNFPELLFQDDDQEGSDSVQHGAAGNMSADSIRRKATQVGARVDALQTALHHHAPSTNSLNLKPDLNEFPKLEELQD

SEQ ID NO: 5639 - protein, 159 aa, Glycine max
  unsure (1)..(159): unsure at all Xaa locations
FFVPSSLLKPPLPPTPSSPHFHSFFSLSLCHCHSFSHSHIKPKNFLFLKTMVEPPAAAATSESDTTGNTNTPSPSSSSSSSSSKKRARDNNNNSNSSSNKHSVYRGVRMRTWGKWVSEIREPRKKNRIWLGTFATAEMAARAHDVAALTIKGSSAILNX

SEQ ID NO: 5640 - protein, 242 aa, Glycine max
  unsure (1)..(242): unsure at all Xaa locations
MNVKVLATFKPRRPKEKKLTAIEFHFTSLACQMKTTSSQNLVGIXLPRFHNTNNNDSTETEPETKKIKRIRGGGDSSKHPLYRGVRMRNWGKWVSEIREPRKKSRIWLGTFPTPEMAARAHDVAALSIKGPAAILNFPHLANSLPRPASLAPRDVQAAAAKAAHMDPSSLSSLVSAMDLSSASDELSQIIELPSLESTDDGSVDLKKEFVFVDSLDAWMYQPPFGFDTEQDTGFXXGLMWNY

SEQ ID NO: 5641 - protein, 236 aa, Glycine max
  unsure (1)..(236): unsure at all Xaa locations
PRVRPRVRKEKKLTAIEFHFTSLACQMKTTSSQNLVGIXLPRFHNTNNNDSTETEPETKKIKRIRGGGDSSKHPLYRGVRMRNWGKWVSEIREPRKKSRIWLGTFPTPEMAARAHDVAALSIKGPAAILNFPHLANSLPRPASLAPRDVQAAAAKAAHMDPSSLSSLVSAMDLSSASDELSQIIELPSLESTDDGSVDLKKEFVFVDSLDAWMYQPPFGFDTEQDTGFXXGLMWNY

SEQ ID NO: 5642 - protein, 219 aa, Glycine max
  unsure (1)..(219): unsure at all Xaa locations
IRLEPLLTQNTMTQQTTTSSSSHSGPRAQAQKQSKRPRDCSKHPVYHGVRKRNWGKWVSEIREPRKKSRIWLGTFSTPEMAARAHDVAALTIKGQSAILNFPEIADLLPRPVTCSPRDIQTAATAAASMVKFDPVTQSSDSETXXESSELSEIVELPNIEDSSVDSTPEFVLVDVVDSWVFPPMGMGSEGIEFCAAFSDELFPQQSFIGSEIEILPIWD

SEQ ID NO: 5643 - protein, 191 aa, Glycine max
  unsure (1)..(191): unsure at all Xaa locations
MVKSKSVEKPAEEQQRGGVSAYRGVRKRKWGKYVSEIRLPNSRQRIWLGSYDSAEKAARAFDAAMFCLRGSGANFNFPSDRPNIAGGRNMTPSQIQIAAARFANSEPRKECSGQPVESLTSDEETASLVTGSFPDMFSDFGSGDFVPDFSDFPSFDDFSRDFXSCMNFRVSISEKRTWMDXXFRXSFLWNF

SEQ ID NO: 5644 - protein, 190 aa, Glycine max
MVKSKSVEKPAEEQQRGGVSAYRGVRKRKWGKYVSEIRLPNSRQRIWLGSYDSAEKAARAFDAAMFCLRGSGANFNFPSDRPNIAGGRNMTPSQIQIAAARFANSARKECSGKPVESLTSIEETTSFPVNSEFPGIFSGFGSGNFVPEFSDFPSFDDFGHDFFVHELPGFDYGEENLDGLIIQDSFLWNF

SEQ ID NO: 5645 - protein, 167 aa, Glycine max
  unsure (1)..(167): unsure at all Xaa locations
EIVVPRIRRLXRKSDKRKQQHQQQEKPYRGIRMRKWGKWVAEIREPNKRSRIWLGSYATPVAAARAYDTAVFHLRGPSARLNFPELLSQDDDVSTQQQGNMSADSIRKKATQVGARVDALQTALQPSSSHSANSTDKPDLNEYPKPEDXYFLPPSRLILIHQSRVLM

SEQ ID NO: 5646 - protein, 189 aa, Glycine max
  unsure (1)..(189): unsure at all Xaa locations
MRSSNGTSSSRASNGNTGRHPVYRGVRRRSSGKWVSEIREPKKPNRIWLGTFATPEMAAIAYDVAALALKGKDAELNFPNSASSLPIPASSAAHDIQMAAALAATAVGAANDALEGSQGGNVSVSLAEEFSGGNLNHFVDEDLIFDMPNILVNMAEGMLLSPPRFDNFAATDYXXYMDEDPTLWGFPNY

SEQ ID NO: 5647 - protein, 157 aa, Glycine max
  unsure (1)..(157): unsure at all Xaa locations
MRKRINMESDADFNSFATSSSSTTPSIFFDTNTSSTSSSSTSPTSNSESCTKEHSKTXXQNDSTTSQTSLENGKDSKGCKKRQIDNSNQNHHPTYRGVRMRNWGKWVSEIREPRKKSRIWLGTYPTAEMAARAHDVAALAIKGHSAYLNFPELAQEX

SEQ ID NO: 5648 - protein, 158 aa, Glycine max
  unsure (1)..(158): unsure at all Xaa locations
KNKIVSLLSNDYKKMTSSNRSSSPTSSSSDQSDVTTTTSTHLSEXXSPRNNKRKRSKDSSSSSSSSSSKLKHPVYRGVRMRSWGKWVSEIRQPRKKTRIWLGTFATADMAARAHDVAALAIKGSSAVINXXPELASILPRPASSSPHDIQAAAAEAAX

SEQ ID NO: 5649 - protein, 153 aa, Glycine max
  unsure (1)..(153): unsure at all Xaa locations
REREREREREREMESEGRREGGERETTAATRKVEGAERRYKGIRMRKWGKWVAEIREPNKRSRIWLGSYSTPVAAARAYDTAVFYLRGPSARLNFPELLVXXEGPAALVAGCDMSAASIRKKATEVGARVDALQATLHHHYNSHRRASNPLMX

SEQ ID NO: 5650 - protein, 158 aa, Glycine max
  unsure (1)..(158): unsure at all Xaa locations
IRLEDETSCSTCEECKEPGXRFVGVRQRPSGRWVAEIKDTIQKIRVWLGTFDTAEEAARAYDEAACLLRGTNTRTNFWPCSQSSTSPALSSKITNLLLQRLKERNNNNTCSSSSSSSTSLLINHQQTTMTSSTTVHKLTTLLVALNHAYNIEFKVFLK

SEQ ID NO: 5651 - protein, 221 aa, Glycine max
  unsure (1)..(221): unsure at all Xaa locations
XKRVLGKTPTVKRRKYKGVRMRKWGKWAAEIRDPFKGARIWLGTFSTAEEASQAYNARRLEFEAIKALSDEKSNNGSNSSSNNNVVASAETVAATENNSSNYCVSSAAGSVSDSKSASMDESESVLSLTSPSSVLELDTSAFNLIGSGKVSSNEVDSEYGFHDEHDFDDDLAALEDFRGFDDNEPSELPDYDFDDFGADEFAGWIEEPLNIPCVXXDFAAS

SEQ ID NO: 5652 - protein, 106 aa, Glycine max
  unsure (1)..(106): unsure at all Xaa locations
XHISCGPDPPNPIXRSLRSKPKSRWPSSIRITASRTRLWLGTFDTAEEAALAYDKAAYKLRGDFARLNFPNLRHQGSSVGGDFGEYKPLHSAVDAKLQAICEGLAE

SEQ ID NO: 5653 - protein, 245 aa, Glycine max
  unsure (1)..(245): unsure at all Xaa locations
MCLGLQETNGSSTILNFTHLQITMTQQATTSSETTTSSSSSSSSSSSTFSPSQHSGPKAQAQKQSKRPRDCSKHPVYHGVRKRNWGKWVSEIREPRKKSRIWLGTFATPEMAARAHDVAALTIKGESAILNFPEIADLLPRPVTCAPRDIQAAATAAASMVKFDPVTQSSDSETXXESSELSEIVELPNIEDSSFDSVDSRPEFVLVDVVDGWVFPPMXEWGQRESRSVPLFLMSCFRNRVLLMR

SEQ ID NO: 5654 - protein, 188 aa, Glycine max
  unsure (1)..(188): unsure at all Xaa locations
MMVKPSSEKPEEHRDSKYYKGVRKRKWGKWVSEIRLPNSRQRIWLGSFDTPEKAARAFDAAMFCLRGRNAKFNFPDNPPDIAGGESMTPSQIQVAAAQFANAGPHEGHSGRPEHSPMQSLSPSVSVNGSLTDLFTPVGSSGYASDYGIFPGVDDFSXXGFYVPEMLNFNYGEENGEGFIVDESFLWNF

SEQ ID NO: 5655 - protein, 180 aa, Glycine max
MENNNHHAMAAGASSDSNTSDHTTPISSSCVNDNNNNKLYKGVRKRKWGKWVSEIRLPNSRERIWLGSYDSPEKAARAFDAALYCLRGRHAKFNFPNTPCNMDTAKSLTPPEIQEVAAKFANQVSPLLQKPQEQPQPQRSSDGGGGGANSSSFGSKLLCKSDSIAEMYPFSFPYFSVKLN

SEQ ID NO: 5656 - protein, 280 aa, Glycine max
  unsure (1)..(280): unsure at all Xaa locations
YIFIIISPTHTILFNKTCDGNSIPTTKPAASEIRHCNHQRWQVQREKQKQXNTNKFAGVRQRPSGRWVAEIKDTTQKIRMWLGTFETAEEAARAYDEAACLLRGSNTRTNFITHVSLDSPLASRIRNLLNNRKGIKXXEEDANANANNAPAPRVSTTSSATSTGTSTTVTTQSSNLFDDAYKPDLSNCREEFESGHQSNTSWCFGPVFDRFPMAQIFDIPKIDDGLTNAADLDLSEFEIERQISASLYAINGVQEYMETVQDSNETLWDLPPLCSLFCXS

SEQ ID NO: 5657 - protein, 126 aa, Glycine max
  unsure (1)..(126): unsure at all Xaa locations
MGTAIGMYSNNNIVPDFLDPYSEELMKALMPFMKSDSSSSSSSRESHPSPLIPSNSLPSSNHHLGPKRVPMKHAGTAAKAAKLYRGVRQRHWGKWVAEIRLPXNRTRLWLGTFDTAEEATLAYDNA

SEQ ID NO: 5658 - protein, 273 aa, Glycine max
  unsure (1)..(273): unsure at all Xaa locations
FGSSGSSSSRFGSREYQNQRAKEGRFCEKLKIKNRPKFVGVRQRASGKWAAEIKDTSKKIRLWLGTYQTAEEAARAYDEAACLLRGSNTRTNFSTHVATNSPISLKLRNLLDRKAMSNQSQSQIQRQSSMISSTFQGADTSASPNVSAIKTTKSVIXPVWTRYEYDQLFNGYXTPNTSQFDYSWPLAQQRINELPISKDDFEARDHLQSHXHLSIIRXDXCVKSNVYALYISLHSSTNVLSAYDIFNPTPYGWIIRXKRILRCILLFCVIYHL

SEQ ID NO: 5659 - protein, 346 aa, Glycine max
  unsure (1)..(346): unsure at all Xaa locations
GVFGGFFFLFFFTTMSEFRKQPASRPKQKLPSPLPQESKAMRKLRIICDDPDATDSSEDETEKVQSPRRVKRNVSEISLPPLPLTTTPETSSCEVNSGKNGRVSLKVNPRVRRGKFRGVRQRKWGKWAAEIRDPFQSTRIWLGTFNTAEEASQAYEARRLEFEAMAEAQAYKTSSVSEPLATISDNKSNCCNSSAAAISAAAVSAADVSVSEKFSTTFDDLEESVLSHNSPSSVLELXYIGFQIPXEGXWIEPNFGLDFDWLSFNDYGQGFDDFGGLEDIRGFDDNEPTELPDFDFGDFGADEFAGWIEEPLNIPCAXXSFAELRRNMRLDFYNIISFVIYKLVFL

SEQ ID NO: 5660 - protein, 352 aa, Glycine max
  unsure (1)..(352): unsure at all Xaa locations
FHLVSFLGILRGFWRVFLSHFFSTMPESRKQPASRPKQKLHHHSLQESKAMRKLRIICDDPDATDSSEDETEKVQSPRRVKRNVSEISLPPLPLTTTPETSSCEVNSGKNGRVSLKVNPRVRRGKFRGVRQRKWGKWAAEIRDPFQSTRIWLGTFNTAEEASQAYEARRLEFEAMAEGSVSEPLATISDNKSNCCNSSAAAISAAAVSAAACVCIXEANDLVAELAGLEVPDVSLLNXVTTTIXFXVVQLLLFHLGXEPNFGLDFDWLSFNDYGQGFDDFGGLEDIRGFDDNEPTELPDFDFGDFGADEFAGWIEEPLNIPCAXXGFAELRRNMRLDFYNIISFVIYKLVFL

SEQ ID NO: 5661 - protein, 146 aa, Glycine max
  unsure (1)..(146): unsure at all Xaa locations
XHLXLRTHRPTDTTXPSCTPAHIGAQWTLCPLNRSKECQGTAKKHPVYHGVRKKNWGQGXSEIREPHXKKARIWLGTLSTPKMAVRAHDEAALTIKGQTTILNFPKTAHQIPRPVTCSPRDIQTAHTAVASMVKIDTVTQYSDSET

SEQ ID NO: 5662 - protein, 327 aa, Glycine max
  unsure (1)..(327): unsure at all Xaa locations
TIFLGILRGFDPIFFTMVEPLNQSTPRTKKMKHKRNPIHDSKMTRKLRIICNDPDATDSSSDEDEYLNVRKMIEPLEPLERLEVPVNPVVADETSTESTNNDELNQTKRVMAKTPSVKRRKYKGVRMRKWGKWAAEIRDPFKGTRIWLGTFSTAEEASQAYETRRLEFEVMAKALSDEKSNNGSSNNNVVASAETETVAAPENNSSNYYVSSAAGSVSDSKSASMDESESVLSLTSPSSVLELDTSAFNLIGSGKVSSNEVDSEYGFHDEHDFDDDLAALEDFRGFDDNEPSELPDYDFDDFGADEFAGWIEEPLNIPCVXXDFAAS

SEQ ID NO: 5663 - protein, 163 aa, Glycine max
  unsure (1)..(163): unsure at all Xaa locations
FDSFPHFQNINKVERENQKKKTTTQQKELEIRTQXSKPXPSSKAMRLSSPSSSTSDCKKKKYKGVRMRSWGSWVSEIRAPNQKTRIWLGSYSTPEAAARAYDAALLCLKGSSANLNFPLSSSQQYIPXXDAVMSPKSIQRVAAAAAYSFIDNATTPPSPPSAS

SEQ ID NO: 5664 - protein, 231 aa, Glycine max
  unsure (1)..(231): unsure at all Xaa locations
LPLLHTLSHSLKQLQRTKLFTKXHVFHQYFSDPDATSPGSGGSSRPALSDEDFFLAASNPKKRAGRKKFRETRHPVYRGVRRRDSGKWVCEVREPNKKSRIWLGTFPTAEMAARAHDVAAIALRGRSACLNFADSASRLPVPATAEARDIQKAAAEAAEAFRPGKDDDAVAERVAATATEREEEQEEGXXVPEYLRNMVLMSPTHCFGSDEYGSADVEFDDAEVSLWSYSI

SEQ ID NO: 5665 - protein, 219 aa, Glycine max
  unsure (1)..(219): unsure at all Xaa locations
MQXSARKRRAGRKKFHETRHPVYKGVRQRNGKWVSELRQPNNKNARVWLGTFAHPDMAAIAYDVAALAFKGDSASLNFPNAATSFPRPRTCSVRAIQFAATQAAEKHFSCVESQQLQREGSGSGSFSLDDDSSEFSSQGRFFWDEEEVFNMPELLNCMAEALIITPPALERGFNWVGGETTVDLTLWXNXXPLRFSANQRGTCNFDLLQNIIYTNSLKM

SEQ ID NO: 5666 - protein, 164 aa, Lupinus polyphyllus
MARPQQRYRGFRQRHWGSWVSEIRHSILKTRIWQGTFESAEDAARAYDEAARLMCGTRARTNFPYNPNASQSSSSKLLSATLIAKLHRCYMASLQMTRPSSLPEAPRIIASPNNAVKGIGADAMLLPKKREQEEQETGGNLDFKKVKVECSQQFKPLEEDHIAQ

SEQ ID NO: 5667 - protein, 153 aa, Narcissus pseudonarcissus
MCGGAIISDFIPPSRSRKLTADYLWPNLNKGKDKKKSFGFEDDFEADFNEFEDESEEGESEAVDVKPFKFGAKAGFSREGSTYLKPIELNGAAERSSKRKRKNQYRGIRQRPWGKWAAEIRDPNKGVRVWLGTFNTAEEAARAYDDEARRIRG

SEQ ID NO: 5668 - protein, 218 aa, Oryza sativa (indica cultivar-group)
MEVEEAAYRTVWSEPPKRPAGRTKFRETRHPVYRGVRRRGGRPGAAGRWVCEVRVPGARGSRLWLGTFATAEAAARAHDAAALALRGRAACLNFADSAWRMPPVPASAALAGARGVRDAVAVAVEAFQRQSAAPSSPAETFADDGDEEEDNKDVLPVAAAEVFDAGAFELDDGFRFGGMDAGSYYASLAQGLLVEPPAAGAWWEDGELAGSDMPLWSY

SEQ ID NO: 5669 - protein, 213 aa, Oryza sativa (japonica cultivar-group)
MSLSLGFSAGAGVGADRLAAAPALQAAGALPPRVDVSLSLARAANGQPSSYLPLNENDSLDMVLFDVLREASAVAALSSSSSSSPELGARTTAPVVAGHPAGRKGGGGGGGGRGAAARGGAAGGRHYRGVRRRPWGKYAAEIRDPTRHGARLWLGTFGTAEEAAAAYDRAAFRMRGAKALLNFPPAVAGDGARRGAAAAAKQVGMSDESETKN

SEQ ID NO: 5670 - protein, 273 aa, Oryza sativa (japonica cultivar-group)
MAGFGLDQHLDLIRAHLLEDAHHHVLAPSPSPSPPGTGRVRPAPVSLPPRPPLLWAAASAAPRQQEECFELGGGYAGEGEGEEEDDFRRYRGVRQRPWGKYAAEIRDPARKGARVWLGTYDTAVEAARAYDRAAFQLRGSKAILNFPNEVAADAAVKWAPPVAPIPAAAMSAGRGKRVRSEEQYYLREVKKERLIMAPPENSSSSSSSAAAAAGDIWDELKGICSLPPLSPLSPHPHMAFPQLFVIDLAFGQILNSFVLLLLRTRDFAFDYAI

SEQ ID NO: 5671 - protein, 141 aa, Oryza sativa (japonica cultivar-group)
MEDDKSKEGKSSSSYRGVRKRPWGKFAAEIRDPERGGARVWLGTFDTAEEAARAYDRAAFAMKGATAMLNFPGDHHHGAASRMTSTGSSSSSFTTPPPANSSAAAGRGGSDRTTDKVELECLDDKVLEDLLAETNYRDKNY

SEQ ID NO: 5672 - protein, 244 aa, Oryza sativa (japonica cultivar-group)
MALSEPDLAAETEAIVSALTHVVAYGGGGPPPSEETAASAVTRTAPWRADGARQGAVPAARKYRGVRRRPWGKWAAEIRDPHRAARVWLGTFATAEDAARAYDAAALRFRGGRARLNFPEDAAAADERRATDAAAAAAAASSAPAALLESQPGDVADCLDYSRILAGAPERPTSSTVPDGFFGGGGNGRFLHSWSIGTSPSPSGSGSGGAGGGGGGGGGGAPVRPLFHGGNGWEQRGDSAYNGF

SEQ ID NO: 5673 - protein, 334 aa, Oryza sativa (japonica cultivar-group)
MCGGAILAEFIPAPSRAAAATKRVTASHLWPAGSKNAARGKSKSKRQQRSFADVDDFEAAFEQFDDDSDFDDAEEEDEGHFVFASKSRVVAGHDGRAAARAASKKKRGRHFRGIRQRPWGKWAAEIRDPHKGTRVWLGTFNTPEEAARAYDVEARRLRGSKAKVNFPATPAAARPRRGNTRATAVPPPATAPAAAPPRGLKREFSPPAETALPFFTNGFVDLTTAAAPPPAMMMTSSFTDSVATSESGGSPAKKARSDDVDSSEGSVGGGSDTLGFTDELEFDPFMLFQLPYSDGYESIDSLFAAGDANSANTDMNAGVNLWSFDDFPIDGALF

SEQ ID NO: 5674 - protein, 207 aa, Oryza sativa (japonica cultivar-group)
MCGGAIIYDYIPARRRLCASDFWPDADDSDPHTPAPEKPPRAKRERKNQYRGIRQRPWGKWAAEIRDPVKGVRVWLGTYPTAEAAARAYDRAARRIRGAKAKVNFPNDFGAAPAPAAAAAKAVPRVAPTPAVLPPPKMEAVSEGAGACSSDEVKELSEELLAYENYMSFLGIPYMEGGAASAAGAEEAAAPAGLWTFEDYELPSLAL

SEQ ID NO: 5675 - protein, 221 aa, Oryza sativa (japonica cultivar-group)
MEQHSHCWYYGGGMAVTAAAGAGAASSTSSESQPSGYDYETAGSAEVSAPGGGAGRERAARKEEGGAGAAAAAAGFIGVRKRPWGRFAAEIRDSTRNGVRVWLGTFETAEAAAMAYDQAALSARGAAAALNFPVERVRESLRALALGAAGGSPVLALKGRHSKRKRRKRSELAGATATANKTTTTTSATTGGEHKQIVLELEDLGADYLEELLWMSEQTSH

SEQ ID NO: 5676 - protein, 293 aa, Oryza sativa (japonica cultivar-group)
MGGGRRRRSAAMAMEGEVEGGGRRRVVRIIFRDEDATDSSSSEEEGEGEVVAARRVVVKRTRLRCQEVERRFTGVRRRPWGRWAAEIRDPKENGRRVWLGTFDTAEAAAAAYDDACLRLRGPGAALNLPSRRCVAPAPPPPPPPPPPTAEEKKLLLFPPPLPPRKKAMLFPLPLPPRKKPLLYPPPLPPKKKPLPPPSPPPQPPLPEKENTPLPPLLLPPKKKPLPPPSPTAAAKEEPIELEHAAPPPPFVPRPVWPLLASGGGGKRKKQSGCGGRIPALNTAAAAVEETGRA

SEQ ID NO: 5677 - protein, 282 aa, Oryza sativa (japonica cultivar-group)
MAMEGEVEGGGRRRVVRIIFRDEDATDSSSSEEEGEGEVVAARRVVVKRTRLRCQEVERRFTGVRRRPWGRWAAEIRDPKENGRRVWLGTFDTAEAAAAAYDDACLRLRGPGAALNLPSRRCVAPAPPPPPPPPPPTAEEKKLLLFPPPLPPRKKAMLFPLPLPPRKKPLLYPPPLPPKKKPLPPPSPPPQPPLPEKENTPLPPLLLPPKKKPLPPPSPTAAAKEEPIELEHAAPPPPFVPRPVWPLLASGGGGKRKKQSGCGGRIPALNTAAAAVEETGRA

SEQ ID NO: 5678 - protein, 362 aa, Oryza sativa (japonica cultivar-group)
MCGGAILSDLIPPPRRVTAGDLWLEKTKKQQQQKKKNKGARRLPLRQEEEDDFEADFEEFEVDSGEWEVESDADEAKPLAAPRSGFAKGGLKNTTVAGADGPAARSAKRKRKNQFRGIRQRPWGKWAAEIRDPRKGVRVWLGTFNSPEEAARAYDAEARRIRGKKAKVNFPDGAPVASQRSHAEPSSMNMPAFSIEEKPAVMSAGNKTMYNTNAYAYPAVEYTLQEPFVQIQNVSFVPAMNAIEDTFVNLSSDQGSNSFGCSDFSQENDIKTPDITSMLAPTMTGVDDSAFLQNNASDAMVPPVMGNASIDLADLEPYMKFLIDGGSDESIDTLLSSDGSQDVASSMDLWSFDDMPVSAEFY

SEQ ID NO: 5679 - protein, 341 aa, Oryza sativa (japonica cultivar-group)
MCGGSILGDLHLPVRRTVNAGDLWGDAGKGRDGGDGLKKRKGSSWDFDVDCDDDDDDDFEADFEEFEDDYGDDDDVGFGDDDQSDMNGLKLAGFSTTKLGLGGSRKRKTRYRGIRQRPWGKWAAEIRDPRKGVRVWLGTFGTAEEAAMAYDVEARRIRGKKAKVNFPDAAAAAPKRPRRSSAKHSPQQQKARSSSSSPASLNASDAVSKSNNNRVSSAGSSTDATAAAIAIDDGVKLELLSETDPSPPMAAAAAAWLDAFELNDLDGSRCKDNAFDHQIHKVEAAVADEFAFYDDPSYMQLGYQLDQGNSYENIDALFGGEAVNIGGLWSFDDMPMEFRAY

SEQ ID NO: 5680 - protein, 386 aa, Oryza sativa (japonica cultivar-group)
MCFDLADQRGPRGGGGRPVKGGGDGRAAAAAAATAMTVAGASELMSGYYQAQEMSTMVSALARVVAGGGGGGGDGDGDQWAWSSPSPSSSAAAAAARGVQERRREEQAMHELAGYACGGAPSPEFAGSEQSSDTQSASAATMDEHHSPVGGGGNAEGPDTPRRRYRGVRQRPWGKWAAEIRDPHKAARVWLGTFETAEAAARAYDEAALRFRGSRAKLNFPEDARLYPTAATTTTAAPPPAPVAAASPSAAIYPGASQSAEYLRYQMLLQGRLTTATPNQGTLLPFYGGGGGGGSMTNPYGGGGGGAMSGFLGSYYSFPTPSVSVATVPSSTSSAPGNYYSSHGGSHQSMSAAEEWNWENALVYPATAASWSESSYHHHPPPPHTQ

SEQ ID NO: 5681 - protein, 239 aa, Oryza sativa (japonica cultivar-group)
MAEHFSHAGMYIGYTADAAASSSSSSSSSSSSSSEMLRFDTGWPDETPAPSSVAGRRRSAGGDHRQGRGQTEAAAAFIGVRRRPWGRFAAEIRDSTRNGARVWIGTFDSAEAAAMAYDQAALSARGAAAALNFPVERVRESLHALSLGAAGGSPVLALKRRHSKRKRRKKAELLAAAAATAATANATPQTRRISKSTELTTATTDEQKRFVVELEDLGAEYLEELLWLSEINGGSDPAD

SEQ ID NO: 5682 - protein, 329 aa, Oryza sativa (japonica cultivar-group)
MCGGAILAELIPSAPAARRVTAGHVWPGDANKAKKKGARADDFEAAFRDFDNDSDDEEMMVEEAEEEEATSEHKPFVFRAKKAAAAASSRRRKPAQYRGVRRRPWGKWAAEIRDPVKGIRVWLGTFTNAEAAALAYDDAARAIRGDRAKLNFPSATTPDTRKRGRATAAAAPAVKATPVINLVEEEDEEEVAAAMASIKYEPETSESSESNALPDFSWQGMSASDEFAVAAAALSLDSDDDLAKKRPRTEPEDTTDSGSGDDTDALFDALLFADQYNHFNGGAYESLDSLFSADAVQTTAAAAAADQGMGLWSFDDGCCLVDVEASLSF

SEQ ID NO: 5683 - protein, 373 aa, Oryza sativa (japonica cultivar-group)
MEEGFVALKRTEHVEVTSLAVAVEATPSAKGGKGKVVVGGGGAGGGVGPTRVRVFCDDFDATDSSSDEDEEEVTARRRVKRYVQEIRLQRAAAVAVPPVKVKGEEVFPAAVSAKMAEAAKARVVLAAGRKRKAGGVDGAEPRFRGVRRRPWGKYAAEIRDPWRRVRVWLGTFDTAEEAAKVYDTAAIQLRGRDATTNFNQSGDSASLDVPPEVAERVPQPPGASKNASPATSYDSGEESHAAAASPTSVLRSFPPSAVVATADTANKKQPPPPPLVVRETDESVDVFGCSFSDDGGFAGELPPLYTDFDLLADFPEPPLDFLSNLPVEPFSLAPFSSNNGSPDLHLDDAPSPAAAQVDDFFQDITDLFQIPVV

SEQ ID NO: 5684 - protein, 321 aa, Oryza sativa (japonica cultivar-group)
MDRQWRCLAAAASTSGNSKLPPLPMALGGAVEYGQLVHGAAAPVAPFFVDAEQQSLSPATAMVLGAGWYNYNLVTPSQAAQLHHRLRRAVGAAPCSMKRCGGMAAAAAGRLALVGPAPVQAKLYRGVRQRHWGKWVAEIRLPRNRTRLWLGTYDTAEDAALAYDGAAFRLRGDAARLNFPELRRGGRHHAPALSASVDAKILQATTTTTADTAAAAAPASTNTTPPPSPRVVKTEPGCCSVSEASTTTTADAADVSSTGSSPSPTSSNQAATATPPAPRPPPPLPETIQQLDFTEAPWDEADGFALRRYPSWEIDWDAILS

SEQ ID NO: 5685 - protein, 136 aa, Oryza sativa (japonica cultivar-group)
MDGDGGGGWDDQGNGGGETTKYRGVRRRPSGKFAAEIRDSSRQSVRVWLGTFDTAEEAARAYDRAAYAMRGHLAVLNFPAEARNYVRGSGSSSSSRQHQQRQVIELECLDDQVLQEMLKGGDDQYRSAAGSKRNNY

SEQ ID NO: 5686 - protein, 321 aa, Oryza sativa (japonica cultivar-group)
MCGGAILANIIPATPPRPATAAHVWPGGDGEKRRKVGGGGCDDDFEAAFERFGREDSEMEEEEVEEVVVGKKAAVRRRRATPAAGRRARPSKYWGVRRRPWGKWAAEIRDPVEGVRVWLGTFATAEAAAHAYDAAARDLRGATAKLNFPSSSSSTAATPRPRKCRPTTATATPKATTPNVVVVVNLVDKEAEVSESSGASSSALPDFSWQGMSASSDDDAAAQQALLDAAGGAKKRPRSEPHVTSDDEVLPASFDSDNNTAAAGLLPLDDPFLFGDQFGDLNGGAFASLMDGLFAAGEANVAGESVGLWSFGDDFLNASYY

SEQ ID NO: 5687 - protein, 367 aa, Oryza sativa (japonica cultivar-group)
MVNRASETAHVTSAWAHTSSLRSSPMVEVIVEKKARRIVRGRWHVEASNEAAAAAPAVAAPAPRVVRVLCRDHDATDSSGDDDGEDDAPRRARLLVHEIHVARQPVAMSPAAASSSQRRRVGPMKRTESAVDATMDATAAAPERKFRGVRKRPWGKYGAEIRVSQQSARVWLGTFDTAEEAARVYDHAALRLRGPSATTNFPMTPAAPSPPPSRATYAGAASGYDESSDESQLVGSPVSVLRPMPARATAKKEAKEEDDSAPDILGISAGDGLISPFTCDVLNFPPPDEDMFGGGISFGEPTPPPMVFDDDCMARLGHAPNDDEHPVTSSSFLDGDLGDLPSWTEVDGFFSDVGGDDLFAAEPFPAL

SEQ ID NO: 5688 - protein, 241 aa, Oryza sativa (japonica cultivar-group)
MGTNPSLHELAAGAAPRGRVVRILVRDADATDSSSSEDEAVAVAQPRPRRRGKVGGGGGGGGGVKRRVMEAGAGEARPTARFRGVRQRPWGRFAAEIRDPHLRRRLWLGTFDTAEEAAAAYDAASVRLRGSSAATNFASVRCYSLPPELPKPTISPPEAAVRPITLPIGTAKPTLLPRVKEEGESCGGRVKEEASSCEVQVLAPEPMWTMISGKRKKRSGCGTRVRAFHAVSACVEEVGGA

SEQ ID NO: 5689 - protein, 312 aa, Oryza sativa (japonica cultivar-group)
MCGGAILADFTPARVPRRLTAAELLPVTPTPPAAERRTTRKRKSDVDFEAEFELFEDDDDDDEFELSDDGDESLAVSFSSDVSSSSRPRRRVAAAAAGRRKASKKSKYRGVRRRPSGRFAAEIRDPKKGRRVWLGTYGSAEEAAMAYDREARRIRGKGARLNFPRDGDGSPRRSNDRPCWTIDLNLPAAAVSGDDDDAMAVDAADADAGSAGRAAAYADQEALSAAKCKIKQCPRDEQMASATPELMEEDASSSRNMVPLSMALQLQYAAMIAECDREMEEIAAVERDLERRRRQVFERRGHLVRQASLLLD

SEQ ID NO: 5690 - protein, 292 aa, Oryza sativa (japonica cultivar-group)
MSRSRTVRIFWDDPDLTDSSGEDEGCGGRRVGSMVRELPPAQMPVAQAAAAAALPEQCSGGDGDMGRRVVGGGCTVGVGRRRLTKDGGPGAPSTKFRGVRRRPWGKFAAEIRDPWRGVRVWLGTFDTAEEAARVYDNAAIQLRGPSATTNFSASTNSAGAQDPVAVGYESGAESSPAVSSPTSVLRKVPSLCSLAEDKDDYEAGPCEPATAAGSNLTVLEEEELGEFVPFEDAPVYGGSSFWDFEPESGFLYAEPSSPETPWDAGATSSGEAQDYFQDLRDLFPLNPLPAIF

SEQ ID NO: 5691 - protein, 318 aa, Oryza sativa (japonica cultivar-group)
MNTRGSGSSSSSSSSQASLMAFSEPPKPASQPSPPSSPMSERPPSGRSRRRAQEPGRFLGVRRRPWGRYAAEIRDPTTKERHWLGTFDTAQEAALAYDRAALSMKGAQARTNFVYTHAAYNYPPFLAPFHAPQYAAAAAAPSSVQYGGGVGAAPHIGSYGHHHHHHHHHGHGAASGASSVGECSTMPVMVPVDPHRSSMSSSLLDMDRNGHDFLFSGADDNSGYLSSVVPESCLRPRGGGAAADHQDMRRYSDADAYGMMGLREDVDDLAQMVAGFWGGGDAADQLGACGFPASGGAADMVASSQGSDSYSPFSFLSH

SEQ ID NO: 5692 - protein, 289 aa, Oryza sativa (japonica cultivar-group)
MAMAKELQETSSSSSSSAASTSSCSSAVTDAWSSPARPNAVAGGKRKKEVVGEADEAAGGGAGEEEEEEAEAAAAGKSSAATKKRKRSSDGKHPVYRGVRMRAWGKWVSEIREPRKKSRIWLGTFPTADMAARAHDVAALAIKGRAAHLNFPDLAGVLPRAASASPKDVQAAAALAAAFTTSPSSSPSSSLSADDVAPCVVHADADEQPAAAAKNDDDDGSTTAPVAAAAAAAAADEQQLFDLPDLLFDIQDGPFGFPAMWAPLADVDEVNAELRLEEPLLWDLGVTDA

SEQ ID NO: 5693 - protein, 228 aa, Oryza sativa (japonica cultivar-group)
MAASEQSSESSSTASTSSCGKKQQVAGKRKREDVGGGGEQAAAVAYRGVRMRAWGKWVSEIREPRKKSRIWLGTFPCPEMAARAHDVAALSIKGARAVLNFPDLAPALPRPASLAPRDVQAAAALAAVMHHHKHPSSSTSTSSPPAAPPPDEHHPRHEPQQPESSREDDQQQQPAAAAAAQMAVAELVFDELAPLWVEDVVEFGTSDHCWTAYDALDPIGFQPLLWEY

SEQ ID NO: 5694 - protein, 230 aa, Oryza sativa (japonica cultivar-group)
MEMDIGEGESCCGRRKQQQQQNISSSKSRKCCPLRRSRKGCMKGKGGPENQRCPFRGVRQRTWGKWVAEIREPNRGARLWLGTFNTALDAARAYDSAARALYGDCARLNLLLAAATAGAPPAAATPSVATPCSTNDDSNNSSSTTHQQQLTTMLQLDDDNYTLQPSSSDQEDFETYVTRLPKAEDFGLEGFQEVPLDVLDEAGGGISIWDLSICPADFMATAATTTAKSS

SEQ ID NO: 5695 - protein, 315 aa, Oryza sativa (japonica cultivar-group)
MDNHAVAVQQRDTAPRPRARARASVSSIQGGGGPGWADHVALPRPPRCHPRRPPTPCRRPLAFASSSIHPHRAVLPSGAPPHVSAGARDTGGAAGLARPHHSFPQEKKPKPRHAGVASPRLALAPLRNSARMDRREATVFLPPPPPPQPTQPQQQPAAAAVRAPVGGRGGGGGRQYRGVRMRKWGKWVAEIREPNKRSRIWLGSYSTAVAAARAYDTAVFYLRGRSARLNFPDQLDGAGGGGAGAGGAEDHRELTAAVIRKKAAEVGARVDAQHSVVGAAAPVPLQPPQPPPPQRRRTKNPDLNREPTPDTSDDE

SEQ ID NO: 5696 - protein, 338 aa, Oryza sativa (japonica cultivar-group)
MAPSKQQQMLLKKVMAKKPKTKRLSGFGLKPSAAFSRPHVPSAAASLQPSRRVRVVFEDPDATDSDSDDDEDAGAASKKRYFELFIGKPASSTKQASPASTVAAYANIGKVGSTCYRGVRLRKWGKWAAEIRNPFTGHREWLGTFDTADAASAAYQSASRNFAEEKRRRGVASSASPASSATPTPTASSSSSTSAAPFAHPSPSSVLEATKPAPKPESPPLPEQAATPLLVEATNETAELPDDPEFYKDILRGLQLPDIDPMDFRAGLDALDISDVPAYMNGEQDVLFTEDMLLGDFAEEDDLDLDDIGDDFCEDFPEIPSGYDFGRGDMFRQVDFCV

SEQ ID NO: 5697 - protein, 411 aa, Oryza sativa (japonica cultivar-group)
MHSKLEFFKDESTDHPSKLRIRNEIRLSKRGRVVTDTRTRTREGDAVTGRAAPPPPAAAAAAAAAVREEGTHHHRHRHARHATKRGGGVRRRRSERRRNRKKGGGGEGEELEELEEEEISFLFPLDGAGGGEEGRLLRASELCGIIELPHWVRKKRTRRKSDGPDSIAETIKWWKEQNQKLQEENSSRKAPAKGSKKGCMAGKGGPENSNCAYRGVRQRTWGKWVAEIREPNRGRRLWLGSFPTALEAAHAYDEAARAMYGPTARVNFADNSTDANSGCTSAPSLMMSNGPATIPSDEKDELESPPFIVANGPAVLYQPDKKDVLERVVPEVQDVKTEGSNGLKRVCQERKNMEVCESEGIVLHKEVNISYDYFNVHEVVEMIIVELSADQKTEVHEEYQEGDDGFSLFSY

SEQ ID NO: 5698 - protein, 258 aa, Oryza sativa (japonica cultivar-group)
MVKNTSNKCIAAAGATAAAGLGGGAASCSGGGGDGKVTTAAAAALAVRPYKGVRMRSWGSWVSEIRAPHQKRRIWLGSYATPEAAARAYDAALLCLKGSDAVLNFPSSASSRRRLDIHRGGTDSAAGDMSPRSIQRVAAAAAAAFDAAAAAVVVDESCSCSAEAMSSTPTSGATSLSTLGSSGGGDVLDHATTPSSSSSAAANVCSPPLEGDHELWTELDAFASPKFMDLMAAGGTAFSSPWEEPEEDGELMRLWSFC

SEQ ID NO: 5699 - protein, 228 aa, Oryza sativa (japonica cultivar-group)
MPFVRTLAFPTLANQIEGEIKSRTERDHGEVDLSSPEEAMSRAECGGGEEEERCRYRGVRRRRWGKWVSEIRVPGTRERLWLGSYATPEAAAVAHDTAVYFLRGGAGDGGGGGATLNFPERAAATYGGGAAVARLSPRSVQRVASDAGMAADAQLVAARDAAPAPAPATAYARPDHCAGATTARHDELARRGMYGAHAHAAGANARTSGERQLVCAEEISVDDMEILM

SEQ ID NO: 5700 - protein, 193 aa, Oryza sativa (japonica cultivar-group)
MEQRAAAAAQQRQGRRQSAAACGIRRARAETRHPVYRGVRFRAGKWVSEIRELRKPSRIWLGTYATPEMAAAAYDAAALALRGRGAALNFPDAARSRPAPASASADDVRAAATAAAAAMAHQEEDDDSRRQLEDGGGGGGVVDEDDVLEMPRLMVSMAEGLMISPPPVMLGLQADGGGIMDEGGGVVRLWDHS

SEQ ID NO: 5701 - protein, 214 aa, Oryza sativa (japonica cultivar-group)
MEYYEQEEYATVTSAPPKRPAGRTKFRETRHPVYRGVRRRGPAGRWVCEVREPNKKSRIWLGTFATAEAAARAHDVAALALRGRGACLNFADSARLLRVDPATLATPDDIRRAAIELAESCPHDAAAAAASSSAAAVEASAAAAPAMMMQYQDDMAATPSSYDYAYYGNMDFDQPSYYYDGMGGGGEYQSWQMDGDDDGGAGGYGGGDVTLWSY

SEQ ID NO: 5702 - protein, 203 aa, Catharanthus roseus
MSEEIISVSDRFLLSLIEEHLLSDNSDDSSSELTSTEENWEEIFADFLNWSGSEIQKRGSPSSESCQSNSMAESCQEDSVVGTPPEAAAGGGCSKDWNRYKGVRRRPWGKFAAEIRDPKKKGSRIWLGTYETPEDAALAYDAAAFNMRGAKARLNFPHLIGSNISGPVRVNPRKRFPAEPSTTSSSSSSSSSENSGGRKKRRY

SEQ ID NO: 5703 - protein, 210 aa, Catharanthus roseus
MYQSNAHNSDHLTFLPPLVDYQFLNNDFDFSEIFTDFNYANYNYNTSTSDNFSGFQFNENCEEIISPNYASEDLSDIILTDIFKDQDNYEDEVVAGEQEEELITTPTSRGGGGGGCEQRSNEEWIRYRGVRRRPWGKFAAEIRDPKRKGSRIWLGTYETAEDAALAFDQAAFQLRGSRARLNFPNLIGSANAPVRVSPRRRSSSCHLRPQ

SEQ ID NO: 5704 - protein, 376 aa, Catharanthus roseus
MALLDQASNLSPMPFDFTRKRKSRRRDGTKNVAETLAKWKEYNEKLDALDGGKPARKVPAKGSKKGCMKGKGGPENSHCKYRGVRQRTWGKWVAEIREPNRGSRLWLGTFRNAIEAALAYDEAARAMYGPCARLNLPNYRASEESSSLPTTSGSDTTTASGISEVSVYEDKKFTPVVSGLKQDDKGESLESADSKPQLLVDAGTPMSAVKEEPKEYQVMDSQSEGQFGDEEPPSKLVCKEVDFGQDQAVVPAVKNAEEMGGEMGGDILKGCSLSEMFDVDELLSVLDSTPLHASDFQHGMGNGNVKAEAAYNYAPSWDSAFQLQNQDPKLGSQQHMAQTPPEINSGLDFLQPGRQEDSYFTLGDLDFLDLGAELGL

SEQ ID NO: 5705 - protein, 234 aa, Lycopersicon esculentum
MDQQLPPTNFPVDFPVYRRNSSFSRLIPCLTEKWGDLPLKVDDSEDMVIYGLLKDALSVGWSPFNFTAGEVKSEPREEIESSPEFSPSPAETTAAPAAETPKGRHYRGVRQRPWGKFAAEIRDPAKNGARVWLGTYETAEEAAIAYDKAAYRMRGSKAHLNFPHRIGLNEPEPVRVTAKRRASPEPASSSGNGSMKRRRKAVQKCDGEMASRSSVMQVGCQIEQLTGVHQLLVI

SEQ ID NO: 5706 - protein, 244 aa, Lycopersicon esculentum
MYQLPTSTELTFFPAEFPVYCRSSSFSSLMPCLTESWGDLPLKVNDSEDMVIYGFLQDAFSIGWTPSNLTSEEVKLEPREEIEPAMSTSVSPPTVAPAALQPKGRHYRGVRQRPWGKFAAEIRDPAKNGARVWLGTYESAEEAALAYGKAAFRMRGTKALLNFPHRIGLNEPEPVRVTVKRRLSESASSSVSSASESGSPKRRRKGVAAKQAELEVESRGPNVMKVGCQMFQLASSYWLVKIWS

SEQ ID NO: 5707 - protein, 240 aa, Lycopersicon esculentum
MDSSSSSSQFFYSMNSDLNSSDSSYEWSNFNTQSYLPFNVNDSEEMLLFGVLNAAHEETTSETVTSHRVKEEEVTSESEVIEAIPAKEKSYRGVRRRPWGKFAAEIRDSTRNGVRVWLGTFDSAEDAALAYDQAAFSMRGNSAILNFPVETVRDSLRDMKCHVDDDCSPVVALKKRHSMRKRSTNSKKVNSISKVVREVKMENVNNVVVFEDLGADYLEQLLSSSSSDQSSCDATYFSPW

SEQ ID NO: 5708 - protein, 245 aa, Lycopersicon esculentum
MDSSSSSSQFFYSMNSDLNSSDSSYEWSNFNTQSYLPFNVNDSEEMLLFGVLNAAHEETTSETVTSHRVKEEEVTSESEVIEAIPAKEKSYRGVRRRPWGKFAAEIRDSTRNGVRVWLGTFDSAEDAALAYDQAAFSMRGNSAILNFPVETVRDSLRDMKCHVDDDCSPVVALKKRHSMRKRSTNSKKVNSISKVVREVKMENVNNVVVFEDLGADYLEQLLSTSCQVIKVVVMQLISVHGKIKD

SEQ ID NO: 5709 - protein, 214 aa, Lycopersicon esculentum
AAGRKPSLNISIPSVKKTEEPKTGEVKTGEPKTEEPKTGEVKTEYSVKEKMVENSEKKRYRGVRQRPWGKFAAEIRDPTRKGTRVWLGTFDTAMDAAMAYDRAAFRLRGSKAILNFPLEVSNFKQENHEIEKNVVNLNSNTNSCGKRVRREMENDDGIVMKKEVKREQMVATPLTPSNWSSIWDCGNGKGIFEVPPLSPLSPHSNFGYSQLLVS

SEQ ID NO: 5710 - protein, 161 aa, Lycopersicon esculentum
MVPTPQSDLPLNENDSQEMVLYEVLNEANALNIPYLPQRNQLLPRNNILRPLQCIGKKYRGVRRRPWGKYAAEIRDSARHGARVWLGTFETAEEAALAYDRAAFRMRGAKALLNFPSEIVNASVSVDKLSLCSNSYTTNNNSDSSLNEVSSGTNDVFESRC

SEQ ID NO: 5711 - protein, 201 aa, Lycopersicon esculentum
MTKQDEGLTLELIRQHLLEDFTTTESFIDSLNSCFSDHISSSDDISPVFTSVKTEPSTSNSLSDSPNSSYPNEPNSPISRYFNLRSDFPEFKIDSDTILSPVFDSSAGSNEDNNKKKNYRGVRRRPWGKFAAEIRDPSRKGSRIWLGTFDTDIDAARAYDCAAFKMRGRKAILNFPLDAGKSGAPANVGRKRRRENKMELV

SEQ ID NO: 5712 - protein, 224 aa, Lycopersicon esculentum
MSSPLEIDTSFSHSNLLFLEDESSWSNTHDPFVDIDEYLPIIIPCNDEEIVVESSNASTTTTTTTTSKVASIQNIHHDQEEVTSIEKKHEDDQEKHYIGVRKRPWGKYASEIRDSTRNGIRVWLGTFDTAEEAALAYDQAALSMRGPWSLLNFPMEHVKKSLENIEYSCKDGLSPAAVLKATHKTRRVKHKRSSRKKKNENLENVFVFQDLGVELLEELLMTSS

SEQ ID NO: 5713 - protein, 372 aa, Lycopersicon esculentum
MCGGAIISDLVPPSRISRRLTADFLWGTSDLNKKKKNPSNYHSKPLRSKFIDLEDEFEADFQHFKDNSDDDDDVKAFGPKSVRSGDSNCEADRSSKRKRKNQYRGIRQRPWGKWAAEIRDPRKGIRVWLGTFNSAEEAARAYDAEARRIRGKKAKVNFPDEAPVSVSRRAIKQNPQKALREETLNTVQPNMTYISNLDGGSDDSFSFFEEKPATKQYGFENVSFTAVDMGLGSVSPSAGTNVYFSSDEASNTFDCSDFGWAEPCARTPEISSVLSEVLETNETHFDDDSRPEKKLKSCSSTSLTVDGNTVNTLSEELSAFESQMKFLQIPYLEGNWDASVDAFLNTSAIQDGGNAMDLWSFDDVPSLMGGAY

SEQ ID NO: 5714 - protein, 248 aa, Lycopersicon esculentum
MTENSVPVIKFTQHIVTTNKHVFSEHNEKSNSELQRVVRIILTDADATDSSDDEGRNTVRRVKRHVTEINLMPSTKSIGDRKRRSVSPDSDVTRRKKFRGVRQRPWGRWAAEIRDPTRGKRVWLGTYDTPEEAAVVYDKAAVKLKGPDAVTNFPVSTTAEVTVTVTETETESVADGGDKSENDVALSPTSVLCDNDFAPFDNLGFCEVDAFGFDVDSLFRLPDFAMTEKYYGDEFGEFDFDDFALEAR

SEQ ID NO: 5715 - protein, 222 aa, Lycopersicon esculentum
MAPKEKIGAVTAMAMVNLNGISKEVHYRGVRKRPWGRYAAEIRDPGKKSRVWLGTFDTAEEAARAYDNAAREFRGAKAKTNFPKLEMEKEEDLKFAVKNEINRSPGQTSTVESSSPVMVDSSSPLDLSLCGSIGGFNHHTVKFPSSGGGFTGSVQAVNRMYYIEALARAGVIKLEQIGRKRLDYLGGGDSDSSTVIDFMRVDVKSTTAGLNLDLNFPPPENM

SEQ ID NO: 5716 - protein, 260 aa, Lycopersicon esculentum
MCGGAILADIIPPRDRRLSSTDLWPTDFWPISTQNVPLNPKRARPSTGGEQMKKRQRKNLYRGIRQRPWGKWAAEIRDPRKGVRVWLGTFNTAEEAARAYDREARKIRGKKAKVNFPNEDDDHYCYSHPEPPPLNIACDTTVTYNQESNNCYPFYSIENVEPVMEFASYNGIEDGGEEMVKNLNNRVVEEEEKTEDEVQILSDELMAYESLMKFYEIPYVDGQSVAATVNPAAETAVGGGSMELWSFDDVSRVQPSYNVV

SEQ ID NO: 5717 - protein, 264 aa, Lycopersicon esculentum
MNSQIFSTGFSGYGMEQQGSIGLNQLTPIQIQQIQAQINFQNQQQQQQQQMMLQTAHHASTMNFLAPKPVPMKQSGSPPKPTKLYRGVRQRHWGKWVAEIRLPKNRTRLWLGTFDTAEEAALAYDKAAYMLRGDFARLNFPQLRHNGNLIGGDFGEYNPLHSSVDAKLKDICQSLAQGKSIDSKKKKTKGLSAEKAAVVKMEEEESKTAEVGSESDGSHSGSGGSSPVTELIFPEFTEEEPTWDMSENFLLQKYPSHEIDWASL

SEQ ID NO: 5718 - protein, 300 aa, Lycopersicon esculentum
MAIMDEAANMVCVPLDYSRKRKSRSRRDRTKNVEETLAKWKEYNEKLDNEGKGKPVRKVPAKGSKKGCMRGKGGPENWRCKYRGVRQRIWGKWVAEIREPKRGSRLWLGTFGTAIEAALAYDDAARAMYGPCARLNLPNYACDSVSWATTSASASASDCTVASGFGEVCPVDGALHEADTPLSSVKDEGTAMDIVEPTSIDEDTLKSGWDCLDKLNMDEMFDVDELLAMLDSTPVFTKDYNSDGKHNNMVSDSQCQEPNAVVDPMTVDYGFDFLKPGRQEDLNFSSDDLAFIDLDSELVV

SEQ ID NO: 5719 - protein, 204 aa, Lycopersicon esculentum
MARAQQRYRGVRQRHWGSWVSEIRHPLLKTRIWLGTFETAEDAARAYDEAARLMCGPRARTNFPYNPNMPQTSSSKLLSTTLTAKLHKCYMASLQMTKTSPQGQKLAKNATNVQESVINSYKMKQQMLVPKPSVLLTHHDHHEEAKVVNLGVGVIRKVEDQVLEGIPQFVKPLEDDHIEQMIEELLDYGSIELCSNVVPSHQIQ

SEQ ID NO: 5720 - protein, 299 aa, Lycopersicon esculentum
MIIMSTEQPNCSESTESSCNSSSSSSPSSPSSVLLQPLPQINSKNRLKRCRGEEEVEEEEDVVVNNPNPKKMNKNNNNGSSTSVVSYVGVRMRAWGKWVSEIREPKKKSRIWLGTFATPEMAARAHDVAAMSIKGTSAILNFPQFSHLLPRPVTCSPRDIQNAAVKAAHMDHLNPKFSILPETSAATMTSSSSSLSLVSGVTSSSSSFQDDEESRPSPPELIPEATGQLSEIVELPKLGSSYELVESTQSLFESDEWWDNNYGNCEYFFGQDNYISSNMEFTGLENVVSTSFESFLWQH

SEQ ID NO: 5721 - protein, 237 aa, Nicotiana sylvestris
MYQPISTEFPVYHRTSSFSSLMPCLTDTWGDLPLKVDDSEDMVIYGLLSDALTTGWTPFNLTSTEIKAEPREEIEPATSPVPSVAPPAETTTAQAVVPKGRHYRGVRQRPWGKFAAEIRDPAKNGARVWLGTYETAEEAALAYDKAAYRMRGSKALLNFPHRIGLNEPEPVRLTVKRRSPEPASSSISPASENSLPKRRRKAVAAKQAELEVQSRSNVMQVGCQMEQFPVGEQLLVS

SEQ ID NO: 5722 - protein, 282 aa, Nicotiana sylvestris
MASPQENSTTLDLIRQHLLDDNVFLEHYCSETETTTLIYSQSSSSSESLDQSFSFEPTLNYATTAQSSNLEVSTFFNNSKTEFDSFEFGTIPNVSAARSSSLKQTSFKERKPSLNIAIPVKQEVVQKVELAPTEKKHYRGVRQRPWGKFAAEIRDPNRKGTRVWLGTFDTAIEAAKAYDRAAYKLRGSKAIVNFPLEVANFKQEFNNEIRPLVNSSRKRVRETVNEEQLVINKEMKIEEERVPTAPLTPSSWSAIWDSGDGKGIFEVPPLSPFGAYSQLVMI

SEQ ID NO: 5723 - protein, 227 aa, Nicotiana sylvestris
MAVKNKVSNGDLKGGNVKTNGVKEVHYRGVRKRPWGRYAAEIRDPGKKSRVWLGTFDTAEEAAKAYDTAAREFRGPKAKTNFPLPSENQSTSHSSTMESSSGETGIHAPPHAPLELDLTRRLGSVAADGGDNCRRSGEVGYPIFHQQPTVAVLPNGQPVLLFDSLWRPGVVNRPQPYHVMPMAMGFNGVNAGVDPTVSDSSSVVEENQYDGKRGIDLDLNLAPPTEF

SEQ ID NO: 5724 - protein, 233 aa, Nicotiana tabacum
MYQPISTELPPTSFSSLMPCLTDTWGDLPLKVDDSEDMVIYGLLSDALTAGWTPFNLTSTEIKAEPREEIEPATIPVPSVAPPAETTTAQAVVPKGRHYRGVRQRPWGKFAAEIRDPAKNGARVWLGTYETAEEAALAYDKAAYRMRGSKALLNFPHRIGLNEPEPVRLTAKRRSPEPASSSISSALENGSPKRRRKAVAAKKAELEVQSRSNAMQVGCQMEQFPVGEQLLVS

SEQ ID NO: 5725 - protein, 236 aa, Nicotiana tabacum
MNQPIYTELPPANFPGEFPVYRRNSSFSRLIPCLTETWGDLPLKVDDSEDMVIYTLLKDALNVGWSPFNFSAGEVKSEQREEEIVVSPAETTAAPAAELPRGRHYRGVRRRPWGKFAAEIRDPAKNGARVWLGTYETDEEAAIAYDKAAYRMRGSKAHLNFPHRIGLNEPEPVRVTAKRRASPEPASSSENSSPKRRRKAVATEKSEAVEVESKSNVLQTGCQVELLTRRHQLLVS

SEQ ID NO: 5726 - protein, 203 aa, Nicotiana tabacum
HEETWGELPLKVDDSEDMVIYTLLKDALNVGWSPFNFTAGEVKSELMEEEIVVSPADTTAAPAAELPRGRHYRGVRRRPWGEFAAEIRDPAKNGARVWHRTYETDEEAAIAYDKAAYRMRGSKAHLNFPHRIGLNEPEPVRVTAKRRASPEPASSSENSSAKRRRKAVAAEKSGAVEVESKSNVLQVGCQVELLTRGHQLLVS

SEQ ID NO: 5727 - protein, 237 aa, Nicotiana tabacum
MTESSSSQSESASSDSLPFDFLSDSFDFEADFFQFGDEVSNSSSESANSVHNSTNFIMLELEPTISSSDYEKPQVIIDLTSPKLSNVSDRKPSLKIDLPPVKKFEWIGFCNSTTQSNSIVSVTMQQKRKTEEKRHYRGVRQRPWGKYAAEIRDPTRRGARVWLGTFNTAVEAAKAYDRAAFKMRGSKAILNFPLEVGKNLSYSSSAVDGGVKRRKESDACGEEKGVKKVERCKEEES

SEQ ID NO: 5728 - protein, 291 aa, Nicotiana tabacum
MASPQENCTTLDLIRQHLLDDNVFMEHYCPQPILYSQSSSSSESLNSIASELNNETFSFEPTLKYADTAQSSNLDISSFFNNSKTEFDSFEFETKPNVSAARISSNSPKQTSFKERKPSLNIAIPMKQQEVVQKVEVVPTEKKHYRGVRQRPWGKFAAEIRDPNRKGTRVWLGTFDTAIEAAKAYDRAAFKLRGSKAIVNFPLEVANFKQQDNEILQPANSGRKRMRETENEEIVIKKEVKREERVPAAAAPLTPSSWSAIWEGEDGKGIFEVPPLSPLSPHMAYSQLVMI

SEQ ID NO: 5729 - protein, 277 aa, Nicotiana tabacum
MDSSSCSSHFFYPMNSDLSSDSSWEWSNLNSTSLPFNVNDSEEMLLFGVLTNTAQETTSETVTSYHVKEEEVSSKSKVIKEIEEKPAKEKSFRGVRRRPWGKFAAEIRDSTRNGVRVWLGTFDSPEAAALAYDQAAFLMRGTSAILNFPVETVQESLRDMKCHVDEECSPVVALKKRHSLRKKSLSSKKSNSSSNSKVVREVKMENVNVVVFEDLGPDYLEQLLSSSSSDHSSCNEAFYHVNQRFTQLCIYLFIYLYYFCLFSFRGREIGEFHLFVL

SEQ ID NO: 5730 - protein, 226 aa, Nicotiana tabacum
ISDFWSSSSSSSSIAGKSDSVQSLTHSYNKPQKSDSGKLNQLEKGTISVKVEKESSGPRARKNKYRGIRQRPWGKWAAEIRDPQKGVRVWLGTFNTAEEAARAYDEAAKRIRGDKAKLNFPEPPSPPAKRHCTSTIPDQPTRSDLMSQKPASIMLNYGYENQTPYYPMEMPAAEDPQHHDYELKEQISNLESFLDLEPDSGIVDSDPLNIFLMDDFAATQQQQLFY

SEQ ID NO: 5731 - protein, 225 aa, Nicotiana tabacum
MRRGRAAAAPAPVTGEPNGSGGSKEIRFRGVRKRPWGRFAAEIRDPWKKTRVWLGTFDSAEDAARAYDAAARALRGPKAKTNFPLPYAHHHQFNQGHNPNNDPFVDSRFYPQDNPIISQRPTSSSMSSTVESFSGPRPPPAPRQQTTASSRKYTRSPPVVPDDCHSDCDSSSSVVDHGDCEKENDNDNDNIASSSFRKPLLFDLNLPPPMDDAGADDLHCTALCL

SEQ ID NO: 5732 - protein, 251 aa, Nicotiana tabacum
MIRNPVVSLMDEPKTVKFSQHIVTKNKHVPEQNENSNFHSKFLQRVVRIILTDADATDSSDDEGQDTVRRVKRHVTEINLMPSPNLICEKKRRLVSPDTDVTRRKKFRGVRQRPWGRWAAEIRDPTRGKRVWLGTYDTPEEAAIVYDAAAVKLKGPDAVTNFPKVLTADITEMESVTDRGEKSENDFALSPTSVLRNDDFTPSDDLGFCEVDAFGFDVDSLFRLPEFGLSEKYYGDEFGEFDFDDFALEAR

SEQ ID NO: 5733 - protein, 225 aa, Nicotiana tabacum
MAVKNKVSNGNLKGGNVKTDGVKEVHYRGVRKRPWGRYAAEIRDPGKKSRVWLGTFDTAEEAAKAYDTAAREFRGPKAKTNFPSPTENQSPSHSSTVESSSGENGVHAPPHAPLELDLTRRLGSVAADGGDNCRRSGEVGYPIFHQQPTVAVLPNGQPVLLFDSLWRAGVVNRPQPYHVTPMGFNGVNAGVGPTVSDSSSAVEENQYDGKRGIDLDLNLAPPMEF

SEQ ID NO: 5734 - protein, 264 aa, Solanum tuberosum
MCGGAIISDYEPAGNFYRKLSARDLWAELDPISDYWSSSSSSSTVENPYSAQSPVTHSVDKPKKSDSGKSNQLKKGNKTVKVEKEKSTGPRQRKNKYRGIRQRPWGKWAAEIRDPQKGVRVWLGTFNTAEDAARAYDEAAKRIRGNKAKLNFPAPSPPAKRQCTSTVAADPPPALLLESSNIISYNNSPLMNFGYDVQSQTPYYPMEMPVASDDYELKEQISNLESFLELEPADSSDQFSGIVDPDPLNVFLMEDFASTQHQFY

SEQ ID NO: 5735 - protein, 298 aa, Solanum tuberosum
MCGGAILYDIIPRDRRLSSTDLWPSSADFWQTSSFSKPISTQNVPPKPKRAQLSRGSEQMKKRQRKNLYRGIRQRPWGKWAAEIRDPRKRVRVWLGTFNTAEAARAYDREARKIRGKKAKVNFPNEDDDHYYSHPEPPPLNIVYESYDTTSTYNQESNNCYPFHSIENTEPVMEFAIANKNSSGSAYNGIEDQNVEGEEQTVKNSNNRIVEEEEKTEDEVQILSDELMAYESLMKFYEIPYVDGQSVAATVNPAADTEVGGGSMELWSFDDVSRLQPSYNVSLIIVLFKLLHLFSLLN

SEQ ID NO: 5736 - protein, 372 aa, Hordeum vulgare
MTVDRKGAQAAAAAAATSAPFEIPALQPGRKKRPRRSRDGPNSVSETIKRWKEVNQQLEHDPQGAKRARKPPAKGSKKGCMQGKGGPENTQCGFRGVRQRTWGKWVAEIREPNRVSRLWLGTFPTAEVAAQAYDEAARAMYGPLARTNFPVQDAQAAPAVAVPVATEGVVRGSSASCESTTTSNHSDVASSSHNKQRQIQAPEISSRSDLLESTQSVEYSQQQSVPDAVSSIAMSTSEEDVYEPLEPISNLPDGEADCFDIEELLKLMEADPVEVDPVTVGSWNEFQDAGANARGSWNEFQCARANTGVSWNANAGMEMGQQEPLYLDGLDQGMLEGMLHSDYPFPVWISEDRPMHNPAFHDAEMSEFFEGL

SEQ ID NO: 5737 - protein, 316 aa, Hordeum vulgare
MEGLQRSSSTFRRKKRPRRSRDGPNSVSETIKQWKEVKQQLEHDPQGAKRARKPPAKGSKKGCMQGKGGPENTQCGFRGVRQRTWGKWVAEIRESNRVSRLWLGTFPTAEVAAQAYDEAAKAMYGPLARTNFPVQDAQAAPTVVVQVATEGVVRGSSASCESTTTSNHSDVASSSHNKQLQIQAPEISSQSDLLESTQSVEYIQQQSVPDAVSSIAMSTSEEDVYEPLEPISNLPDGEAHCAISRCFGPRTWPETWTRRRRGCPAASSTPSSGVPAPALAPQRAEAVPSPRGGNGRRCRGSDRAMVDVMRAVFILE

SEQ ID NO: 5738 - protein, 303 aa, Oryza sativa
MLLNPASREVAALDSIRHHLLEEEEETPATAPAPTRRPVYCRSSSFGSLVADQWSESLPFRPNDAEDMVVYGALRDAFSSGWLPDGSFAAVKPESQDSYDGSSIGSFLASSSSEAGTPGEVTSTEATVTPGIREGEGEAVAVASRGKHYRGVRQRPWGKFAAEIRDPAKNGARVWLGTFDSAEEAAVAYDRAAYRMRGSRALLNFPLRIGSEIAAAAAAAAAGNKRPYPDPASSGSSSPSSSSSSSSSSSSGSPKRRKRGEAAPASMAMALVPPPPPPAQAPVQLALPAQPWFAAGPIQQLVS

SEQ ID NO: 5739 - protein, 304 aa, Oryza sativa
  unsure (1)..(304): unsure at all Xaa locations
MLLNPASREVAALDSIRHHLLEEEEETPATAPAPTRRPVYCRSSSFGSLVADQWSESLPFRPNDAEDMVVYGALRDAFSSGWLPDGSFAAVKPESQDSYDGSSIGSFLASSSSEAGXTPGEVTSTEATVTPGIREGEGEAVAVASRGKHYRGVRQRPWGKFAAEIRDPAKNGARVWLGTFDSAEEAAVAYDRAAYRMRGSRALLNFPLRIGSEIAAAAAAAAAGNKRPYPDPASSGSSSPSSSSSSSSSSSSGSPKRRKRGEAAPASMAMALVPPPPPPAQAPVQLALPAQPWFAAGPIQQLVS

SEQ ID NO: 5740 - protein, 134 aa, Oryza sativa
  unsure (1)..(134): unsure at all Xaa locations
MTARSMLRNXXPEASVLDTIRQHLLEEPXXAAAVARRRRXSFGSLVADMWSDSLPFRDDDADDMVVFGAMRDAFSCGWLPDGVFAEVKPEPLLSPDSSSYDGSXLAASASRTSRQGEAASAPAFVASGASTQGG

SEQ ID NO: 5741 - protein, 229 aa, Oryza sativa
MSLSLGFSAGAGVGADRLAAAPALQAAGALPPRVDVSLSLARAANGQPSSYLPLNENDSLDMVLFDVLREASAVAALSSSSSSSPELGARTTAPVVAGHPAGRKGGGGGGGGRGAAARGGAAGGRHYRGVRRRPWGKYAAEIRDPTRHGARLWLGTFGTAEEAAAAYDRAAFRMRGAKALLNFPPAVAGDGARRGAAAAAKQVGMSDGKIVIRKALDIPKWNTGNAGNL

SEQ ID NO: 5742 - protein, 345 aa, Oryza sativa
MDFSGDIDDLISLQLLHDQLLGVEADACLPVAVHHDGVAAFAEHQQGFHPAAFLPQQPMTMTPAGYVDMANDQYLGAHAAAGEAEAVYRAAAAEPVMIRFGGEVSPVSDPRRPPLTISLPPTSHAWAAAEAVHPAALLQAQAAAAAADPNDFRKYRGVRQRPWGKFAAEIRDPKKRGSRVWLGTYDTAIEAARAYDRAAFRMRGAKAILNFPNEVGSRGADFLAPPPPPPPPTTSTHGKRKRHETAAADPDVEVIGESSKSVKTETYTSPASSSLASTTTSTVTSSSTSPSPSSEAAACGGGGGSELFVPPMPSSWSWDQLEGFFGILSPLSPHPQMGFPEVAVN

SEQ ID NO: 5743 - protein, 345 aa, Oryza sativa; identical to SEQ ID NO: 5742

SEQ ID NO: 5744 - protein, 104 aa, Oryza sativa
  unsure (1)..(104): unsure at all Xaa locations
XIRDSAKNGARVWLGXTLDTAKDTALAYDRAAYRMRGSRALLNFPLRIGSEIAAAAAAAAAAAAGDKRPSPEPATSESSFSSSSSSSSSTSSSGSPKRRNRGEA

SEQ ID NO: 5745 - protein, 177 aa, Oryza sativa
  unsure (1)..(177): unsure at all Xaa locations
MXASSSPPPRRRRRRRISIRIRISAPHRRXLINFLESRRAGAMSTTNSSSSVSVPAMDAHGQEEEEEPMQVQQQQAFRGVRKRPWGKFAAEIRDSTRNGVRVWLGTFDSAEEAALAYDQAAFAMRGSAAVLNFPMEQEGASPVVALKRRHSMRAAAAGRRRKSAAPDRRIRKAEEGX

SEQ ID NO: 5746 - protein, 228 aa, Oryza sativa
  unsure (1)..(228): unsure at all Xaa locations
MXASSSPPPRRRRRRRISIRIRISAPHRRXLINFLESRRAGAMSTTNSSSSVSVPAMDAHGQEEEEEPMQVQQQQAFRGVRKRPWGKFAAEIRDSTRNGVRVWLGTFDSAEEAALAYDQAAFAMRGSAAVLNFPMEQVRRSMDMSLLQEGASPVVALKRRHSMRAAAAGRRRKSAAXXHRRIRKAVGNCLLIHHMWPWFVAPKTKPKEKKKSCCXFDSNXEYXQLLVV

SEQ ID NO: 5747 - protein, 281 aa, Oryza sativa
  unsure (1)..(281): unsure at all Xaa locations
MRRRAMAGFGLDQHLDLIRAHLLEDAHHHVLAPSPSPSPPGTGRVRPAPVSLPPRPPLLWAAASAAPRQQEECFELGGGYAGEGEGEEEDDFRRYRGVRQRPWGKYAAEIRDPARKGARVWLGTYDTAVEAARAYDRAAFQLRGSKAILNFPNEVAADAAVKWAPPVAPIPAAAMSAGRGKRVRSEEQYYLREVKKERLIMAPPENSSSSSSSAAAAAGDIWDELKGICSLPPLSPLSPHPHMAFPQLFVIDLAFGQILNSFVLLLLRXIDDHSSFIAICQ

SEQ ID NO: 5748 - protein, 273 aa, Oryza sativa; identical to SEQ ID NO: 5670

SEQ ID NO: 5749 - protein, 256 aa, Oryza sativa
  unsure (1)..(256): unsure at all Xaa locations
PTSSAPPPTCTSPTTHPPPPPPPPTRSRLLPSTRPPPPPPPRRPTSSPPPPQEQGRRRHYRGVRQRPWGKWAAEIRDPKKAARVWLGTFDTAEDAAIAYDEAALRFKGTKAKLNFPEXFQGPASSSPVASPPPPPTVAATTPPPAAGACPPPRQQQTVVPYPDLMRYAQLLQGGVGGSYMPFGGAATMSSSTVSSSSAPQILDFSTQQLIRAGPPSPMPSSGSGSATAAASSTTSASSPGAWPYGGSERKKKDSSS

SEQ ID NO: 5750 - protein, 177 aa, Oryza sativa
  unsure (1)..(177): unsure at all Xaa locations
XGLGKLNNEEEEEPMQEQAFRGVRKRPWGKFAAEIRDSTRNGVRVWLGTFDSAEEAALAYDQAAFAMRGSAAVLNFPMEQVRRSMDMSLLQEGASPVVALKRRHSMRAAAAGRRRKSAAPDPXXPSPSISPAAQAQATTPSDLYSYLSHAQRMHIFCTTLVLAVVNMWIRFHALIVX

SEQ ID NO: 5751 - protein, 269 aa, Oryza sativa
MTPTSTTRRKKTKDTSCSRPNLVSSPGTTGARRRGAASKKKRGRHFRGIRQRPWGKWAAEIRDPHKGTRVWLGTFNTPEEAARAYDVEARRLRGSKAKVNFPATPAAARPRRGNTRATAVPPPATAPAAAPPRGLKREFSPPAETALPFFTNGFVDLTTAAAPPPAMMMTSSFTDSVATSESGGSPAKKARSDDVDSSEGSVGGGSDTLGFTDELEFDPFMLFQLPYSDGYESIDSLFAAGDANSANTDMNAGVNLWSFDDFPIDGALF

SEQ ID NO: 5752 - protein, 180 aa, Oryza sativa
  unsure (1)..(180): unsure at all Xaa locations
XGDRSGSSFQTTATAAARRSYRGVRRRPWGKFAAEIRDTRRRGARVWLGTFATADEAALAYDMAALRMRGHRAHLNFPLATVQKHLERDLAGGRSSSDQTSTRARRRRRPRANTTTDAAARSVVFSGVQTATNCDHMVSFASEKDQVSMQECSKSDAGXXIDFEEIGGEYWDYLXPASCI

SEQ ID NO: 5753 - protein, 365 aa, Oryza sativa
  unsure (1)..(365): unsure at all Xaa locations
MCGGAIISGFIPPSAAAAAAAAVAKKQQGRRVTADVRPGMLRKGKAAAAEEDFEADFREFERGMSDDEAEGGGGEGRPCPRPRAAPPTADGMLTTKLGPTXDGPTARSAKHKRKNQYRGIRQRPWGKWAAEIRDPSKGVXRVWLGTYNTAEEAARAYDAEARKIRGKKAKVNFPDEPAVAXRSSPXSKTLPSKXKLAPPLKTCGDDAFFQLNSFCLQCLQRCLQSPAEPVDLMPPVKPLASTETFEMNMLSDTSSNSFGSSDFGWEDDTLTPDYTSVFVPTMPAYGEPAYLTGGAPKRMRGNGMPNLAQNMPTFDPEMKYLPLPYVESSSDESMDNLLQNDATQDGASNEGIWSLDELLMAAGAY

SEQ ID NO: 5754 - protein, 142 aa, Oryza sativa
  unsure (1)..(142): unsure at all Xaa locations
MASIEPSRPSSGPSLDSHSQYDPFGAAAAERHYRGVRRRPWGKWAAEIRDPNKAARVWLGTFDTAEAAAAAYDDAALRFKGAKAKLNFPERVRGRTGQGGFLVSPAGVSPAMAPRPPSTLPTTTTAASSPSAWPHGGGHGSX

SEQ ID NO: 5755 - protein, 334 aa, Oryza sativa; identical to SEQ ID NO: 5673

SEQ ID NO: 5756 - protein, 204 aa, Oryza sativa
  unsure (1)..(204): unsure at all Xaa locations
MCCTGDEVAGPGEQRRRPLDADAGGDKGAVATTSSSLLAAPMLSRRRQAEEMAAMVSALASVVAGGGGTSLPGSYCSELAAAAAAPSPAAPFPAGYVPSPGQHSPASAAAGDEEELPSPSSAEARKRYRGVRQRPWGKWAAEIRDPHKAARVWLGTFDTAEDAARAYDGAALRFRGSRAKLNFPEHATLPPPPPPPERRDTDTX

SEQ ID NO: 5757 - protein, 214 aa, Oryza sativa
  unsure (1)..(214): unsure at all Xaa locations
MCGGAIIYDYIPARRRLCASDFWPDADDXPTPTPXAPEKPPRAKRERKNQYRGIRQRPWGKWAAEIRDPVKGVRVWLGTYPTAEAAARAYDRAARRIRGAKAKVNFPNELRRRPRAGRGGGEGRPSRRAHAGRAPAAQDGGGVRGRRRLLLRRGQGAVRGAARVRELHELPRHPLHGGRRRLRRRRRGSRGARRALDLRRLRAAVASALVKMSQ

SEQ ID NO: 5758 - protein, 285 aa, Oryza sativa
  unsure (1)..(285): unsure at all Xaa locations
MCALATVHSSAGIASAAAELMADQRRRFRGGGDWQASVDDVVDDGGELEAAAAAAARGSVLSGEYQAQEMSTMVSALTWVVAAGHDDHGGGQWSGLVDVPATTLAGGGGGDYGHGAQGSYYYYGAAPTSTPEFVAGGQQEQLSSDVPQGGASLGLAMDEHSPTYTVEASSSADQHGGGGGGRRYRGVRQRPWGKWAAEIRDPHKAARVWLGTFETAEAAARAYDEAALRFRGSRAKLNFPEDARLSSPPAGAGAGGATAAAQTATTSSWSGSSQYPPPPRPPQQX

SEQ ID NO: 5759 - protein, 237 aa, Oryza sativa
  unsure (1)..(237): unsure at all Xaa locations
MCGGSILGDLHLPVRRTVNAGDLWGDAGKGRDGGDGLKKRKGSSWDFDVDCDDDDDDDFEADFEEFEDDYGDDDDVGFGDDDQESDMNGLKLAGFSTTKLGLGGSRKRKTRYRGIRQRPWGKWAAEIRDPRKGVRVWLGTFGTAEEAAMAYDVEARRIRGKKAKVNFPDAAAAXPRSGHGRSSAKHSPQQQKARSSSSSPASLNASDAVSKSNNNRVSSXXGAAPTPPPPPSPSTTX

SEQ ID NO: 5760 - protein, 362 aa, Oryza sativa; identical to SEQ ID NO: 5678

SEQ ID NO: 5761 - protein, 256 aa, Oryza sativa
  unsure (1)..(256): unsure at all Xaa locations
XGRPTPEISRRRRLAXASVDDVVDDGGELEAAAAAAARGSVLSGEYQAQEMSTMVSALTWVVAAGHDDHGGGQWSGLVDVPATTLAGGGGGDYGHGAQGSYYYYGAAPTSTPEFVAGGQQEQLSSDVPQGGASLGLAMDEHSPTYTVEASSSADQHGGGGGGRRYRGVRQRPWGKWAAEIRDPHKAARVWLGTFETAEAAARAYDEAALRFRGSRAKLNFPEDARLSSPPAGAGAGGATAAAQRPTSPANSTRKVX

SEQ ID NO: 5762 - protein, 308 aa, Oryza sativa
MCGGAILADLIPSPRSGGHTKKNKRRRISDDEDFEAAFEEFDAGDDDSDSDSESEEVDEYDVVVDDDDSEDGVVVLPPPPPPPPVIPHGEAIDRSRIERHGARRFRGVRKRPWGKWAAEIRDPVRGVRVWLGTFPTAESAARAYDAAARRLRGAKAKPNFPSAPPPSAAAHRRKKRRAHAATRSPSSPPATSEVTAASASASSDVPAPAFASFVGEPGHGGAKSMPTTSHTSQPAPPATVASENVDDPEVFDPYDVHGGLASYFAGGAYESLESLFAHGGDSAAVDQAASDHWPAALWSFADDGSFCF

SEQ ID NO: 5763 - protein, 308 aa, Oryza sativa; identical to SEQ ID NO: 5762

SEQ ID NO: 5764 - protein, 235 aa, Oryza sativa
MAPRTSDKTMSPAAAATGLALGVGGVAGAAAVGTGQHFRGVRKRPWGRYAAEIRDPAKKSRVWLGTFDTAEEAARAYDAVAREYRGAKAKTNFPYPSAPAAGVNSGSSNSSTVESFGSDRQAPMKAMPIPPSLELDLFHRAAAAAAAGAGGMRFPFEGYPVSHPYYFFGQAAAAAAASGCRMLKIAPAPVTVAALAQSDSDSSSIVDLAPSPPAALAKKAIAFDLDLNCPPPMEV

SEQ ID NO: 5765 - protein, 257 aa, Oryza sativa
  unsure (1)..(257): unsure at all Xaa locations
MAPRNAAEAVAVAVAEGGGAGMEPRFRGVRKRPWGRYAAEIRDPARKARVWLGTFDTAEAAARAYDSAALHFRGPKAKTNFPVXPSRTPTTTPRRRRCPRRRRWPSSARXSSTVESSSRDTPAAAPVAAAAKAQVPASPSLDLXPRDVGHGGRPAVPVPRPQGRAPRGGPTTQPTVWLGSCLSCGAASRSRGGFGYSRPSCFAFGSSAPMVFAVRKKNSNRRREEKEENKSKVSSLHAPPSRHQLINSTGISRSKSS

SEQ ID NO: 5766 - protein, 174 aa, Oryza sativa
  unsure (1)..(174): unsure at all Xaa locations
MCGGAIISDFIPXXREAHRAATGSKRALCASDFWPSASXRKPPTSTTSPPPAPXTPDQAAEEPTKKRERKTLYRGIRRRPWGKWAAEIRDPAKGARVWLGTFATAEAAARAYDRAARRIRGAKAKVNFPNEDXRHSTTRPPTATVLRVKMNAPRNKMQFVFKKKKKKKKKKKKX

SEQ ID NO: 5767 - protein, 396 aa, Oryza sativa
MCGGAIISGFIPPSAAAAAAAAAAKKQQGRRVTADVLWPGMLRKGKAAAAEEDFEADFREFERGMSDDEAEGGGGEEEEDDDDVVVVVPPPAAARFVVRAAAKAAPPTADGMLTTKLVQHDGPTARSAKHKRKNQYRGIRQRPWGKWAAEIRDPSKGVRVWLGTYNTAEEAARAYDAEARKIRGKKAKVNFPDEPAVAQKLSLKQNAAKQEKLAPPLKTCGDDAFFQLNSSDNDLFAMLAKVPAKPAEPVDLMPPVKPLASTETFEMNMLSDTSSNSFGSSDFGWEDDTLTPDYTSVFVPNAAMPAYGEPAYLTGGAPKRMRNNYGIAVPQGNGMPNLAQNMPTFDPEMKYLPLPYVESSSDESMDNLLQNDATQDGASNEGIWSLDELLMAAGAY

SEQ ID NO: 5768 - protein, 224 aa, Oryza sativa
  unsure (1)..(224): unsure at all Xaa locations
MALSEPDLAAETEAIVSALTHVVAYGGGGPPPSEETAASRGVRRRPWGKWAAEIRDPHRAARVWLGTFATAEDAARAYDAAALRFRGGRARLNFPEDARFLXAAADERRATDAAAAAAAASSAPAALLESQPGDVADCLDYSRILAGAPERPTSSTVPDGFFGGGGNGRFLHSWSIGTSPSPSGSGSGGAGGGGGGGGGGAPVRPLFHGGNGWEQRGDSAYNGF

SEQ ID NO: 5769 - protein, 327 aa, Oryza sativa
  unsure (1)..(327): unsure at all Xaa locations
MAAAIDMYKYNTSTHQIASSDQELMKALEPFIRSASSSSASSPXATTTTLLLLPXAKILTCPPXSYPTSSITTAAATTTSSFSQLPPLMGLTHLGPAQIQQIQAQXXLAQQQQQRALAGAFLRPRGQPMKQSGSPPRAGPFAAVAGAAQSKLYRGVRQRHWGKWVAEIRLPKNRTRLWLGTFDTAEDAALAYDKAGXFRLRGDLARLNFPTLRRXRGAHARXXPLHASVDAKLTAICQSLATSSSKNTPAESAASAAEPESPKCSASTEGEXXSVSAGSPPPPTPLSPPVPEMEKLDFXXEAPWDESETFHLRKYPSWEIDWDSILS

SEQ ID NO: 5770 - protein, 420 aa, Oryza sativa
  unsure (1)..(420): unsure at all Xaa locations
MENTIVTSIIILERKNAQLATAGYPWNIRASSNAAAAHRTPNTGIVPTSHPATSPANRKHRWTPPTRVDLLNTWRARGGTARLHPSCRHAAPDPVEAAPSVTASTLRCRNYASPRGAHSAIHSHPPTAAATISKPTNTHSHRELERGKKSFRSERLRASSSPTSPFSFPHAFAYGGGLAQQPELSPAQMHYIQARLHLQRQAAQAGPLGPRAQPMKASSSSASAAGAAATPPRPQKLYRGVRQRHWGKWVAEIRLPRNRTRLWLGTFDTAEEAALAYDQAAYRLRGDAARLNFPDXXAASRGPLHASVDAKLQTLCQNIAAAKNAKKSSVSASAAATSSAPTSNCSSPSSDDASSCLESADSSPSLSPSSAATTAETPATXXAGDAAARLQPPWDEAAAFALTKYPSYEIDWDSLLAANX

SEQ ID NO: 5771 - protein, 116 aa, Oryza sativa
  unsure (1)..(116): unsure at all Xaa locations
HESPLLSPPARGPFPIPTASIPIPISSIPELGAGMRRGGAXGGGRGGXARFRGVRKRPWGRYAAEIRDPAKKARVWLGTYDSAEDAARAYDAAARALRGAKAKTNFPLSLPHAQPX

SEQ ID NO: 5772 - protein, 153 aa, Oryza sativa
  unsure (1)..(153): unsure at all Xaa locations
MEQHRGFIGVRKRPWGRFAAEIRDSTRNGVRVWLGTFETAEAAAMAYDQAALSARGAAAALNFPVERVRESLRALALGAAGGSPVLALKGRHSKRKRRKRSELAGATATANKTTTTTSATTXXGSTSRSSSXLEDLGADYLEELLWMSEQTSH

SEQ ID NO: 5773 - protein, 368 aa, Oryza sativa
  unsure (1)..(368): unsure at all Xaa locations
GRSERRERRRRRRRWWQEVEGEGGDAHTAAAAAGDGFGGLVGGIAAAAQEDWAEXPDRLLRSASSLSTSSSAPPSPRSSSASDAPVXASSRRRRRRPRHRRRDTSSPSRTRPXTTTVGGSPRLHPLSWQQSSMSQPASPQQQQQQPLQHQQMISFGASPPCSTTQFVVPENAQQQQMLLRYWSEALNLSPRGGPGGVPPWLYQQLLRVPPPPQKLYRGVRQRHWGKWVAEIRLPRNRTRLWLGTFDTAEDAAMAYDREAFKLRGENARLNFPDRFLGKGRAGSVHGEETTTASSSNLSSRRGAVPGRNASRAGGVRRHVGCSRXESWFSTWGPGSSFWDDYDMPVTSSSSDLPPQGTPQTPTFMWKED

SEQ ID NO: 5774 - protein, 105 aa, Oryza sativa
  unsure (1)..(105): unsure at all Xaa locations
XHASAHSSVPLPAPPTPPRQQQMIGVRKRPWGKFAAEIRDSTRKGARVWLGTFDSPEAAAMAYDQAVFSVRGAFAVLNFPLHRVXQESLPDSPSGAAREGIARVX

SEQ ID NO: 5775 - protein, 329 aa, Oryza sativa; identical to SEQ ID NO: 5682

SEQ ID NO: 5776 - protein, 408 aa, Oryza sativa
  unsure (1)..(408): unsure at all Xaa locations
MASGAGELCYKRAPMASLTPPRPPFPLSPTHTPRSTAILPPPPPPSPSPRTPTATVSSSEVRKALDLSDFERLQGKVFSKPSSSSSSSGSPTCSSTVSWLGCLQRARDPGXLLDPGLPDLLFFXXSSSLCSSVRLVAKRGSFSTPHLLDLPPKSHLPTSPFSFPHAFAYGGGLAQQPELSPAQMHYIQARLHLQRQAAXXAGPLGPRAQPMKASSSSASAAGAAATPPGPQKLYRGVRQRHWGKWVAEIRLPRNRTRLWLGTFDTAEEAALAYDQAAYRLRGDAARLNFPDNAASRGPLHASVDAKLQTLCQNIAAAKNAKKSSVSASAAATSSAPTSNCSSPSSDDASSCLESADSSPSLSPSSAATTAETPATVPDSEAPWDEAAAFALTKYPSYEIDWDSLLAAN

SEQ ID NO: 5777 - protein, 286 aa, Oryza sativa
  unsure (1)..(286): unsure at all Xaa locations
MVSALARVVAGGAAAAARGVQERRREEQAMHELXRDTPAGARHRRSWIGAELGPQSASAATMDEHHSPVGGGGNAEGPDTPRRRYRGVRQRPWGKWAAEIRDPHKAARVWLGTFETAEAAARAYDEAALRFRGSRAKLNFPEDARLYPXPPPPMLLQGRLTTATPNQGTLLPFWRRRRWLHDQSLRRRWRRRHERLPRXPTTLSLPPLFPWPPSPPPPPPRRATTTRPTAARTRACRRRRSGTGRTPWSTRRRRRHGRSRAITTTRRRRTRSSRRILSCSLSLLEE

SEQ ID NO: 5778 - protein, 373 aa, Oryza sativa; identical to SEQ ID NO: 5683

SEQ ID NO: 5779 - protein, 267 aa, Oryza sativa
  unsure (1)..(267): unsure at all Xaa locations
MTEKVIPAMAAARQDSCKTKLDERGGSHQAPSSARWISSEQEHSIIVAALRYVVSGCTTPPPEIVTVACGEACALCGIDGCLGCDFFXGPRRRXNEEAVMATDYAAAAAAAAVAGGSGGKRVRRRRKKNVYRGVRHRPWGKWAAEIRDPRRAVRKWLGTFDTAEEAARAYDRAALEFRGARAKLNFPCSDPCPAKETAMAASDDNGRADDSDSVAVQRGCRGDDDAGGLADGRGRSRQQPALGWLAGPDEAGXSGHLVPAIFRARFL

SEQ ID NO: 5780 - protein, 117 aa, Oryza sativa
  unsure (1)..(117): unsure at all Xaa locations
XSKLVRFHCNPTPPHAAASAKPTARFRGVRQRPWGRFAAEIRDPHLRRRLWLGTFDTAEEAAAAYDAASVRLRGSSAATNFASVRCYSLPLELPKPTISPPEAAVRPITLPKKKKKK

SEQ ID NO: 5781 - protein, 191 aa, Oryza sativa
  unsure (1)..(191): unsure at all Xaa locations
YHLLSPLSSPQTPTHHRRRAGMEPRFRGVRKRPWGRYAAEIRDPARKARVWLGTFDTAEAAARAYDSAALHFRGPKAKTNFPVASSSRDTPAAAPVAAAAKAQVPASPSLDLSLGMXGHGGRPAVPVPRPQXVAVTVAVAAPVPRRPAVVSVKKEVARLDEQSDTGSSSSVVDASPAVGVGLDLNLPPPIE

SEQ ID NO: 5782 - protein, 170 aa, Oryza sativa
MPNDMQKLIAEVRQLSLNSTQVERVSGRNRSIDIMDGDGGGGWDDQGNGGGETTKYRGVRRRPSGKFAAEIRDSSRQSVRVWLGTFDTAEEAARAYDRAAYAMRGHLAVLNFPAEARNYVRGSGSSSSSRQHQQRQVIELECLDDQVLQEMLKGGDDQYRSAAGSKRNNY

SEQ ID NO: 5783 - protein, 467 aa, Oryza sativa
MAPEVWMDCLLWARWSYWSGCMWQMPPGDEHGDRGSDHCEDRAHAVRPRVRPRVEPIEGKKKRKRKEKKEEEERTRTLAYHFAPLRKQSTTASAARAHRRRAMCGGAIIHHLKGHPEGSRRATEGLLWPEKKKPRWGGGGRRHFGGFVEEDDEDFEADFEEFEVDSGDSDLELGEEDDDDVVEIKPAAFKRALSRDNLSTITTAGFDGPAAKSAQRKRKNQFRGIRHRPWGKWAAEIRDPRKGVRVWLGTFNSAEEAARAYDAEARTIRGKKPKVNFPEAPTTAQKRRAGSTTAKAPKSSVEQKPTVKPAFNNCANAMAFVYPSANFTSNKPFVQPDNMPFVPAMNSAAPIEDPIINSEQGSNSFGCSDFGWENDTKTPDITSIAPISTIAEVDESAFIKSSTNPMVPPVMENSGVDLPDLEPNMRFLLDDGGGDSIDSLFNLDGSQDVVSNMDLWSFDDMPVSDFY

SEQ ID NO: 5784 - protein, 235 aa, Oryza sativa
MAPRAATVEKVAVAPPTGLGLGVGGGVGAGGPHYRGVRKRPWGRYAAEIRDPAKKSRVWLGTYDTAEEAARAYDAAAREFRGAKAKTNFPFASQSMVGCGGSPSSNSTVDTGGGGVQTPMRAMPLPPTLDLDLFHRAAAVTAVAGTGVRFPFRGYPVARPATHPYFFYEQAAAAAAAEAGYRMMKLAPPVTVAAVAQSDSDSSSVVDLAPSPPAVTANKAAAFDLDLNRPPPVEN

SEQ ID NO: 5785 - protein, 365 aa, Oryza sativa
MCGGAIIHHLKGHPEGSRRATEGLLWPEKKKPRWGGGGRRHFGGFVEEDDEDFEADFEEFEVDSGDSDLELGEEDDDDVVEIKPAAFKRALSRDNLSTITTAGFDGPAAKSAQRKRKNQFRGIRHRPWGKWAAEIRDPRKGVRVWLGTFNSAEEAARAYDAEARTIRGKKPKVNFPEAPTTAQKRRAGSTTAKAPKSSVEQKPTVKPAFNNCANAMAFVYPSANFTSNKPFVQPDNMPFVPAMNSAAPIEDPIINSEQGSNSFGCSDFGWENDTKTPDITSIAPISTIAEVDESAFIKSSTNPMVPPVMENSGVDLPDLEPNMRFLLDDGGGDSIDSLFNLDGSQDVVSNMDLWSFDDMPVSDFY

SEQ ID NO: 5786 - protein, 235 aa, Oryza sativa; identical to SEQ ID NO: 5784

SEQ ID NO: 5787 - protein, 154 aa, Oryza sativa
RVAETCLSLAVAAADPSVKAQRKHRLSLVEANGAGHGSGRRRWSSGRWAREAHYRGVRKRPWGRYAAEIRDPWKKTRVWLGTYDTPVEAALAYDRAAVALRGVKARTNFGSGSSAAAASPPHAPAAAAAGPWSLRRARHQPPFAVALCLLPGEG

SEQ ID NO: 5788 - protein, 243 aa, Oryza sativa
  unsure (1)..(243): unsure at all Xaa locations
MPPARLRFVPSLVPPRHSPSRTRSRTVAGWPSSQSSARPRCTTSRPASTSSARPQKLYRGVRQRHWGKWVAEIRLPRNRTRLWLGTFDTAEEAALAYDQAAYRLRGDAARLNFPDXXAASRGPLHASVDAKLQTLCQNIAAAKNAKKSSVSASAAATSSAPTSNCSSPSSDDASSCLESADSSPSLSPSSAATTAETPATXXAGDAAARLQPPWDEAAAFALTKYPSYEIDWDSLLAANXHHH

SEQ ID NO: 5789 - protein, 223 aa, Oryza sativa
  unsure (1)..(223): unsure at all Xaa locations
XPRVRPRVRPRVRSQRLVTSRSRRPRRRRRXRKTAYRGIRRRPWGRWAAEIRDPRKGARVWLGTYATAEEAARAYDVVARDIRGAKAKLNFPPXHPPPPXPPPXPRSDAKPPPRRTTTTTTTSRRAQAPRRRRRCLPPRRRPXEHQLRECMSGLEAFLGLXXEEEDDGGAGEPWDAVDMMLEXARREWQRCHAHASKLIHACSSKIYNFSTTTMLITTYCVGK

SEQ ID NO: 5790 - protein, 236 aa, Oryza sativa
  unsure (1)..(236): unsure at all Xaa locations
VWISTSSPRRRRRRRRRRGGSSSSSSSGSRRGVEEGTRRXYLGVRRRPWGRYAAEIRDPATKERHWLGTFDTAEEAAVAYDRAARTIRGAAARTNFAYPDLPPGSSLTPYLSPDXSPPTXPPPPPTAPAPAPTPXTAAALPAPAQPAHGGDAQEMAYGGGGGQNXWVACSTSSAAAAARPSELEFGGYDDAGASAAAADFEEGYVHSPMFSPMPAADEVAADGFQLGGSSSSSYYY

SEQ ID NO: 5791 - protein, 321 aa, Oryza sativa; identical to SEQ ID NO: 5686

SEQ ID NO: 5792 - protein, 207 aa, Oryza sativa
  unsure (1)..(207): unsure at all Xaa locations
MALGGAVEYGQLVHGAAAPVAPAKLYRGVRQRHWGKWVAEIRLPRNRTRLWLGTYDTAEDAALAYDGAAFRMRGDAARLNFPELRRGGRHHAPXXLSASVDAKILQATTTTTADTAAADRRRRTPRRRRRRASSRPXPGCCSVSEASTTTTADAADVSSTGSSPSPTSSNQAATATPPAPRPPPPLPETFALRRYPSWEIDWDAILS

SEQ ID NO: 5793 - protein, 208 aa, Oryza sativa
  unsure (1)..(208): unsure at all Xaa locations
PRAEFGRGSSFFYPPRPSSPRGEAAAPRYRGVRKRPWGRFAAEIRDPAKRARVWLGTYDSAEAAARAYDVAARNLRGPARQNQLPARLLPPAPVAPLXXPPREGGGGGAAXVAGPACSASSTVESSSGPRGPRPAATAAAVPRRRVPRPAPPAPDAGCHSDCASSASVVDDADDASTVRSRVAAFDLNLPPXXLDRDHVDXXCTDLRL

SEQ ID NO: 5794 - protein, 191 aa, Oryza sativa
LTIGKAAPPAPQKLYRGVRQRHWGKWVAEIRLPRNRTRLWLGTFDTAEEAALTYDQAAYRLRGDAARLNFPDNAASRGPLDAAVDAKLQAICDTIAASKNASSRSRGGAGRAMPINAPLVAAASSSSGSDHSGGGDDGGSETSSSSAAASPLAEMEQLDFSEVPWDEAEGFALTKYPSYEIDWDSLLNNNN

SEQ ID NO: 5795 - protein, 367 aa, Oryza sativa; identical to SEQ ID NO: 5687

SEQ ID NO: 5796 - protein, 312 aa, Oryza sativa; identical to SEQ ID NO: 5689

SEQ ID NO: 5797 - protein, 292 aa, Oryza sativa; identical to SEQ ID NO: 5690

SEQ ID NO: 5798 - protein, 224 aa, Oryza sativa
  unsure (1)..(224): unsure at all Xaa locations
MSRRSYSACAARARRAAASPXAPPLPMKRHGAVAVAAAAAARAPVKLYXRGVRQRHWGKWVAEIRLPRNRTRLWLGTFDTAEEAALAYDSAAFRLRGESARLNFPELRRGGAHLGPPLHAGVDAKLHAICHGMDLPQPQPQTQSNATTTTMSTTATNTPSPFFSSESPVVKSEPVCSASESSSSADGDVSSTGSSDSEAPWDESESFLLHKYPSLEIDWDAILS

SEQ ID NO: 5799 - protein, 154 aa, Oryza sativa
  unsure (1)..(154): unsure at all Xaa locations
XTPSITCKDNSNYLNQIRQKHHKYRGVRQRPWGRWASEIRDPVKGARVWLGTFDTAVEAARAYDAEARRIHGHKARTNFPPDEPPLPAPSPLIRVRRRSASCSTTTTTTTAWPVETARRRRRRRTEPPLARRRRRWRPASEAMSSYCWSAAPTT

SEQ ID NO: 5800 - protein, 326 aa, Oryza sativa
MCGGAILADFTPARVPRRLTAAELLPVTPTPPAAERRTTRKRKSDVDFEAEFELFEDDDDDDEFELSDDGDESLAVSCVSSPKSKAVPSFSFSSDVSSSSRPRRRVAAAAAGRRKASKKSKYRGVRLRPSGRFAAEIRDPKKGRRVWLGTYGSAEEAAMAYDREARRIRGKGARLNFPRDGDGSPRRSNDRPCWTIDLNLPAAAVSGDDDDAMAVDAADADAGSAGRAAAYADQEALSAAKCKIKQCPRDEQMASATPELMEEDASSSRNMVPLSMALQLQYAAMIAECDREMEEIAAVERDLERRRRQVFERRGHLVRQASLLLD

SEQ ID NO: 5801 - protein, 73 aa, Oryza sativa
  unsure (1)..(73): unsure at all Xaa locations
XHNNGVNRRPWGKYKVKIRDQTRHGARLWLGTFGTPEKAAAAYDRAAFRMRGAKAMLHLPPAVAGDGARRGAA

SEQ ID NO: 5802 - protein, 211 aa, Oryza sativa
  unsure (1)..(211): unsure at all Xaa locations
FHRSKHISPRPISIRQVSTAARAPVKLYRGVRQRHWGKWVAEIRLPRNRTRLWLGTFDTXEEAALAYDSAAFRLRGESARLNFPELRRGGAHLGPPLHAGVDAKLHAICHGMDXXPQPQPQTQSNATTTTMSTTATNTPSPFFSSESPVVKSEPVCSASESSSSADGDVSSTGSSDVVPEMQPPWDESVLHKYPSLEIDWDAILSXMQWLN

SEQ ID NO: 5803 - protein, 93 aa, Oryza sativa
  unsure (1)..(93): unsure at all Xaa locations
HTPSITCKERSYPYRGVRQRPWGRWASEIRDPVKGARVWLGTFDTAVEAARAYDAEARRIHGHKARTNFPPDEPPLPAPSPLLINECKYLXKX

SEQ ID NO: 5804 - protein, 189 aa, Oryza sativa
  unsure (1)..(189): unsure at all Xaa locations
AAASVQGGLXSRFSFLGFLICSLLAAMSAEQSSPGSSRRRPLRQEEEDDDDVVVVVPPPAAARFVVRAAAKAAPPTAXXGMLTTKLVQHDGPTARSAKHKRKNQYRGIRQRPWGKWAAEIRDPSKGVRVWLGTYNTSXEEAARAYDAEARKIRGKKAKVNFPDEPAAAQKLSREQNARKQEKLAPPLET

SEQ ID NO: 5805 - protein, 323 aa, Oryza sativa
  unsure (1)..(323): unsure at all Xaa locations
MAAGYSDGGGGGWARRRWGTGVAAAGDSDGGGDGGDGGRAQQRRGTATATSEQSCLRTLPPASFPGEVRSAVSSLLLSPGGSALDTVFSHLPPPVTIPPLGSSVYYRQSELLRHFAASQAAXRRRAPPPPPARRRAAAAGLDDGAPRKLYRGVRQRQWGKWVAEIRLPQNRVRVWLGTYDSPETAAHAYDRAAFKLRGEYARLNFPGVMDGRDCXXDNLRQLRDAVDAKIQAIRVRIKRARARRQREESKKSQRAEDAKAATPSRPVASEPASETTTTTTTTSSSYGSPDGVLSMSAASVDGDCPLERMPSFDPELIWEMLNF

SEQ ID NO: 5806 - protein, 301 aa, Oryza sativa
  unsure (1)..(301): unsure at all Xaa locations
XGEAGEAEDDDVAGRASQGVLPXRAAAQATAGNGAVAAAAAVEGEINTDGLAALAVEAXRVLRPQTGRAGWRRPSRERERVSSGRXVVEGEEGLTAELLVAAERKYRGARKRPWGKYAAEIRIRNMKERVWLGTFGTAEEAAWAYDTAATVIHGDKATTNFPRAPLRPATTPSRRRRAAAAAAPSAPASEAPPPPPPSSALVPEXRATSXKAAVESAGAGVDXGRGGGRGGRRGRGRTPARVVAEDSPMLQATTPAAAPAPAPAXGTCTGQSSHLPADDHHDILSSSFWQDPAGDGEDTQX

SEQ ID NO: 5807 - protein, 326 aa, Oryza sativa
MCGGAILADFTPARVPRRLTAAELLPVTPTPPAAERRTTRKRKSDVDFEAEFELFEDDDDDDEFELSDDGDESLAVSCVSSPKSKAVPSFSFSSDVSSSSRPRRRVAAAAAGRRKASKKSKYRGVRRRPSGRFAAEIRDPKKGRRVWLGTYGSAEEAAMAYDREARRIRGKGARLNLLRDGDGSPRRSNDRPCWTIDLNLPAAAVSGDDDDAMAVDAADADAGSAGRAAAYADQEALSAAKCKIKQCPRDEQMASATPELMEEDASSSRNMVPLSMALQLQYAAMIAECDREMEEIAAVERDLERRRRQVFERRGHLVRQASLLLD

SEQ ID NO: 5808 - protein, 595 aa, Oryza sativa
MCGGAILADFTPARVPRRLTAAELLPVTPTPPAAERRTTRKRKSDVDFEAEFELFEDDDDDDEFELSDDGDESLAVSCVSSPKSKAVPSFSCTMRWRNLACFLEGFSPDGNLNFTRFLLLLLISSIAGGSFVGCLLELQAAAARGGGGGRSSEGEQEEQVQGRRRRPSGRFAAEIRDPKKGRRVWLGTYGSAEEAAMAYDREARRIRGKGARLNFPRDGDGSPRRSNDRPCWTIDLNLPAAAVSGDDDDAMAVDAADADAGSAGRAAAYADQEALSAAKCKIKQCPRDEQMASATPELMEEDASSSRNMVPLSMALQLQYAAMIAECDREMEEIAAVERDLERRRRQWQGLVLFSNKSSIKFLIHAARFSTAKWVSREIYSSIRALGFPEMASEQAAESYTVEELVAVNPYNPDILNDLEGFVNDQVSNQTYNLDANLSLLRLYQFEPERLSVQIVSRILIKQMEEQFKTLIVLSHYLETARFRQFWDEASKNRNILDVVPGFEQAIQSYAIHVLSLTYQKVPRPVLAEAINIEGLALDKFLEHHIANSGWVIEKGARSQLIVLPRNEFNHPELKKNTAETVPFEHVTRIFPVLS

SEQ ID NO: 5809 - protein, 247 aa, Oryza sativa
  unsure (1)..(247): unsure at all Xaa locations
GVLGAAEAGEPAVAAVVADEXSGRRRGAXRRRAQEPGRFLGVRRRPWGRYAAEIRDPTTKERHWLGTFDTAQEAALAYDRAALSMKGAQARTNFVYTHAAYNYPPFLAPFHAPQYAAAAAAPSSVQYGGGVGAAPHIGSYGHHHXPPPPPRTWXAASGASSVGECSTMPVMVPVDPHRSSMSSSLLDMDRNGHDFLFSXXADDNSGYLSSVVPESCLRPRGGGAAADHQDMRRYSTPTLHSASSPIX

SEQ ID NO: 5810 - protein, 160 aa, Oryza sativa
  unsure (1)..(160): unsure at all Xaa locations
XARGELIPSAPSSRCVTGGHVWPVAVYNAKKKGARPADLKTAFQDFYNDSDDEEMMLEESEEEEATSEHKPFVFRAKKQTSAASSRCRKPAQYRGVRRGPWVKWSAEIRDPVKGXIRVWLGTFTNTEAAALAYEEAARAIRGDRAKLNFPSATTPDTRKX

SEQ ID NO: 5811 - protein, 182 aa, Oryza sativa
MRRRVSSSSSSSSSSSPARHHKARRSRRKLAVDEDWEAAFREFLSRDHDDDDDDHDGQHVVVAPLIRGSDKCVHGHEVVASTVGGGASGGRRRADDDDGERRRRRRREKRSYPYRGIRQRPWGRWASEIRDPVKGIRVWLGTFDTAEGAARAYDDEVRRIYGGNAKTNFPPSPPRLSTLIRV

SEQ ID NO: 5812 - protein, 225 aa, Oryza sativa
MDDSSFGSEPTTSSSGGEAPASPPSTASSSSDGAGGKKKRPRKDGHHPTYRGVRMRSWGKWVSEIREPRKKSRIWLGTFATAEMAARAHDVAALAIKGRAAHLNFPDLAHELPRPATAAPKDVQAAAALAAAADFPASSANAGASNNPDGSDDASAGSASPPPPPDAADDALFDLPDLLLDLRYGPPSSGLSCASSWEDEVGLISGAGAAAAGVFRLEEPLLWEY

SEQ ID NO: 5813 - protein, 225 aa, Oryza sativa; identical to SEQ ID NO: 5812

SEQ ID NO: 5814 - protein, 93 aa, Oryza sativa
  unsure (1)..(93): unsure at all Xaa locations
XSCGRTRGLCTMAIVGFDGPAAKLAKRKRKNQFRGIRQRPWGKWAAEIRDPRMGVRVWLGSFNSAVEAVRAYDAEALKICGKKAKVNFTEASX

SEQ ID NO: 5815 - protein, 182 aa, Oryza sativa
  unsure (1)..(182): unsure at all Xaa locations
MARPQQRYRGVRQRHWGSWVSEIRHPLLKTRIXWLGTFETAEDAARAYDEAARIMCGPRARTNFPLADATAAAAAAAASSSFLSAALVAKLHRFNLASVQATQRQREAAATAAAASSASATTPPLGNAAAADDDARTTTTYGAEWSGRFLEEQHVEQMIDELLDYFSMEICSLCDTHTHTLF

SEQ ID NO: 5816 - protein, 130 aa, Oryza sativa
  unsure (1)..(130): unsure at all Xaa locations
PSTPSPPPPPSEPPRLALAHQAPARAHVHPAMRKSKQPQPQPSPEIRYRGVRKRPSGRYAAEIRDPAKKTPIWLGTFDSAEVAARAYDDAARSLRGPTARTNFPLXPRRPRPRPGRRRRQRRPPRPATAA

SEQ ID NO: 5817 - protein, 47 aa, Oryza sativa
  unsure (1)..(47): unsure at all Xaa locations
XGKHYRGVRQRXWGKFAAXIRDXAKNGARXXLGTFDTXEDAAXAYDX

SEQ ID NO: 5818 - protein, 237 aa, Oryza sativa
MQRIKSEIERSIETKAVRGGGGGEKRGRSGDGGRHPSYRGVRMRAWGKWVSEIREPRKKSRIWLGTFPTPEMAARAHDAAALVVKGPAAVLNFPDMAASLPRPASASPRDVQAAAARAAAMEPPQPPPSSLTVQADSAAAASPKNGGVSGAGAADDELEAIVELPRLDELDAAELVFGAAFQDTAAEHPWCDPVWIDGGYAAAAAAAAAAAAHDDLFGLDADHHGWAQSVGALLWNL

SEQ ID NO: 5819 - protein, 74 aa, Oryza sativa
  unsure (1)..(74): unsure at all Xaa locations
XHEDPKKRGSRVWLGTYDTAIEAARAYNRAAFRMRGAKAILNFPNEVGSRGADFLAPPPPPPPPITSTHGKRKX

SEQ ID NO: 5820 - protein, 372 aa, Oryza sativa
RWIRGRRRRRSCRRLEMPPVQPGRKCGGEERAGTSLLPETIKRWAELNNQQDDPQGPKKARNEPAKGSKKGCMKGKGGPENTRCDFRGVRQRTWGKWVAEIREPNRQSRLWLGTFPTAEAAACAYDEAARAMYGPMARTNFGQHHAPAASVQVPVAQAAVKCALPGGGLTASKSRTSTQGASADVQDVLTGGLSACESTTTTINNQSDVVSTLHKPEEVSEISSPRGAPPAVLEDGSNEDKAESVTYDENIVSQQRAPPEAEASNGRGEEVFEPLEPIASLPEDQGDYCFDIDEMLRMMEADPTNEGLWKGDKDGSDAILELGQDEPFYYEGVDPGMLDNLLRSDEPAWLLADPAMFISGGFEDDSQFFEGL

SEQ ID NO: 5821 - protein, 145 aa, Oryza sativa
  unsure (1)..(145): unsure at all Xaa locations
CSXHERPQARRIQHHEAGPRQQQEXRTTRRRGIRQRPWGKWAAAITDPSKGMRGWLGTFGTGEDGVMAYDMKARRIRRKKAKVNLRDTVADGPKRPRRSSAKHSPHKQKARSSAPSTASLNASDANQDQQQPGQLGWEQDRHYRX

SEQ ID NO: 5822 - protein, 217 aa, Oryza sativa
  unsure (1)..(217): unsure at all Xaa locations
XGFPHASLPRSDLAAAAASLYSRVAPEADRSNVXPRAAAGSSGKHPFYRGIRSRSGKWVSEIREPRKARRIWLGTFPTAEMAAVAYDVAARALRGPDAALNFPDLAASRTAPPASSSADDIRAAAAAAAASLQHDRAGGGIAXLPPLDGGAQQEGSSGAGAGSHQYFLDEEALFETPQFLRNMAAGMMMSPPRLSPSSSDDSPESEAGGSLWSYRDP

SEQ ID NO: 5823 - protein, 252 aa, Oryza sativa
GQSKKKFRGVRQRHWGSWVSEIRHPLLKRRVWLGTFETAEEAARAYDEAAILMSGRNAKTNFPVARNATGELTPAAAGSGSSSSMTANGGGNSLSQILSAKLRKCCKTPSPSLTCLRLDPEKSHIGVWQKRAGARADSSWVMTVELNKAVSSSDQPTPSDSTVTTTSTSTTGSPSPPPPAMDDEERIALQMIEELLGRSGLVALLFLSDYLLDFHQKKMRNMMKVIFVNKTCFLNGFKRKKDMLYRIILLQS

SEQ ID NO: 5824 - protein, 315 aa, Oryza sativa; identical to SEQ ID NO: 5695

SEQ ID NO: 5825 - protein, 105 aa, Oryza sativa
MVQPKKKFRGVRQRHWGSWVSEIRHPLLKRRVWLGTFETAEEAARAYDEAAVLMSGRNAKTNFPVQRNSTGDLATAADRDARSNGGSRNSSAGNLSQILSAKLRK

SEQ ID NO: 5826 - protein, 228 aa, Oryza sativa
  unsure (1)..(228): unsure at all Xaa locations
MGQSKKKFRGVRQRHWGSWVSEIRHPLLKRRVWLGTFETAEEAARAYDEAAILMSGRNAETNFPVARNATGELTPAAAGSGSSSSMTANGGGNSLSQILSAKLRKCCKTPSPSLTCLRLDPEKSHIGVWQKRAGARADSSWVMTVELNKAVSSSDQPTPSDSTVTTTSTSTTGSPSPPPPAMDDEERIALQMIEELLGRSGPGSPSHGLLHGGEGSLVICMYKTSXSL

SEQ ID NO: 5827 - protein, 180 aa, Oryza sativa
  unsure (1)..(180): unsure at all Xaa locations
TTSSSGGEAPASPPSTASSSSDGAGGKKKRPRKDGHHPTYRGVRMRSWGKWVSEIREPRKKSRIWLGTFATAEMAARAHDVAALAIKGRAAHLNFPDLAHELPRPATAAPKDVQAAAALAAAAXFPASSXXSASPPPPPDAADDALFDLPDLLLDLRYGPPSSGLSCASSWEDEVGLISG

SEQ ID NO: 5828 - protein, 287 aa, Oryza sativa
MEAAAIHAPTTTTSSDSGSCVTNGTREKREISKHKQLKRKRSTSPAPPPGCGGGQGQEAAVETDADAGAAGEEESSSCGGAGAGEGERKRGDAGRHPSYRGVRRRSWGKWVSEIREPRKKSRIWLGTFPTAEMAARAHDVAALAIKGRAAHLNFPSLAHTLPRPASTSPSDIQAAAALAAAAAATDQCESSSSAVAAATATDAEAAESTSSAAASPCAATSSVEENALFDLPDLLLDLSDGLWCSPVWTTAPADQYDAGDDGDDAAAPLLWAEQCWMDAPAAPVQPD

SEQ ID NO: 5829 - protein, 287 aa, Oryza sativa; identical to SEQ ID NO: 5828

SEQ ID NO: 5830 - protein, 199 aa, Oryza sativa
  unsure (1)..(199): unsure at all Xaa locations
MDDSSFGSEPTTSSSGGEAPASPPSTASSSSDGAGGKKKRPRKDGHHPTYRGVRMRSWGKWVSEIREPRKKSRIWLGTFATAEMAARAHDVAALAIKGRAAHLNFPDLAHELPRPATAAPKDVQAAAALAAAAXFPASSANAGASNNPDGSDDASXRYGPPSSGLSCASSWEDEVGLISGAGAAAAGVFRLEEPLLWEY

SEQ ID NO: 5831 - protein, 274 aa, Oryza sativa
  unsure (1)..(274): unsure at all Xaa locations
MEADASHTPTTSSSSSTSSLVDNGAQDRPKSSKPKHAAKKRKRAAAEEPANAAHGAGEDTSSCSTDDNAAASGKAQAGGGGGGVDSXAAPAPPPRRRGAAXKHPSYRGVRRRSWGKWVSEIREPRKKSRIWLGTFPTAEMAARAHDVAALAIKGRNAHLNFPDSAHELPRPESTSPADIQAAAAKAAAEVRCEEESSPSSSPTAEQPEEEAXXALTRCTPTAAXDNALFDLPDLLLDLRDGLWWSPVWPAALAAEEYDGGDAVVLNEPLLWAEX

SEQ ID NO: 5832 - protein, 152 aa, Oryza sativa
TTTPQQMMMRRRRARASSEYLGVRRRPWGRYAAEIRNPYTKERHWLGTFDTAEEAAVAYDLSAISISGAAAARTNFLYPDMHHHHPSPPQHALSPAVPPPPPPPPPSPLYDDDYLSPAAAEEEVEAGDDESLTIATILQSFQYQQSVPPASS

SEQ ID NO: 5833 - protein, 233 aa, Oryza sativa
MQGEYHRSSSEDSAASAAAAAAAAAAAMAPLAAAAAAVAAKEEQAAAAAVLPLQQQQPRRQYRGVRMRKWGKWVAEIREPHKRTRIWLGSYATPVAAARAYDTAVFYLRGRSARLNFPEEISSLASLSEGGGASEPREPDGGTLSAASIRKKAIEVGSRVDALQTGMMVAPHGEEQHHHHEQKHQRTAWSGRAKNPDLNQAPSPENSDADRSQQNRLRAAKIDQRLRQHAASV

SEQ ID NO: 5834 - protein, 216 aa, Oryza sativa
  unsure (1)..(216): unsure at all Xaa locations
MARLTTLITSTSLPPQPRAHSSLSRRERALSLAATTRNPSPSSRTSAMARPQQRYRGVRQRHWGSWVSEIRHPLLKTRIWLGTFETAEDAARAYDEAARIMCGPRVRTNFPHDPHSAAAASSSFLSAALVAKLHRFNLASVQAAQRGNSNDDDSTTSSSAAASSRAVIPSLPAAAGALGNAXXATAEWSGGFLEEQYVDQMIEELLDYFSMEISCX

SEQ ID NO: 5835 - protein, 198 aa, Oryza sativa
  unsure (1)..(198): unsure at all Xaa locations
XGTEGVEENXFQPCHTTTNHLKQKIEKKNRKKRPGPQTSGRHPTYRGVRMRSWGKWVSEIREPRKKSRIWLGTFATAEMAARAHDVAALAIKGRTAHLNFPDLAHLLPRPATAAPKDVQAAALLAAAAADFPSVSVDANAKSPDTCSVASAASPQPPPPDAEADPALFDLPDLLLDLRYGPRASRLFLALLDLGDKNX

SEQ ID NO: 5836 - protein, 176 aa, Oryza sativa
  unsure (1)..(176): unsure at all Xaa locations
MARPQQRYRGVRQRHWGSWVSEIRHPLLKTRIWLGTFETAEDAARAYDEAARIMCGPRVRTNFPHDPHSAAAASSSFLSAALVAKLHRFNLASVQAAQRGNSNDDDSTTSSSAAASSRAVIPSLPAAAGALGNAXXATAEWSGGFLEEQYVDQMIEELLDYFSMEISSDVPCSSTC

SEQ ID NO: 5837 - protein, 338 aa, Oryza sativa; identical to SEQ ID NO: 5696

SEQ ID NO: 5838 - protein, 167 aa, Oryza sativa
  unsure (1)..(167): unsure at all Xaa locations
XGKHPFYRGIRSRSGKWVSEIREPRKARRIWLGTFPTAEMAAVAYDVAARALRGPDAALNFPDLAASRTAPPASSSADDIRAAAAAAAASRAAARTTAGSGGAQQEGSSGAGAGSHQYFLDEEALFETPQFLRNMAAGMMMSPPRLSPSSSDDSPDPSDGGSLWSYR

SEQ ID NO: 5839 - protein, 163 aa, Oryza sativa
  unsure (1)..(163): unsure at all Xaa locations
LVDPRAAGRASPLRGDPYRGVRMRKWGKWVAEIREPHKRTRIWLGSYATPVAAARAYDTAVFYLRGRSARLNFPEEXLLAGFAVRGXGGAGGEADGGTLSAASIRKKAIEVGSHVDALQTGMMVAPTHHREQQKXXSHHPHLQPHGEEQHHHDIFVCKKKKKX

SEQ ID NO: 5840 - protein, 119 aa, Oryza sativa
  unsure (1)..(119): unsure at all Xaa locations
CQRMTKYKGVRQRHWGSWVAEIRHPLLKTRIWLGTYGTAEDAARAYDEAARLMSGPAARTNFPLSSSGXXNARSCLSPTLRARLEKCCGAGSSALDALLLCSSSRASDHPFPSSPNVGX

SEQ ID NO: 5841 - protein, 275 aa, Oryza sativa
  unsure (1)..(275): unsure at all Xaa locations
MELNFQVQPPVFQLQDYCYYYSQEVAAAASPAAKPTKPRGRKKGSTSHSKFVGVRQRPSGRWVAEIKDTTQKIRMWLGTFETADAAARAYDEAARLLRGAEARTNFAPRISPDCPLAVRIRGILHHKKLKKARSAAAATAGSPGAASKKRSTTAAAAAATPTITTTTIAIAMVRVYRPDFVHAGAEEFDSWMFDTAWPVPRAGHRRRRHATASNGVAGGVKRRHAAGRDGGVREVERRISASLYAMNGLQEYFDKVFDASAXXDPFWDFSPLCHX

SEQ ID NO: 5842 - protein, 141 aa, Oryza sativa
  unsure (1)..(141): unsure at all Xaa locations
MTKYKGVRQRHWGSWVAEIRHPLLKTRIWLGTYGTAEDAARAYDEAARLMSGPAARTNFPLSSSGXXNARSCLSPTLRARLEKCCGAGSSAQAQQGAVAGQDNDDAAAAAAAMGVDDGDEYVEEMIQELTFYGYRDRPALX

SEQ ID NO: 5843 - protein, 192 aa, Oryza sativa
  unsure (1)..(192): unsure at all Xaa locations
MDHIGISGGGEGGVVSPAQPSSPERRYKGVRLRKWGRWVSEIRMPNSRERIWLGSYESAEKAARAFDAAAVCLRGSRGAGSLNFPESPPPDVXAAASPARLSRSXQIQAEAARHANRPFPANTAAAGGSSSSYSISQRQDIDWSFMDTLPAMSSSAASTNADLVPAMDDFMYGHSCEQGHKKLDTTVEFLQX

SEQ ID NO: 5844 - protein, 154 aa, Oryza sativa
  unsure (1)..(154): unsure at all Xaa locations
TPPPPPPLSPRRWRRRXGRKRFVGVRQRPSGRWVAEIKDTIQKIRVWLGTFDTAEEAARAYDEAACLLRGANTRTNFSSKVTNLLLLRLKARNQQVVDAGAAAPQEAALLQLQQQTPASCQEVFXSVATARSTASTSTTSSATPLDYMRRADQX

SEQ ID NO: 5845 - protein, 86 aa, Oryza sativa
  unsure (1)..(86): unsure at all Xaa locations
TPPPPPPLSPRRWRRRXGRKRFVGVRQRPSGRWVAEIKDTIQKIRVWLGTFDTAEEAARAYDEAACLLRGANTRTNFWPHLPHGIX

SEQ ID NO: 5846 - protein, 411 aa, Oryza sativa; identical to SEQ ID NO: 5697

SEQ ID NO: 5847 - protein, 274 aa, Oryza sativa
MERGEGRRGDCSVQVRKKRTRRKSDGPDSIAETIKWWKEQNQKLQEENSSRKAPAKGSKKGCMAGKGGPENSNCAYRGVRQRTWGKWVAEIREPNRGRRLWLGSFPTALEAAHAYDEAARAMYGPTARVNFADNSTDANSGCTSAPSLMMSNGPATIPSDEKDELESPPFIVANGPAVLYQPDKKDVLERVVPEVQDVKTEGSNGLKRVCQERKNMEVCESEGIVLHKEVNISYDYFNVHEIVEMIIVELSADQKTEVHEEYQEGDDGFSLFSY

SEQ ID NO: 5848 - protein, 281 aa, Oryza sativa
MLFRFVSCNVQLCGIIELPHWVRKKRTRRKSDGPDSIAETIKWWKEQNQKLQEENSSRKAPAKGSKKGCMAGKGGPENSNCAYRGVRQRTWGKWVAEIREPNRGRRLWLGSFPTALEAAHAYDEAARAMYGPTARVNFADNSTDANSGCTSAPSLMMSNGPATIPSDEKDELESPPFIVANGPAVLYQPDKKDVLERVVPEVQDVKTEGSNGLKRVCQERKNMEVCESEGIVLHKEVNISYDYFNVHEVVEMIIVELSADQKTEVHEEYQEGDDGFSLFSY

SEQ ID NO: 5849 - protein, 218 aa, Oryza sativa
MEVEEAAYRTVWSEPPKRPAGRTKFRETRHPVYRGVRRRGGRPGAAGRWVCEVRVPGARGSRLWLGTFATAEAAARAHDAAALALRGRAACLNFADFAWRMPPVPASAALAGARGVRDPVAVAVEAFQRQSAAPSSPAETFANDGDEEEANKDVLPVAAAEVFDAGAFELDDGFRFGGMDAGSYYASLAQGLLVEPPAAGAWWEDGELAGSDMPLWSY

SEQ ID NO: 5850 - protein, 414 aa, Oryza sativa
  unsure (1)..(414): unsure at all Xaa locations
AGSGGRGRRXRHPVYRGVRFRAGKWVSEIRELRKPSRIWLGTYATPEMAAAAYDAAALALRGRGAALNFPDAARSRPAPASASPDDVRAAATAAAAAMAHQEEDDDSRRQLEDGXXGGGGVVDEDDVLEMPRLMVSMAEGLMISPPLMLGLQADGGGIMDEGGGVLSVRPRTVGNGGGYVRECNAMIDRWMDRADAAAGGVVRIDRPETWTYGGMCVLTYYTCISQRFEFETSSFHEVVTGNNKDAVLVLLLPTRRLNTHTAVGSSLETPSCIGCRNDDDDQKPRRNSRAACRLQVMQATVHQYRRKKKKPPIFHRILLLRVEHMRQLWLQLFAAAVATRPSLLMQIERPNSNSSRPALRTDGYIKFSLPKRGCNRETEGYTSEICRPDAESNRIASNRRHGGRGSRAESSSEQ

SEQ ID NO: 5851 - protein, 267 aa, Oryza sativa
  unsure (1)..(267): unsure at all Xaa locations
MELQFQKPTQGQSQQQQCHYQVPTVTVAKNKAKTKCSSSKFVGVRQRPSGRWVAEIKDTTQKIRMWLGTFETAEEAARAYDEAACLLRGSNTRTNFATQAAPDSPLASRIRTILTHKKLKKSMPQHHHLQHRSISPCSXSTVPAAATSTSTSGVSPSRSNSSSLNFATNLSNFAMSGGEELQLASSQQQYDQYGHSTPAYYRLGMDAXMSGSNACPVASDQDKMKAEKQGSHGMNGIQEQETFDMGXXDLCDSLWDLPPICQLSCKY

SEQ ID NO: 5852 - protein, 198 aa, Oryza sativa
  unsure (1)..(198): unsure at all Xaa locations
MEKKYKGVRRRKWGKWVSEIRLPNSRDRIWLGSYDSPEKAARAFDAAFVTLRGHGAAGADLNFPDSPPSCDARSSDPRQVQAAALSHANRAHVTPQQAAAALMSPPSLSPPPGFATGSEVVAPAVRADGSIXXLAPGHGAPAAADSPPGWGGGHAYDFLQPPPPSPPLPSCDDDMVDVVDESSASLWSFDTRDSYFRY

SEQ ID NO: 5853 - protein, 180 aa, Oryza sativa
  unsure (1)..(180): unsure at all Xaa locations
MTVDQRTTAKAIMPPVEMPPVQPGRKCGGEESTGTTDRKKRPRRSRDGPTSVAETIKRWAELNNQQELDPQGPKKARKAPAKGSKKGCMKGKGGPENTRCDFRGVRQRTWGKWVAEXIREPDRQSRLWLGTFPTAEAAACAYDEAARAMYGPMARTNFGQHHASTTTTINNQSDVVFTLH

SEQ ID NO: 5854 - protein, 184 aa, Oryza sativa
MDVSAALSSDYSSGTPSPVAADADDGSSAYMTVSSAPPKRRAGRTKFKETRHPVFKGVRRRNPGRWVCEVREPHGKQRIWLGTFETAEMAARAHDVAALALRGRAACLNFADSPRRLRVPPIGASHDDIRRAAAEAAEAFRPPPDESNAATEVAAAASGATNSNAEQFASHPYYEVLDDGLDLG

SEQ ID NO: 5855 - protein, 376 aa, Oryza sativa
MVGPIQQDEGSHTCKRLEFWIEIPGVTDTATAWLVLSQNQSQGQQESSETDGRSIRHVATGRRRRLTWTTDTCQWRCTPVSCRCRRQQKQTQKEMERPSGGATSGGAWAHRPPPHRGDAFARAAPRPPNPTVAASVSVVRTACVCLCYCCCLRAAAATHTTDMEYYEQEEYATVTSAPPKRPAGRTKFRETRHPVYRGVRRRGPAGRWVCEVREPNKKSRIWLGTFATAEAAARAHDVAALALRGRGACLNFADSARLLRVDPATLATPDDIRRAAIELAESCPHDAAAAAASSSAAAVEAAAAAAPAMMMQYQDDMAATPSSYDYAYYGNMDFDQPSYYYDGMGGGGEYQSWQMDGDDDGGAGGYGGGDVTLWSY

SEQ ID NO: 5856 - protein, 237 aa, Oryza sativa
LQEFGTRLSIAGEVNQRESSMEVEEAAYRTVWSEPPKRPAGRTKFRETRHPVYRGVRRRGGRPGAAGRWVCEVRVPGARGSRLWLGTFATAEAAARAHDAAALALRGRAACLNFADSAWRMPPVPASAALAGARGVRDAVAVAVEAFQRQSAAPSSPAETFANDGDEEEDNKDVLPVAAAEVFDAGAFELDDGWFGGMDAGSYYASLAQGLLVEPPAAGAWWEDGELAGSDMPLWSY

SEQ ID NO: 5857 - protein, 176 aa, Oryza sativa
  unsure (1)..(176): unsure at all Xaa locations
MVKNTSNKCIAAAGATAAAGLGGGAASCSGGGGDGKVTTAAAAALAVRPYKGVRMRSWGSWVSEIRAPHQKRRIWLGSYATPEAAARAYDAALLCLKGSDAVLNFPSSASSRRRLDTRTRRRATXSPRSIQRVAAAAAAAFDAAAAXPSSSTKAAPSPWEEPEEDGELMRLWSFCX

SEQ ID NO: 5858 - protein, 272 aa, Triticum aestivum
  unsure (1)..(272): unsure at all Xaa locations
MLLLNPASEAAAAALDSIRQQLLEEPMAPARPAYCRSASFGSLVADQWSESLPFRPNDADDMVVYGALRDAFSCGWLPDGSFAAVKPEPLPSPDSYDGCCLGSFLASPPGLDAPWAEEAEVAATASRGKHFRGVRQRPWGKFAAEIRDPAKNGARVWLGTFDSAEDAAVAYDRAAYRMRGSRALLNFPLRIGSEIAAAAGQKRPSPQPASPDSPPPSSSAXXGSSKRRKRGEAAAESMSMALVPPPPVQAPVQLTLPVQPWLATGAVQQLVS

SEQ ID NO: 5859 - protein, 276 aa, Triticum aestivum
  unsure (1)..(276): unsure at all Xaa locations
MLLLNPASEAAAAAALDSIRQQLLEEXXARPAYCRSASFGSLVADQWSESLPFRPNDADDMVVYGALRDAFSCGWLPDGSFAAVKPEPLPSPGSYDGSCLGSFLASXARAGRAVDXEEEAEVAATASRGKHFRGVRQRPWGKFAAEIRDPAKNGARVWLGTFDSARXDAAVAYDRAAYRMRGSRALLNFPLRIGSEIAAAAAAAGQKRPSPQPASPDSPPPSXSAPGSSKRRKRGEAAAASMAMALVPPPPAQAPVQLTLPAQPWLAAGAVQQLVS

SEQ ID NO: 5860 - protein, 276 aa, Triticum aestivum
  unsure (1)..(276): unsure at all Xaa locations
MLLLNPASEAAALDSIRQQLLEEXXARPAYCRSASFGSLVADQWSESLPFRPNDADDMVVYGALRDAFSCGWLPDGSFAAVKPEPLPSPDGSYDGSCLGSXSSRRRRPGRTRRXXAEEEAEVAAAASRGKHFRGVRQRPWGKFAAEIRDPAKNGARVWLGTFDSAEDAAVAYDRAAYRMRGSRALLNFPLRIGSEIAAAAAAAGQKRPSPQPASPDSSSPSCSAXXGSSKRRKRGEAAAASMAMALVPPPPAQAPVQLTLPAQPWLAAGAVQQLVS

SEQ ID NO: 5861 - protein, 130 aa, Triticum aestivum
  unsure (1)..(130): unsure at all Xaa locations
MLLNPASEALVLDSIRQHLMEDTAAPAPEARRQRPAYCRSASFGSLVADQWSESLPFRADDSDDMVVYGALRDAFSCGWLPDGSFAAVKPEPLLPSPDSCYVGFLEPETPPATSPGGSEEEAAAAFMGEX

SEQ ID NO: 5862 - protein, 240 aa, Triticum aestivum
  unsure (1)..(240): unsure at all Xaa locations
MVSALSHVIRTPPDPPLSQENSSISTMRPRQEQGRKRHYRGVRQRPWGKWAAEIRDPKKAARVWLGTFDTAEDAAIAYDEAALRFKGTKAKLNFPERVQGPPTSASSSRAGXSRQIAATTNTTPPXRGGAGNAATAXTSWTVVPYPDLMRYARLLQGAGSAGGAVNLPFGAMSPPSMSSSAPHILDFSTQQLIRVSPASPAAAMSSSGTTGPSTSSSTTTASSPGAAWPYTGEHKNNKDS

SEQ ID NO: 5863 - protein, 220 aa, Triticum aestivum
  unsure (1)..(220): unsure at all Xaa locations
ARAEHGRTLAMAPKNALPVAVAAAADAGMEPRFRGVRKRPWGRYAAEIRDPARKARVWLGTFDTAEAAARAYDAAALHYRGPKAKTNFPVGTXSPPSPTQPVPLPPPKALAVSPSSSTVESSSRDTPAAAPAAPAAAAPAPPPALDLSLAMPVMVAAQPFLFLDPRVAVTVAVAAPAPAPCRSAAISGMNKVAVREEEHSDTGLSSSVGDASTVVGVGFN

SEQ ID NO: 5864 - protein, 167 aa, Triticum aestivum
  unsure (1)..(167): unsure at all Xaa locations
KTPTARPTRVAGMPLSLGADHLAAPGARAPPARVGTGMGMASLSLGGAAAYLPLNENDSLDMLLFDVLREASAVAAASPSSSSSPPTKTATAIAAAGADAIESGGACAAGRAAERPHYRGVRRRPWGKYAAEIRDPSRPGTRLWLGTFGTAEEAAVAYDRAAFRLRX

SEQ ID NO: 5865 - protein, 246 aa, Triticum aestivum
  unsure (1)..(246): unsure at all Xaa locations
MTTQQSHHPAAASRQLPLHSPGSSTGSADSTPWHHRAPTTPPLLPFDTNDADEMLLLHMLSQHQQHTHKALAAPVKREAPDRQEAAHPASAGRAFRGVRKRPWGKYAAEIRDSTRNGVRVWLGTFDSPEDXAALAYDQAAFAIRGGAAVLSFPADHVRRSLEGGADDAGGRAHSVSPVLALKRRHSMRSRKATAAGRKVKAATRGAQPEGMVMELEDLGAEYLEQLLGASEDTATMDSWCWSHHFI

SEQ ID NO: 5866 - protein, 424 aa, Triticum aestivum
  unsure (1)..(424): unsure at all Xaa locations
MSREVQRDPVLPFALAVFQPCYAPVGRERVLLESPSRPSGLFPLLPFLSLVFLCIGAQFSSAFAPRSSFFSIMFFVLPSLHPPSSPSAQALIAAAIDMYKYNTSTHQIGSAASALDQELMKALEPFITIACSSSSHYPYHYYSSPSMTQDSYMATPSSSSYASSFAASPLPTTAPASPSFSQLPPLYSSHSGVNGSMGLAQLGPAQIQQIQAQFFVQQQQQQRGLAGGSFLGPRAQPMKPAAALALAGVAPAQSKLYRGVRQRHWGKWVAEIRLPKNRTRLWLGTFDTAEDAALAYDKAAFRLRGDLARLNFPSLRRGGAHLAGPLHASVDAKLTAICESLAAXXSSKNSEPESPKCSASTEGEDSASAGSPPPPXXPPVPEMEKLDFTEAPWDESETFHLRKYPSVEIDWDSILSXTASSCYY

SEQ ID NO: 5867 - protein, 309 aa, Triticum aestivum
  unsure (1)..(309): unsure at all Xaa locations
MKALEPFITIASSSSSHYPYHYYSSPSMTQDSYMATPSSSSYASSFAASPLPTTAPASPSFSQPPPLASAPSAVNGSMGLAQLGPAQIQQIQAQFFVQQQQQQRGLAGGSFLGPRAQPMKPAAALALAGVAPAQSKLYRGVRQRHWGKWVAEIRLPKNRTRLWLGTFDTAEDAALAYDKAAFRLRGDLARLNFPSLRRGGAHLAGPLHASVDAKLTAICESLAAXXSSKNSAEAEPESPKCSASTEGEDSASAGSPPPPXXPPVPEMEKLDFTEAPWDESETFHLRKYPSVEIDWDSILSXTASSCYYY

SEQ ID NO: 5868 - protein, 278 aa, Triticum aestivum
MSDSSSTASSSPSPSSTSPRLTTGDVNFLARRAVTTQQNHHQAAAEAFPLHSPGSSTGSADSAPWHHRAPATPPPVLPFDTSDADEMLLLDMVSQHHEVQHAAASPTTAPAVKQEADEEDKVVLGVARAFRGVRKRPWGKFAAEIRDSTRNGVRVWLGTFDSPEAAALAYDQAALAIRGGAAVLNFPADQVRRSLEGAADDLCGCTNGVSPVLALKQRHCIRSRKATTMSRKAKAARGQPEGMVMELEDLGAEYLEQLLGTSQEMASMDSWCWSHHSI

SEQ ID NO: 5869 - protein, 330 aa, Triticum aestivum
  unsure (1)..(330): unsure at all Xaa locations
MCGGAILAELIPGAPARRAASGHGHVWPGKGAKHTKAAAADDFQAAFREFNEDSDEEXXVVMVVERQEEVAESKPFVFAAEEEEQAAPARRRKPAQYRGVRRRPWGKWAAEIRDPVKGVRVWLGTFPSADAAALAYDEAARAIRGPRAKLNFPSSSAVAAAAPGARKRGRAGADAAPAAKPAQVITLVDEEEEXXASSLFVKHEADASEGSESSGALPDFSWQGISAFDEAPAYPAPEPETEQLTKRARTTEAEDTDDPASDSDSDALFDALLFADQFAFFNGGAYESLDSLFSADAVQSSATATAVNEAALGLWTFDDDCLVDECSLSF

SEQ ID NO: 5870 - protein, 143 aa, Triticum aestivum
  unsure (1)..(143): unsure at all Xaa locations
MCGGAVIADFVPAGAXXARMAPPPTSPAPSSPSPVRRXRRNRRRRGXKTAYRGIRRRPWGRWAAEIRDPTKGARVWLGTYATAEEAARAYDVAARDIRGPKAKLNFPPAVGAPQAAAAVEGAGAPKKRPTSRGGPVPNSXXXS

SEQ ID NO: 5871 - protein, 209 aa, Triticum aestivum
  unsure (1)..(209): unsure at all Xaa locations
MRRGGGAATAVAAAAEAERDAGARFRGVRKRPWGRYAAEIRDPAKKARVWLGTFDSAEDAARAYDAAARMLRGPKAKTNFPLSLPHHHQLQASYSPXXPVAAAAAVPTSVAAAAARPACSSLSSTVESFGGPRARPVXPTAASXXPPILDGDCHSDCGSSASVVDDDCADAAASPSCGLLLPFDLNLPPEFGGVACNDDDELKLTALRL

SEQ ID NO: 5872 - protein, 257 aa, Triticum aestivum
  unsure (1)..(257): unsure at all Xaa locations
FGSTATSSSRTRXTAEPPPPPFAARAISSEQEHTPMVAALLHVISGYTTPVPDFFFPASKEVCTACGMDGCLGCEFFGAGARXXAIAPKATVGGPQRRRRNKKTQYRGIRQRPWGKWAAEIRDPRRAVRVXLGTFDTAEDAARAYDRAAVEFRGPRAKLNFPFPXXSSSSSSWAAADAAAKSDTRSPSPSPSSADGEEXQRNGSGMACRLDEARQERALLTFSGGGQQHPGNVSRAGKETTRGRSRGCHGKCLLAVT

SEQ ID NO: 5873 - protein, 213 aa, Triticum aestivum
  unsure (1)..(213): unsure at all Xaa locations
MCGGAIIYDYIPAHRRRVSTADFWPDADHSDAHSAAPDKAPRAKRGRTNQYRGIRQRPWGKWAAEIRDPVKGVRVWLGTYPTAEAAARAYDRAARRIRGAKAKVNFPNKXPRRRARARGLVPMAAPPAAVLPSPKKEEEGEGLEHAACSCEEVKALSEELMAYENYMSFLGVPYMEGGTAATAAPAAFGVAAEEAPAELWSFEDSYYPGPLGL

SEQ ID NO: 5874 - protein, 383 aa, Triticum aestivum
  unsure (1)..(383): unsure at all Xaa locations
MCGGAILAGFIPPSAAAAAAKAAAAKKKQQQRSVTADSLWPGLRKKAAEEEDFEADFRDFERDSSDDDXRGRGGSXPPPASAGFAFAAAAEVAPPAPARLDAVQHDGPAAKQVKRVRKNQYRGIRQRPWGKWAAEIRDPSKGVRVWLGTYDTAEEAARAYDAEARKIRGKKAKVNFPEEAPTVQKSTLKPTAAKSAKLAPPPKACEDEPFNHLSRGDNDLFAMFAFNDKKVPAKPAESVDSLLPVKPLVPTETFGMNMLSDQSSNSFGSTDFGWDDEAMTPDYTSVFVPNAAAMPAYGEPAYLQGGAPKRMRNNFGVAVLPQGNGAQDIPAFDHEMKYXXLPYVESSSDGSMDSLLLNGAMQDGASSGDLWSLDELFMAAGGY

SEQ ID NO: 5875 - protein, 169 aa, Triticum aestivum
  unsure (1)..(169): unsure at all Xaa locations
MAPRTSDKTATPPAAGAAATGLALGVGGGNGGGVGTHYRGVRKRPWGRYAAEIRDPAKKSRVWLGTYDTAEEAARAYDAAAREYRGNKAKTNFPFASASAPPAAAAALTGDGSRSSNSSTVESFGGDVQAPMQAMPLPPSLELDLFHRAAPKTSPAGVAIDRIISSYFX

SEQ ID NO: 5876 - protein, 178 aa, Triticum aestivum
  unsure (1)..(178): unsure at all Xaa locations
XGQERSPDVQQSAAMGEQYPHTYGGGGGNAEQTSVPERRYRGVRQRPWGKWAAEIRDPHKAARVWLGTFETAEAAARAYDEAALRFRGSRAKLNFPEDARLTAPAAPTTASAAPTVASSAAAYPAGAVXXDYLQYQMLLRAGGGGFXXPYYGGGGGSSSGSYSLPESSVTVASVPSSX

SEQ ID NO: 5877 - protein, 335 aa, Triticum aestivum
  unsure (1)..(335): unsure at all Xaa locations
MCGGAILAELIPGAPARRATSGHGHVWPGKGAKQTKAAAADDFEAAFREFNEDSDVEDDVVMVMERREEVAESKPFVFAASXQEAAAGGGGXAAPVRRRKPAQYRGVRRRPWGKWAAEIRDPVKGVRVWLGTFPSADAAALAYDEAARAIRGPRAKLNFPSSSAVAAAAPGARKRGRAGAAAPAAKPAPVITLVDDEEEXXASSFVKHEAEASEGSESSGALPDFSWQGISAFDEAPAYPAPEPETEQLTKRARTTEAEDTDDPASDSDSDALFDALLFADQFAFFNGGAYESLDSLFSADAVQSSATATAVNEAALGLWTFDDDCLVDECSLSF

SEQ ID NO: 5878 - protein, 188 aa, Triticum aestivum
  unsure (1)..(188): unsure at all Xaa locations
MCGGAIISDFIPERDHRGGSKRSLCTADFWPHAAAAAFDDPTAEEEPSRKRERKTMYRGIRRRPWGKWAAEIRDPAKGARVWLGTFATPEGAARAYDRAARRIRGTKAKVNFPNXGPAPRPRRLRRRQRGRLHPPAVVHGARGGVRAPAAAACAYDXGRARDGALELWQHQRSSAYVIDRNCSFSFYM

SEQ ID NO: 5879 - protein, 168 aa, Triticum aestivum
  unsure (1)..(168): unsure at all Xaa locations
MCGGAIISDFTPERDRLCTADFWPHAAAFDDPTDHPEEEPSRKRERKTMYRGIRRRPWGKWAAEIRDPAKGARVWLGTFATPEGAARAYDRAARRIRGTKAKVNFPNXGPAPRPRRLRRRQRHRRLLPPAVVHGRCRRAGDGGGVRAYDELRLFSEKLXISSNEYFTX

SEQ ID NO: 5880 - protein, 137 aa, Triticum aestivum
  unsure (1)..(137): unsure at all Xaa locations
MCGGAIIYDYIPAHRRRVSTADFWPDADHSDAHSAAPDKAPRAKRGRTNQYRGIRQRPWGKWAAEIRDPVKGVRVWLGTYPTAEAAARAYDRAARRIRGAKAKVNFPNEILVGAPAHEAPCTMAAVLPSPKKEEEPX

SEQ ID NO: 5881 - protein, 148 aa, Triticum aestivum
  unsure (1)..(148): unsure at all Xaa locations
XHGFASSSKTGPDYTAAPAASYSPHGAAAGDEELPSPSSAESGGSGGAPRKRYRGVRQRPWGKWAAEIRDPHKAARVWLGTFDDAEAAARAYDAAALGFRGSRAKLNFPESATIPPXAAASSCAGISDATAAAARGAAGVAGSVGRAX

SEQ ID NO: 5882 - protein, 163 aa, Triticum aestivum
  unsure (1)..(163): unsure at all Xaa locations
XRGVRRRPWGKWAAEIRDPQKAARVWLGTFATAEDAARAYDAAALRFRGSRAKLNFPEDAAAATARRARDAATAAAAASSKPAALLESQDGDVMDYLDYSKILAXXPEPSNVMGRLMGGDGNGRFLGSWSIGTSPTSSASSASLVVSGPASAPLFQCGSGLKQ

SEQ ID NO: 5883 - protein, 162 aa, Triticum aestivum
  unsure (1)..(162): unsure at all Xaa locations
MCGGAIISDFTPERDRLCTADFWPHAAAFDPQHRAAEEEPSRKRERKTMYRGIRRRPWGKWAAEIRDPAKGARVWLGTFATPEGAARAYDRAARRIRGTKAKVNFPNXGPAPRPRRLRRRQRRLQRRRLLPPAVVHGARGGVRAPAADVILLLPNYYCAYDX

SEQ ID NO: 5884 - protein, 147 aa, Triticum aestivum
  unsure (1)..(147): unsure at all Xaa locations
SSRSRAFHSAPLVVVARPRQSPGGRSGRTEASAGRRSTTMRNGSTVCDAAAAVGLGVAPRYRGVRKRPWGRFAAEIRDPAKRARVWLGTYDSAEAAARAYDVAARTLRGPLATTNFPQDXPSPSPRSPRSRIRFDRLXPRPSLQRQX

SEQ ID NO: 5885 - protein, 203 aa, Triticum aestivum
  unsure (1)..(203): unsure at all Xaa locations
XLGPRSQPMKPASVXXAATPPRPQKLYRGVRQRHWGKWVAEIRLPRNRTRLWLGTFDTAEEAALAYDQAAYRLRGDAARLNFPDNAASRGPLHASVDAKLQTLCQNITASKNAKKSASVSASTAAATSSTPTSNCSSPSSDEASSSLESAXXSSPSPATTTAAEVPEMQQLDFSEAPWDEAACFALTKYPSYEIDWDSLLAAN

SEQ ID NO: 5886 - protein, 215 aa, Triticum aestivum
  unsure (1)..(215): unsure at all Xaa locations
XKNKKLRLIHFGIMVSHLPAKQSKWAGKQSNIERKIHGAAAGDEELPSPSSAESGGSGGTPRKRYRGVRQRPWGKWAAEIRDPHKAARVWLGTFDDAEAAARAYDAAALGFCGSRAKLNFPESATIPPXAAASSCTGISDATAAAASSSALAMPPPQRPEALLESQALLXEGRLIPTTPGXLRPSTGGSTSGGPRTPAPPLIYSFRGGASYPLQX

SEQ ID NO: 5887 - protein, 119 aa, Triticum aestivum
  unsure (1)..(119): unsure at all Xaa locations
HEKAGPCKSRSGPDQSSDTMEEHRSRSPASSNVXXEAPRRRYRGVRQRPWGKWAAEIRDPHKAARVWLGTFETAEAAARAYDDAALRFRGSRAKLNFPEDARLHPATVTPXAAPARAPI

SEQ ID NO: 5888 - protein, 349 aa, Triticum aestivum
MCGGAILSDIIPPPRRPAGGRLWQADRKKRRAGPRRVPEEEPEEEAEEGDEDFEADFEGFVDEESDGEVKPFPARRSGFSGDGLKATAAGEYDCASGSAKRKRKNQFRGIRRRPWGKWAAEIRDPRKGVRVWLGTYNSAEEAARAYDVEARRIRGKKAKVNFPEEAPMAPQQRCATAVKVPEFNTEQKPVLNTMGNADVYSCSAVDYTLNQQFVQPQNMSFVPTVNAVEAPFMNFSSDQGSNSFSCSDFSWENDIKTPDITSVLASIPTSTEVNESAFLQNNGINSTVPPVMGDANVDLADLEPYMKFLMDDGSDESIDSILSCDVPQDVVGNMGLWTFDDMPLSAGFY

SEQ ID NO: 5889 - protein, 237 aa, Triticum aestivum
  unsure (1)..(237): unsure at all Xaa locations
MAPRTSDKTATPPAAGAAATGLALGVAXGGNDGGVGTHYHGVRKRPWGRYAAEIRDPAKKSRVWLGTYDTAEEAGRAYDAAAREYRGNKAKTNFPFAPASAPPAAAAALTVDGSRSSNSSTVESFGGDVQAPMQAMPLPPSLDLDLFHRAATSTAGAGMRFPFSGYPVSHPYYFFGQAAAAAAAGCHMYSQAPKVTVASVSPSDSDSSSVVDLAPSPPARKPVPFELDLNCPPPAEL

SEQ ID NO: 5890 - protein, 332 aa, Triticum aestivum
  unsure (1)..(332): unsure at all Xaa locations
XRRKKRKRRESPKNHRHHKSKSKRHHSAENSDSDDEVMAREREGEESDGEAKPFPVRRSGFSGDGLKATAAGDDDCASGSAKRKRKNQFRGIRRRPWGKWAAEIRDPRKGVRVWLGTYNSAEEAARAYDVEARRIRGKKAKVNFPEEAPMAPQQRCAXXAVKVPEFNTEQKPVLNTMGNADVYSCSAVDYTLNQQFVQPQNMSFVPTVNAVEAPFMNFSSDQGSNSFSCSDFSWENDIKTPDITSVLASIPTSTEVNESAFLQNNGINSTVPPVMGDANVDLADLEPYMKFLMDDGSDESIDSILSCDVPQDVVGNMGLWTFDDMPLSAGFY

SEQ ID NO: 5891 - protein, 193 aa, Triticum aestivum
  unsure (1)..(193): unsure at all Xaa locations
RHEVEVFXVESGESELESXXDEAKPFAAPRTRSALPRDGLNTSAVVVDGPAANSVKRKRKNQFRGIRRRPWGKWAAEIRDPRKGVRVWLGTFNSPEEAARAYDAEARRIRGKKAKVNFPDEVSTIPQKHRAGPTPLKVPEMDFEEKPIIKPAVNXXMTNSNAYHYPVVDHNIPEPFMHTQNMSFAPFVNSAAP

SEQ ID NO: 5892 - protein, 222 aa, Triticum aestivum
  unsure (1)..(222): unsure at all Xaa locations
MCGGAILSDIIPPPRRATGGNVWRADKKKRARADAAAGRPRRAPEEFEEEGDAEFEADFEGFVEAEEESDGEGKPFPVRRSGFSGDGLKATAAGDDDCASGSAKRKRKNQFRGIRRRPWGKWAAEIRDPRKGVRVWLGTYNSAEEAARAYDVEARRIRGKKAKVNFPEEAPMAPQQRCAXXSVKVPEFNTEQKPVLNTMGNADVYSCPAVDYTINQQFVQPX

SEQ ID NO: 5893 - protein, 357 aa, Triticum aestivum
  unsure (1)..(357): unsure at all Xaa locations
MCGGAILSYIVPPPRRATGDNVWRADKKRRAMPDAAAGRPRRVPEEEFQEEEGDAEFEADFEGFVEAEEESDGEAKPFPVRRTGFSGDGLKATAAGDDDCASGSAKRKRKSQFRGIRRRPWGKWAAEIRDPRKGVRVWLGTYNSAEEAARAYDVEARRIRGKKAKVNFPEEAPMAPQQRCAXXSVKVPEFNTEQKPVLNTMGNADVYSCPAVDYTLNQQFVQPQNMSFVPTVNAVXEAPFMNFSSDQGSNSFSCSDFSWENDIKTPDITSVLASIPTSTEVNESAFLQNNGINSTVPPVMGDANVDLADLEPYMKFLMDDGSDESIDSILSCDVPQDVVGNMGLWTFDDMPLSAGFY

SEQ ID NO: 5894 - protein, 203 aa, Triticum aestivum
  unsure (1)..(203): unsure at all Xaa locations
MCGGAILSDIIPPPRRATGGNVWRADKKRRARPDAAAGRPRRAPEEEFQEEEGDAEFEADFEGFVEAEEESDGEAKPFPVRRSGFSGDGLKATAAGDDDCASGSAKRKRKNQFRGIRRRPWGKWAAEIRDPRKGVRVWLGTYNSAEEAARAYDVEARRIRGKKAKVNFPEEAPMAPQQRCATAGXRVPEFNTEQKPVLNTMGX

SEQ ID NO: 5895 - protein, 201 aa, Triticum aestivum
  unsure (1)..(201): unsure at all Xaa locations
PNPRPAAMRKARPPQPQPQPSQQSPEIRYRGVRKRPSGRYAAEIRDPAKKTPIWLGTFDCAEDAARAYDSAARSLRGPTARTNFPPSSATXXPPPRPPPPAAAAAAATSSQSSTVESWSRRXGPAPPPGPAAPPERARPRRGREDCRSYCGSSSSVLLEEGADXXAAASRSPLPFDLNMPPPQDDAEGDQMTCRYDTLLRL

SEQ ID NO: 5896 - protein, 108 aa, Triticum aestivum
  unsure (1)..(108): unsure at all Xaa locations
RGNSSRREEARAGRRSTTIGTAAPCATXAAAVGLGVAPRYRGVRKRPWGRFAAEIRDPAKRARVWLGTYDSAEAAARAYDVAARTLRGPLATTNFPHDLAPASPASPX

SEQ ID NO: 5897 - protein, 156 aa, Triticum aestivum
  unsure (1)..(156): unsure at all Xaa locations
PLASRVSARKQRELAQAIAGRRSTTMRNGSTVCDAAAAVGLGVAPRYRGVRKRPWGRFAAEIRDPAKRARVWLGTYDSAEAAARAYDVAARTLRGPLATTNFPHDXSSPSPRSPRCRVRLHRLPPAPXLQRQLHRRVLQRAQGGERASGRAARASX

SEQ ID NO: 5898 - protein, 182 aa, Triticum aestivum
  unsure (1)..(182): unsure at all Xaa locations
HASATNQRRTPPSHRHNNRRVEHLPWLPRTRPPPPAPTRPTIPPPRHRNNSRRPRPSTAGRSPAADATRGMEPRFRGVRKRPWGRYAAEIRDPARKARVWLGTFAGGEAAARAYEAAARPQRAPTAKTHSPVASPRPTPTSPSXHRRRPSPPPPPSRQRAPRGDQRHEQGGXXREEEQSDTG

SEQ ID NO: 5899 - protein, 174 aa, Triticum aestivum
  unsure (1)..(174): unsure at all Xaa locations
MCGGAILAGFIPPSAAAKAAAAKKKQQQRSVTADSLWPGLQKKAADEEDFEADFREFERDSSDDDAAVEEVPPPPAAAGFAFAAAAEVAPPAPARLDAVQRDGPAAKQVKRVRKNQYRGIRQRPWGKWAAEIRDPSKGVRVWLGTYDTAEEAARAYDAEARKIRGKNAKANFSX

SEQ ID NO: 5900 - protein, 159 aa, Triticum aestivum
  unsure (1)..(159): unsure at all Xaa locations
XRHRLLLQRGRVGAAAAGPDADDQGGAPEGAQEAPPRHGGREEGRLGAAAAXQATGARTPSVRYRGVRQRRWGKFASEIRDPIQGRRLWLGTFDTAEEAAAAYDAAKIRISGSRXARLTAPPASLSPPAKRITSPPPPPPPPEPAKPAISIHPSIKKKX

SEQ ID NO: 5901 - protein, 171 aa, Triticum aestivum
  unsure (1)..(171): unsure at all Xaa locations
MCGGASLADVKXXPTVTWKVTKAALCPKKKKPRHGSNGGRCFTGLGGCMGPDVDDNEEDFEAELEVFEVNFGDSDVELGRTRVDEKDDDNEVVEINSFAAAKSSLSQGFDGPSAKRKRKSQFRGIRQRPWGKWAAEIRDPSKGARVWLGTFNSAEEAARAYDVEARRIRGX

SEQ ID NO: 5902 - protein, 134 aa, Triticum aestivum
  unsure (1)..(134): unsure at all Xaa locations
XGAFPSLDAFLDRSPWRRAAHAAPIISRVSPAAGSSATLKTPVAAPPGGEGGPEDRDHMYRGVRQRRWGRWASEVREPNRGKRHWLGTFDNAVDAALAYDRAAVAIFGSRAIVNFPHEVKPVITXXVFGEREVX

SEQ ID NO: 5903 - protein, 178 aa, Triticum aestivum
  unsure (1)..(178): unsure at all Xaa locations
SKNSLPSTTQTATYLKQQTLIPRTRCAEGSSPPTTAARGVPAXSPSAGKAKMRGGWPTDEDSDDWEAAFREFVAADDGDVLNEPLPTGIMASXRAIPLAGHGEAEAAXRASPSHPYRGIRQRAWGRWSAEIRDPIKXXRVWIGTFDTAAEAAHAYDAEARRIHGRKARTNFPAAPAAX

SEQ ID NO: 5904 - protein, 172 aa, Triticum aestivum
  unsure (1)..(172): unsure at all Xaa locations
MCGGAILAELIPSAPXXRSVTAVHLLPKRPRVDDFEAAFKRFDEDSAEEEVLQRAGFEFGAHRQPAARRGGXXSPAQYRGVRRRPWGKWAADIRDPVKGVRVWLGTFPSAEAAAHAYDDAARDFRGASARLNFPSSSTSAPKRHVAAKATPCLVIDLVDDEEGDAGAAGAGX

SEQ ID NO: 5905 - protein, 97 aa, Triticum aestivum
  unsure (1)..(97): unsure at all Xaa locations
MAPRAAEKAPVSPPTGLGLGLGGGVGVVAGGAHYRGVRKRPWGXRYAAEIRDPAKKSRVWLGTYDTAEEAARAYDTXAAREFRGAKAKTNFPVPSSS

SEQ ID NO: 5906 - protein, 123 aa, Triticum aestivum
MAPTHTQHVQARPRLLRPPGLPPRAQPMKTAAAAPAAVKLYRGVRQRHGCKWVAEIRLPRNQTRLWLGTFDTAEEAAHAYDQAACRLHGDAARLNFPDNASSRPPLNAAVDAKLQVISRTIAA

SEQ ID NO: 5907 - protein, 184 aa, Triticum aestivum
  unsure (1)..(184): unsure at all Xaa locations
HGPFFSVLTSTSPRLANHRRRQLPGPPLNDHTAKPPPSSSGSPLHSPASSTGSADSAPRPSPVLPFDTNGADEMLLLDMISQYHHVQHAAFFSTIAPVKREASQEEDKAAVDVGRAFRGVRKRPWGKNAAEIRDSTRNGVRVRLETFNSPEDAEMEYDEADFAIRGGDDVLNFSGEHVRRSLEX

SEQ ID NO: 5908 - protein, 149 aa, Triticum aestivum
  unsure (1)..(149): unsure at all Xaa locations
TNPTQQCLPLPLPRPQAAATSGAAXGGGRKGKAAGKGGPENAKFRYRGVRQRSWGKWVAEIREPRKRSRKWLGTFATAEDAARAYDRAALLLYGPRAHLNLTAPPPPPGADPHPRPFSSSSSSAPPPLRPLLPRPPQNSGGAGXGLPAX

SEQ ID NO: 5909 - protein, 171 aa, Triticum aestivum
  unsure (1)..(171): unsure at all Xaa locations
XTRGMGPNPSLDMLAAAAGMESAAEAAAAAAAAEAQPRGRVVRIIVHDADATDSSSSEDESXAAAAGPDADDQGGAPEGAQEAPPRHGGREEGPRTPSVRYRGVRQRRWGKFASEIRDPIQGRRLWLGTFDTAEEAAAAYDAAKIRISGSRRGLPXPCAXXXGPXTXPXST

SEQ ID NO: 5910 - protein, 148 aa, Triticum aestivum
  unsure (1)..(148): unsure at all Xaa locations
XDSLFLRALISVVNGDAVVPTLHLEPSSTPHIAAAVPXXCASCGVDGCIGCMFVAAAAPAGSSSEGXRSSAASFVKGGGVGKITRRRSWSXXFRGVRQRSWGKWAAEIRDPHRAVRKWLGTFDTAVDAARAYDLAALEFRGHRARLNX

SEQ ID NO: 5911 - protein, 135 aa, Triticum aestivum
  unsure (1)..(135): unsure at all Xaa locations
MVQPKKKFRGVRQRHWGSWVSEIRHPLLKRRVWLGTFETAEEAARAYDEAAVLMSGRNAKTNFPVQRSSTGDPAPAATRDVRGGSSSSSTSNLSQVLSAKLRKCCKAPSPSLTCLLLYTXKSHIXVWXKXAGARA

SEQ ID NO: 5912 - protein, 375 aa, Triticum aestivum
  unsure (1)..(375): unsure at all Xaa locations
ISGPDPDRAGHDGRSEGRRGGGGGGDALRDPGAPAWKNLWSRGKYPESCSRQTNRKKRPRRSRDGPNSVSETIRRWKEVNQQLEHEKRARKPPAKGSKKGCMQGKGGPENTQCGFRGVRQRTWGKWVAEIREPNRVSRLWLGTFPTAEDAARAYDEAARAMYGALARTNFPVHPAQAPAXGSTSAKXYMAIEGVVRGASASCESTTTSANHSDVASNLPRQAQALEIYSQPDVLESTESVVLESVEHYSHQDTVPDAGSSIARSTSEEDVFEPLEPISSLPDGEADGFDIEELLRLMEADPIEVEPVTGGSWNGGANTGVEMGQQEPLYLDGLDQGMLEGMLQSDYPYPMWISEDRAMHNPAFHDAEMSEFFEGL

SEQ ID NO: 5913 - protein, 198 aa, Triticum aestivum
  unsure (1)..(198): unsure at all Xaa locations
ISGPDPDRVGHDGRSEGRRGGGGGGDALRDPGAPAWKNLWSRGKYPESCSRQTNRKKRPRRSRDGPNSVSETIRRWKEVNQQLEHEKRARKPPAKGSKKGCMQGKGGPENTQCGFRGVRQRTWGKWVAEIREPNRVSRLWLGTFPTAEDAARAYDEAARAMYGALARTNFPEHPAQAPAXGCTSAKXYMAIEGVLRGA

SEQ ID NO: 5914 - protein, 196 aa, Triticum aestivum
  unsure (1)..(196): unsure at all Xaa locations
MATANQDCAATLQFHDHRGGPAATELHGRTISSEQEHGIIVAALRHVVSGYTTAPPEAVVAVACGRCGIDGCLGCDFFGAXPSRRRWRRPCPWEGCWCPPPRRRTKTXYRGERQRPRKKRAAEIRDPRRAVRKWLGTFDTAEDAARTYDLAALEFRGPRARLNFPCSDETLRGHGSAHGADDEAGTSPQNETLTPP

SEQ ID NO: 5915 - protein, 106 aa, Triticum aestivum
  unsure (1)..(106): unsure at all Xaa locations
MGATEDSSSGSETTTSSSVEALASPPSPTATTASSKKKRPRNDGRHPTYRGVRMRSWGKWVSEIREPRKKSRIWLGTFATAEMAARAHDVAALAIKGRAAHLNFPX

SEQ ID NO: 5916 - protein, 124 aa, Triticum aestivum
  unsure (1)..(124): unsure at all Xaa locations
XEXHRRERVLALEMPDSELNSPASSSVLEKRERDSGGNGAGGRHRGYRGVRMRAWGKWVSEIREPRKKSRIWLGTFPTPEMAARAHDAAALVVKGPAAVLNFPELASSLPRPASAAXHDVQAAX

SEQ ID NO: 5917 - protein, 278 aa, Triticum aestivum
METGGSKREGDCPGQERKKKVRRRSTGPDSVAETIKKWKEENQKLQQENGSRKAPAKGSKKGCMAGKGGPENSNCAYRGVRQRTWGKWVAEIREPNRGNRLWLGSFPTAVEAARAYDDAARAMYGAKARVNFSEQSPDANSGCTLAPPLPMSNGATAASHPSDGKDESESPPSLISNAPTAALHRSDAKDESESAGTVARKVKKEVSNDLRSTHEEHKTLEVSQPKGKALHKAANVSYDYFNVEEVLDMIIVELSADVKMEAHEEYQDGDDGFSLFSY

SEQ ID NO: 5918 - protein, 104 aa, Triticum aestivum
  unsure (1)..(104): unsure at all Xaa locations
MVQSKKKFRGVRQRHWGSWVSEIRHPLLKRRVWLGTFETAEEAARAYDEAAILMSGRNAKTNFPVPRSANGETAAARDGRGVGSSSSGAAGASSLSQILSAKLX

SEQ ID NO: 5919 - protein, 368 aa, Triticum aestivum
  unsure (1)..(368): unsure at all Xaa locations
MCGGAILKDLKXXPAPTRKVTAAVLWPEKNKPKRADGVARRLAGLVDDGEVDFEADFEEFEADSGDSDVELGRAGDDVVVEIKPLFAVKRSLSQDDLSTMTTAGFDGPAQRSAKRKRKNEFRGIRQRPWGKWAAEIRDPSKGVRVWLGTFNSAERGSQELIDVERTIRGKKEPXVNLPEYPTVTKERRACPAAPKVPKSSVAQEPTVIPAVNNLANPNAFVYPSADFASKQPLVQPDNMPFVPAINSAASVEAPVMNMYSDQGSNSFGCSDLGWEYDTKTPDISSIAPISTIAEGTESALLQSNTNSVVPPVMENNAVDXXEPWMRFLLDDGVDEPIDSLLNFDVPQDVVGNMDLWSFDDMPICGEIF

SEQ ID NO: 5920 - protein, 332 aa, Triticum aestivum
MAPLSEHQMRLTRALAKRPKTKMLTGFGVKPTAAFSKPAQLQAQALLPGAQPPRRRVRVLYEDPDATDSDTDDEEAVAAPASSKRCFELFLGKAPPATKPVTPTAAASAVAACTTSSAEGHRGVRLRKWGKWAAEIRNPFSGKREWLGTFDTADLASAAYQAASRSFIEEKRRRRSAASTTPTSSSTTPTASSSSSTSAAPFAHPSPSSVLEATKPAVESLSPDPTPVPVMVSTTAETAQLPDDPEFYQDLLRGLQLPDIDPMDFRAGLDALDVSEASAYLDGEQDLLLGDLADEDLELGMDLDIGDDFLEMPGCDFGRGMDDFLQTVDFCV

SEQ ID NO: 5921 - protein, 105 aa, Triticum aestivum
  unsure (1)..(105): unsure at all Xaa locations
XKEPPAPTESPAPLPHTKSYSSFGHAAGREGRGGKQYRGVRMRKWGKWVAEIREPHKRTRIWLGSYATPVAAARAYDTAVFYLRGRSARLNFPDEISXAGAVVAX

SEQ ID NO: 5922 - protein, 196 aa, Triticum aestivum
  unsure (1)..(196): unsure at all Xaa locations
MARPQQRYRGVRQRHWGSWVSEIRHPLLKTRIWLGTFETAEDAARAYDEAARIMCGPRVRTNFPDNDAAXXSSSFLSPALVAKLHRCSQAGQQQDKDASTSSVGVDPRSPPAPFAGYTGNASAAAASAAAGWSGGFLEEQYVEQMIEELLDYFSMEISYXPRLRTCSVPVPCACSVSAPFTSLSLRVCVWVGLFLV

SEQ ID NO: 5923 - protein, 141 aa, Triticum aestivum
  unsure (1)..(141): unsure at all Xaa locations
XPVERGEREADTHTAAESPRLRQAPHQQPSTMEREATVAFYPPAPAPQQQRPTAAQPLSARAPSSGGGGGGGGRQYRGVRMRKWGKWVAEIREPNKRSRIWLGSYATXVAAARAYDTAVFYLRGRSARLNFPDQLLDGAPX

SEQ ID NO: 5924 - protein, 220 aa, Triticum aestivum
  unsure (1)..(220): unsure at all Xaa locations
QIVQFIPNYQLSSASLPPNRRRFLIDRAWRXTVDWRSYRPDLPAAMYRMVDGSQVMHAFAPPTAQGAAPTXSRSPSHAPARIRAPGFVAPPTSLPRQILQLHHHVRRAPGAAMAXGGAADEAARRGGAPGAHGLQPLSRRHPAPRXGKWVAEIRLPRNRTRLWLGTFDTADEAALAYDAAAFRLRGESARLNFPELRXRGGEHHGPPLDAAIDAKLXAPS

SEQ ID NO: 5925 - protein, 150 aa, Triticum aestivum
  unsure (1)..(150): unsure at all Xaa locations
XSRQSISSMDGDKQKKCCPLRRSRKGCMKGXKGRPGHQQCPFRGVRQRTWGKXWVAEIREPNRGARLWLGTFATALDAARAYDAAARALYGDCARLNLXRRRRPRCSTLPQGSGANGNSAPGTPCCSSNNSDSSASTPTGTPTDMDCSAX

SEQ ID NO: 5926 - protein, 243 aa, Triticum aestivum
  unsure (1)..(243): unsure at all Xaa locations
XASTXPPAVAEATAAAAAGVNTRLTGVRKKGEDKFGAAIMHPVTKTFLWLGTYSSPEVAACAYDLAARELKGAKAKLNFPYPLPPPARLVKEVIAAPRHRSHGHEAPLFQVVTLPPDPTSPPPPPPKLVVYFPFPFEVPASNPPPVPAYPFLHMPRPARARLSPQPAHAPGPKPQPPIQRMNVMVQAESCLSSSRKTLGASSSRCLVLKKPKLVVLPVTPSAPTEGTGDNFTKPWYFPDFPVV

SEQ ID NO: 5927 - protein, 270 aa, Triticum aestivum
  unsure (1)..(270): unsure at all Xaa locations
AQHTDQHSTTSLALQTIDRRNRLSXEEVRREASRASMVKTAAAGSTGDGAVAAKQQQLGGKMRTYKGVRMRSWGAWVSEIRAPGQKTRIWLGSHSTAEAAARAYDAALLCLKGASAAADLNFPVRFPFDLXXAAAMSPKSIQRVAAAAAAGASANVFDFAAADDSASANAVDFAGADDSASAVTPDDSLYVLQLLLPVAQVHGVRHDGPVQHLLRSGADSNGGRVQLGGRRRHCALELLNRSPGSRRTEETDKSLLKRRPELAMHGDNYP

SEQ ID NO: 5928 - protein, 64 aa, Triticum aestivum
  unsure (1)..(64): unsure at all Xaa locations
XLLRTRDSGGAAEXXEPTDAGVDAGRAFRGVRKRSWGKYAAEIRDSTRNGVRVWLGTFESPEAX

SEQ ID NO: 5929 - protein, 111 aa, Triticum aestivum
MVKNHPGSGTSRCDAAAAMAESGGGGGTAALCGGGSRQPAMAARQFKGVRMRSWGSWVSEIRAPHQKRRIWLGSYATPEAAARAYDAALLCLKGSDAVLNFPSSSSASPSS

SEQ ID NO: 5930 - protein, 278 aa, Zea mays
  unsure (1)..(278): unsure at all Xaa locations
MLLNPASETSVLDTIRQHLLEEPAAAEARPADESFGSLVADQWSGSLPFRTDDADDMVVFGVLQDAFAYGWLPDGSFVHVKPEPVRSPDSSSYHPCSYDGSPCFGXPGPXEPPLTPGTTTPGRGQEEAAAAMARGKHYRGVRQRPWGKFAAEIRDPARNGARVWLGTYDTAEDAALAYDRAAYRMRGSRALLNFPLRIGSGDKRPSPAPPEXXATSSDSSSSASGSHKRRKRGEAAAANMAMALVPPPSQLNRPPQPWFPAAPVEQAAMAPRVEQIVV

SEQ ID NO: 5931 - protein, 280 aa, Zea mays
  unsure (1)..(280): unsure at all Xaa locations
MLLNPASETSVLDTIRQHLLEEPAAAEARPADESFGSLVADQWSGSLPFRTDDADDMVVFGVLQDAFAYGWLPDGSFVHVKPEPVRSPDSSSYHPCSYDGSPCFGXPGPXEPPLTPGTTTPSSRGQEEAAAAMARGKHYRGVRQRPWGKFAAEIRDPARNGARVWLGTYDTAEDAALAYDRAAYRMRGSRALLNFPLRIGSGDKRPSPAPXXEPATSSDSSSSSASGSHKRRKRGEAAAANMAMALVPPPSQLNRPAQPWFPAAPVEQAAMAPRVEQIVV

SEQ ID NO: 5932 - protein, 276 aa, Zea mays
  unsure (1)..(276): unsure at all Xaa locations
MLLNPASEASVLVTIRQHLLEEPAAAEAPCRRXSFGSLVADQWSGSLPFRTDDADDMVVFGALQDAFAYGWLPDGSFVHVKPEPVRSPDSSSYPCSYDGSSCFGLLDPEPLTPGTTTPGRGQEEAAAAMARCLHYRWGRQRPWGKFAAEIRDPARNGARVWLGTYDTAEDAALAYDRAAYRMRGSRALLNFPLRIGSGDKRPSPAPXXEPATSSDSSSSWASGSHKRRKRGEAAAANMAMALVPPPSQLNRPAQPWFPAAPVEQAAMAPRVEQLVV

SEQ ID NO: 5933 - protein, 370 aa, Zea mays
  unsure (1)..(370): unsure at all Xaa locations
MNKPIPSRGWLQVGKVQRTRLRLYKPRPGPALASPFNSITSFPSTQAHRHTAHSSLNSPPASSAHHHKPNRELSPSRSFHSRMLLNPASXXLDTIRQHLLEEPPAAADESFGILVADQWSDSLPFRTDDADDMVVFGALQDAFAYGWLPDGSFAHVKPEPVRSPDSYYSSSYDGSCFGGLPYPEQPLTPXXARGRRQGRRGVSQRPWGRVGAENGDPGRTGARAGLGTYDTARDAALAYDRAPCRRRGSRALLNFPLRIGSGDKRPSPAPXXEPATSSDSSSSSASGSHKRRKQGEAAAANMALALVPPPSQLNRAPEPXAPPAPADQAAWPSRWGPRLRSVAGCAGERVPAAARGKRATAPPRGKQIVI

SEQ ID NO: 5934 - protein, 228 aa, Zea mays
  unsure (1)..(228): unsure at all Xaa locations
LACLQDAFAYGWLPDGSFAHVKPEPVRSPDSSYYSSAPASAASRTRSSHXRPAARARRPPRPAPXREEAAAAVARGKHYRGVRQRPWGKFAAEIRDPAKNGARVWLGTYDTAEDAALAYDRAAYRMRGSRALLNFPLRIGSEIAAAAAGDKRPLALPXXPATSSDSSSSSSSTGGSPKRRKRGEAAAANMAMALVPPPSQLSRPAQPWFPAAPVEQAAMPPRVEQLVI

SEQ ID NO: 5935 - protein, 160 aa, Zea mays
  unsure (1)..(160): unsure at all Xaa locations
MLLNPASEALVLDSIRQHLMEDTAAAAAPVAEARRQRPAYCRSASFGSLVADQWSESLPFRADDSDDMVVYGALRDAFSCGWLPDGSFAAVKPEPLLPSPDSAYACDGPSCFGFLEPETPPATSPGEAXRGXXXXXXXXEAAAAXARGXXYRGXRXRPGX

SEQ ID NO: 5936 - protein, 111 aa, Zea mays
  unsure (1)..(111): unsure at all Xaa locations
MLLNPACEAAAPMDSIRHHLLDEPAAAATASAAPRPVYCRSTSFGSLVADQWSESLPFRPDDADDMVVFGALRDAFSQGWLPDGSFAAVKPEPLAFPDSPYXRGSYPCLGX

SEQ ID NO: 5937 - protein, 226 aa, Zea mays
  unsure (1)..(226): unsure at all Xaa locations
MSLSLERSSSVVRDVATPAPPATSGASAPYPRAGAGASLSRAAAAQHSQYLPLNEDDSLXDMVLFDVLREASGPGSASAAAPDTXPAALVAAYAQGARXSGAARRGSRTAYAPEAATAGRHYRGVRRRPWGKYAAEIRDPARHGARLWLGTFATAEEAAAAYDRAAVRMRGAKALLNFPPGVAGCGSAATATAKQAGLTEAKXTANAISKEPAAKLCNVIVWNSSI

SEQ ID NO: 5938 - protein, 289 aa, Zea mays
  unsure (1)..(289): unsure at all Xaa locations
XDQLLGGEACLPVVPNSAAYTASSVHYHHHHPTQAAFLPQPAQQVAYVDLTNXXYAADATACDCEAAFRAAEPVMIRFGGDPSPVSDSDPSRRPLLLTVSLPPPASHAWGPAAAVXXLPLEAAAAALDANDFRKYRGVRQRPWGKFAAEIRDPKRRGSRVWLGTYDTAVDAARAYDRAAFRMRGAKAILNFPNEVGSRGADFLAPPPAPPPVAAAATSSSSQNKRKLRDAEATAGGAAEPAAANKSVKVEASGSPAPSLSPATTTTTTTTTTTASTVTTCCSPSSGSAA

SEQ ID NO: 5939 - protein, 297 aa, Zea mays
  unsure (1)..(297): unsure at all Xaa locations
XDLQLISDQLLGGEACLPVVPNAAAYTASSVHYHHPTQAAFLQQPAQQVAYVDLTNXXYAADATACDCEAAFRAAEPVMIRFGGDPSPVSDSDPSRRPLLLTVSLPPPASHAWGPAAAVXXLPLEAAAAALDANDFRKYRGVRQRPWGKFAAEIRDPKRRGSRVWLGTYDTAVDAARAYDRAAFRMRGAKAILNFPNEVGSRGADFLAPPPPPVAXPPTSSSSQNKRKLRDAEATAGGAAEPAAASKSVKAAEASGSPAPPSLSPATTTTTTTTTAASTVTTCCSPSSGSAAGRLLX

SEQ ID NO: 5940 - protein, 92 aa, Zea mays
  unsure (1)..(92): unsure at all Xaa locations
MLLNPASEASVLDTIRQHLLEEPAXXESFGSLVADQWSGSLPFRTDDADDMVVFGALQDAFAYGWLPDGSFVHVKPEPVRSPDSSSYPCSYD

SEQ ID NO: 5941 - protein, 246 aa, Zea mays
  unsure (1)..(246): unsure at all Xaa locations
MRVVSALAXDQVCLCACTRPLPRTSXSKNMSLSLERSSSVVRDVATPAPPATSGASAPYRAGASLSLPGAAAAQHSQYLPLNEDDSLDMVLFDVLREASGSASTSAAAPATXPAALVAAYAEGARXSGAARRGSRTAYAPKAATAGRHYRGVRRRPWGKYAAEIRDPARHGARLWLGTFATAEEAAAAXDRAAVRMRGAKALLNFPPAVAGCGSAATATAKQAGLTEAKXTANAISKEPAAKLCVM

SEQ ID NO: 5942 - protein, 334 aa, Zea mays
  unsure (1)..(334): unsure at all Xaa locations
KRKIPLNLDFSGEIDDXXSLQLIREQLLGGEASLPIDAAAYSASVVHHPTQAEFHQPAAFLPQPSHVAYVDLTNEYAADATVASAGGEAAFRAEPVMIRFGGEPSPVSDPSRRPLLTISLPPASHAWGPAAVPLEAPGAAALDANDFRKYRGVRQRPWGKFAAEIRDPKKRGSRVWLGTYDTAIEAARAYDRAAFRMRGAKAILNFPNEVGTRGADFLAPPPPPPQAAATSQNKRKLMHDAAATAGAGAGAEPAKSVKAEASGSPASSLSPATTTTPASTVTTCSPSSDAGAGHEMFPVTPSSWTWEQLEGVFGILSPLSTTHPQLGFPEVTVN

SEQ ID NO: 5943 - protein, 101 aa, Zea mays
  unsure (1)..(101): unsure at all Xaa locations
MLVIRAYXAAAPMDSIRHHLLDEXXPADAPSAAPRPVYCRSTSFRSLVADQWSESLPFRPDHPDYMVVFGALRDAFSQGWLPHGSFAAMKPEXPGVPGLPL

SEQ ID NO: 5944 - protein, 295 aa, Zea mays
  unsure (1)..(295): unsure at all Xaa locations
TAALNCEIEAVRTPCSRAGLSSTQPRVMAMLREHLDLIRAHLLDDNHDAVTAPSPSPSPPGRRPLPALSVSLPPRPAVVLXSSSTXGRRRRRCRFLSRSSTAARNXEEDDFRRYRGVRQRPWGKYAAEIRDPARKGARVWLGTYDTAVEAARAYDRAAFRLRGSKAILNFPNEVALSTAAWWATPAPPPQPSATVAGNKRARSPQEQDARCMVREVKKERXXRSPQAEGRTTSGRMSRXRXAICSLPPLSPLSPHPHLAVPQLYVXADCLTXCRSKTGTVVLLLPDDSLLSSLIC

SEQ ID NO: 5945 - protein, 332 aa, Zea mays
  unsure (1)..(332): unsure at all Xaa locations
MCGGAILAELIPPTRRVASKPVTEGHLWSASSKKAGSGRDKRHQHEYADDDFEAAFEDFDDDFDVHEDDEDGHFVFSSKSALSPALHDGRAASQKKQRGRQFRGIRQRPWGKWAAEIRDPHKGTRVWLGTFSTAEDAARAYDVEARRLRGSKAKVNFPAASGRARGRARPRRXXTTATHEPPPSTARSAASRRGRGRKGSPPXSQKLPFDVGGGLFFDMAFPTFPASPPPQAVDTSFAGSTATSETGSPAKRPRCDXXDSSEGGSGSALELADELAFDPFVLLQMPYSGGYDDDSLDGLFAADEAVQQDVDGMDGVRLWSFDEFPAVDGSVF

SEQ ID NO: 5946 - protein, 332 aa, Zea mays
  unsure (1)..(332): unsure at all Xaa locations
MCGGAILAELIPPTRRVASKPVTEGHLWSASSKKAGSGRDKRHQHEYADDDFEAAFEDFDDDFDVHEDDEDGHFVFSSKSALSPALHDGRAASQKKQRGRQFRGIRQRPWGKWAAEIRDPHKGTRVWLGTFSTAEDAARAYDVEARRLRGSKAKVNFPAASGRARGRARPRRXXTTATHEPPPSTARSAASRRGRGRKGSPPXSQKLPFDVGGGLFFDMAFPTFPASPPPQAVDTSFAGSTATSETGSPAKRPRCDXXDSSEGGSGSALELADELAFDPFVLLQMPYSGGYDDDSLDGLFAADEAVQQDVDGMDGVRLWSFDEFPPVDGSVF

SEQ ID NO: 5947 - protein, 133 aa, Zea mays
  unsure (1)..(133): unsure at all Xaa locations
CSSSTXGRRRRRCRFLSRSSTAARNXEEDDFRRYRGVRQRPWGKYAAEIRDPARKGARVWLGTYDTAVEAARAYDRAAFRLRGSKAILNFPNEVALSTAAWVREVKKERIQXSPQAEGRTTSGRMSRXRGRSA

SEQ ID NO: 5948 - protein, 256 aa, Zea mays
  unsure (1)..(256): unsure at all Xaa locations
MCGGAILAELIPPTRRVASKPVTEGHLWSASSKKAGSGRDKRHQHEYADDDFEAAFEDFDDDFDVHEDDEDGHFVFSSKSAFSPGHDGRAASQKKQRGRQFRGIRQRPWGKWAAEIRDPHKGTRVWLGTFSTAEDAARAYDVEARRLRGSKAKVNFPPASGRARARPRRGDDGNPRTAPEPXHPAAAAAAAAQPALLPRGGRVRETQRKEGNAAVKPEATQSFDVGALFFNMAFPTFPASSPPQDVEASFLGSTAX

SEQ ID NO: 5949 - protein, 130 aa, Zea mays
  unsure (1)..(130): unsure at all Xaa locations
STINGGRQEGXGKYRGVRKRPWGKFAAEIRDPERGGSRVWLGTFDTAEEAARAYDRAAFTMKGATAVLNFPTSGGSAAAAPGGRTSGGGSSSSTTSSAPAREKVELECLDDRVLEELLAXGQVQQELMKR

SEQ ID NO: 5950 - protein, 109 aa, Zea mays
  unsure (1)..(109): unsure at all Xaa locations
EQHCCPEPEEDDFRRYRGVRQRPWGKYAAEIRDPSRKGARVWLGTYDTAVEAARAYDRAAFRLRGSKAILNFPNEVALSTAAWWSGFRSPQAEGRTTSGRMSRXRGRSA

SEQ ID NO: 5951 - protein, 423 aa, Zea mays
  unsure (1)..(423): unsure at all Xaa locations
MGHEAGPALPRTPQFRITHPTPPPATASSDSLPPHPTVPLTPAQPASPQPSDSEHRRHPAMCGGAILSDIIPPPPPRRVTAGHLWPESKKXXRRAAAGRRRAPVEQEQEEDFEADFEEFEVESGESELESEDDKPKPFAAPSSALARGGLNTGAAGVDGPAANSVKRKRKNQFRGIRRRPWGKWAAEIRDPRKGVRVWLGTFNSPEEAARAYDAEARRIRGKKAKVNFPDEVPTAVSQKRRAAGPASLKAPKMDVEEEKPIIKLAVNNMTNSNAYHYPAVDNIIPEPFMQTQNMPFAPLVNYAXXLVNLSSDQGSNSFGCSDFSLENDSRTPDITSVPAPVATLAAVGESVFVQNTAGHAVASPATGNTGVDLAELEPYMNFLMDGGSDDSISTLLSCDGSQDVVSNMDLWSFEDMPMSAGFY

SEQ ID NO: 5952 - protein, 191 aa, Zea mays
  unsure (1)..(191): unsure at all Xaa locations
XPSNQEAGRLRHHRCSSSKXSSAAAACKSYRGVRRRPWGKFAAEIRDTRRRGARVWLGTFATADDAALAYDKAALRMRGPRACLNFPLDVVQRALADGGGRAETTPRVLRRKRRRANHDDAAGGDDTRSDGSVAAATARDPTTTMVSFACAKKDDQVMTPLMAQERSVSDPGAVIGSRTSVATRPARGPNX

SEQ ID NO: 5953 - protein, 617 aa, Zea mays
  unsure (1)..(617): unsure at all Xaa locations
MSSRRAGTNPRARRALRRECLCFRAESLRLREIEVMMALQAQGTRVPLVLALFLLLAGCGSEAQPLVPALFTFGDSSVDVGNNDYLHTIIKANFPPYGRDFANHVATGRFCNGKLATDITADTLGFTTYPAAYLSPQASGQNLLIGANFASAGSGYYDHTALMYHARGSRNSASRTPPQRPRPQGPRRRPGSPTHSAIPHHAEAERPTQNPTPPPATASSDSLPTPPHPTVPLTPAQPASPQPSDSGHRRHPAMCGGAILSDIIPPPPPRRVTAGHLWPESKKXXRRAASGRRGAPVEQHEQEEDFEADFEEFEVESGESELESXXDEPKPFAAPRSALARGGLNTGAAGVDGPAANSVKRKRKNQFRGIRRRPWGKWAAEIRDPRKGVRVWLGTFNSPEEAARAYDAEARRIRGKKAKVNFPDEVPTAVSQKRRAAGPASLKAPKMDVEEEKPIIKLAVNNMTNSNAYHYPAVDNIIPEPFMQTQNMPFAPLVNYAXXLVNLSSDQGSNSFGCSDFSLENDSRTPDITSVPAPVATLAAVGESVFVQNTAGHAVAPPATGNTGVDLAELEPYMNFLMDGGSDDSISTLLSCDGSQDVVSNMDLWSFEDMPMSAGFY

SEQ ID NO: 5954 - protein, 119 aa, Zea mays
  unsure (1)..(119): unsure at all Xaa locations
XFGSSDDIRKKHYRGVRQRPWGKWAAEIRDPKKAARVWLGTFDTAEAAAMAYDAAALRFKGNKAKLNFPERVVMPIQPQTNNNNSTSSSAPTTHALLLFHHHNKYIIIVLFQQKGFQIX

SEQ ID NO: 5955 - protein, 307 aa, Zea mays
  unsure (1)..(307): unsure at all Xaa locations
ADADAWRVKRTTPPTHYISVAXAYPTLRRVRVCRACARLASXCCAQCTHPAHAGGEQAAXXDVQGAAAMEGHYSPTASAAEAGGXXRRFRGVRQRPWGKWAAEIRDPHKAARVWLGTFDTAEAAARAYDEAALRFRGSRAKLNFPEDARLTTAPSAAVAPAAAAGSTTTMAVAASAGXVVPAGGQRRRRXSADYLQYQMMLLQGATSGQGSSSSHGGYPLYYDYGGHGGAGAGAGGGAMSSSYSFPASTVTVASVPSSSASSAPSYGEAAQWAGSWPESSAWSYPATTASWSGSSQYEYPPSTRPPQ

SEQ ID NO: 5956 - protein, 363 aa, Zea mays
  unsure (1)..(363): unsure at all Xaa locations
MCGGAILSDIIPPPPPRRVTAGHLWPESKKXXRRAAAGRRRAPVEQEQEEDFEADFEEFEVESGESELESEDDKPKPFAAPSSALARGGLNTGAAGVDGPAANSVKRKRKNQFRGIRRRPWGKWAAEIRDPRKGVRVWLGTFNSPEEAARAYDAEARRIRGKKAKVNFPDEVPTAVSQKRRAAGLASLKAPKMDVEEEKPIIKLAVNNMTNSNAYHYPAVDNIIPEPFMQTQNMPFAPLVNYAXXLVNLSSDQGSNSFGCSDFSLENDSRTPDITSVPAPVATLAAVGESAFVQNTAGHAVAPPATGNTGVDLAELEPYMDFLMDGGSDDSISTLLSCDGSQDVVSNMDLWSFDDMPMSAGFY

SEQ ID NO: 5957 - protein, 243 aa, Zea mays
  unsure (1)..(243): unsure at all Xaa locations
TQSAGAAAXEEHQATGRQLRCPGPETPRRRYRGVRQRPWGKWAAEIRDPHKAARVWLGTFETAEAAARAYDEAALRFRGSRAKLNFPEDARLYPASTAGAAAPLAAAASTSPPVYSGGVQGSSDYLRYHQMLLQASTGSQGTLLPFYGGGMSNPYGGGAAMTGSYGGAGGGNTSGSLGSYYSFPASSVSVATVPSSTSSASGYYYSSPHDSQHSEASAAADWNWESALAWPDSSQYPPPPHTQ

SEQ ID NO: 5958 - protein, 134 aa, Zea mays
  unsure (1)..(134): unsure at all Xaa locations
GDWSKDGGGGEPTKYRGVRRRPWGKYAAEIRDSSRHGVRIWLGTFDTAEEAARAYDRSAYSMRGANAVLNFPEDAHAYAAACRGSGSSSSSSRHXGSSSSSSGRDVIELEYLDDEVLQEMLRNHEPSSSARKKM

SEQ ID NO: 5959 - protein, 245 aa, Zea mays
MAPRVADKSPLPLATGLKLGVGGGVGGMGLGPHYRGVRKRPWGRYAAEIRDPAKKSRVWLGTYDTAEEAAKAYDVAAREFRGAKAKTNFPFPLAVAVAGGAGSPSSDSTTLESSCGGSGCGVEAPAVQAAMPLTPALDLDLFHRAAAVSAVTTAGMPFPFKAFPVVRPTPHQYFLYNQAAAAAAAAGYRMVKVASASVTVAAVARSDSDSSTSSVVDRTCSPPAVTAKKEVSFELDLNWPPPAEN

SEQ ID NO: 5960 - protein, 401 aa, Zea mays
  unsure (1)..(401): unsure at all Xaa locations
SHDQQQSASRTPLHRPQPQAQIPSHPTPPSRSLQPSPRPHSPATASTGCIQPPRRVTAGHLWPESKKXXRRAAAGRRRAPVEQEQEEDFEADFEEFEVESGESELESEDDKPKSFAAPSSALARGGLNTGAAGVDGPAANSVKRKRKNQFRGIRRRPWGKWAAEIRDPRKGVRVWLGTFNSPEEAARAYDAEARRIRGKKAKVNFPDEVPTAVSQKRRAAGLASLKAPKMDVEEEKPIIKLGSEXNMTNSNAYHYPAVDNIIPEPFMQTQNMPFAPLVNYAXXLVNLSSDQGSNSFGCSDFSLENDSRTPDITSVPAPVATLAAVGESAFVQNTAGHAVAPPATGNTGVDLAELEPYMDFLMDGGSDDSISTLLSCDGSQDVVSNMDLWSFDDMPMSAGFY

SEQ ID NO: 5961 - protein, 358 aa, Zea mays
  unsure (1)..(358): unsure at all Xaa locations
ARASVRSPNNLQLSSTHARIDRSSSTRRRRRRRQIDRQLTKVDPRRRHGKRPLPGRGGRGGGGGAAPGPAARKARAAGGASPXAAVSQLQGATFSGGGGSSSSSVIGGPSPPQAYAQYYYSARADNDASAVASALAHVIRASPDQLPPQQAPALYGGRPGQPSAGRPPASVCAPLSRSRRPRRRRXXGGASMPTAGRRRHYRGVRQRPWGKWAAEIRDPXHKAARVWLGTFDTAEEAANAYDAANIRFRGASATTNFPXDPLLAPSKATIISLTPEPGKVITLPPVPVKPTFPVQVKEVGGSWGGLVKGASSEVKAFAPKPVWKMIPRVHQKFPGCADGSGLRAIHAASIHVEEVGGG

SEQ ID NO: 5962 - protein, 266 aa, Zea mays
RAGRIGYLEAGRPGHSSPAHQHNHHHRLAVVTRSPPSMAPRNALPAASAVANGMVMEPRFRGVRKRPWGRFAAEIRDPARKARVWLGTFDTAEAAARAYDAAALHFRGPKAKTNFPIDCLVLVAFAALPPPPPPKKPAAVTVSPSSSSTVESSSSSSSRDSPATPPRAASPSQQAPSLDLSLGGTPAMVAAQPFLFLDPRLAVTVAVPAPVPYRPTAVAAGANKRDAASCREEEQSDTGSSSSVVDASPAVGVGFDLNMPPPAEVA

SEQ ID NO: 5963 - protein, 110 aa, Zea mays
  unsure (1)..(110): unsure at all Xaa locations
MASGPSGGGGEPTKYRGVRRRPWGKYAAEIRDSSRHGVRIWLGTFDTAEEAARAYDRSAYSMRGANAVLNFPEDAPAYAAAASRGSAGGSSSSSGRDVIEFEYLDDEVLX

SEQ ID NO: 5964 - protein, 326 aa, Zea mays
  unsure (1)..(326): unsure at all Xaa locations
MAAAIDMYKYYNTSAHQIASSSSPSDQELAKALEPFITSASSSSSSSXXTMATRPLHPSSYATSPLPTPAAASSQLPPLYSSPYAAPCMTGQMGLNQLGPAQIQQIQAQXHVPAXQQQQRGLHAAFLGPRAQPMKQSGXXAAAAGAGXXAQSKLYRGVRQRHWGKWVAEIRLPKNRTRLWLGTFDTAEDAALAYDKAAFRLRGDTARLNFPALRRGGAHLAGPLHASVDAKLTAICQSLSESKSKSGSSXATSRPRPRRTPPSARRRPTEGEEESGSAGSPPSPXAGAARAGDGEAGLPEAPWDETETFHLRKYPSWEIDWDSILS

SEQ ID NO: 5965 - protein, 255 aa, Zea mays
  unsure (1)..(255): unsure at all Xaa locations
SEDPGFDPRRRQERGGGVRRQAGXXREQEQEDAIIVAALRHVVSGYSTPPPEVVVTVAGGEACGTCGIDGCLGCDFFGAPEXXAQEAVSCGTGQVATTASVGGGAAAAALRPRRRRNRNMYRGVRQRPWGKWAAEIRDPRRAARVWLGTFDTAEEAARAYDCAAVEFRGPRAKLNFPGHXGAVPGPXGDTAAAADTETLTPSPGEWQLGGGAGDELWEGLQDLMKQDEVDRWLAPVFGAASSFXAVVLCTHKRGY

SEQ ID NO: 5966 - protein, 253 aa, Zea mays
  unsure (1)..(253): unsure at all Xaa locations
TSRPARGALHXXGQMGLNQLGPAQIQQIHHVPAAAAAEGPARGVPGPAGAADEAVRVAVAAAGAXAPAQSKLYRGVRQRHWGKWVAEIRLPKNRTRLWLGTFDTAEDAALAYDKAAFRLRGDTARLNFPALRRGGAHLAGPLHASVDAKLTAICQSLSESKSKSGSSGDESAASPPDSPKCXXASTTTGEGEEESGSAGSPPPPXXPPTLAPPVPVPEXXAKLDFTEAPWDETEAFHLRKYPSWEIDWDSILS

SEQ ID NO: 5967 - protein, 169 aa, Zea mays
  unsure (1)..(169): unsure at all Xaa locations
MAPKRSSEERAAAEQEQPRLRGVRKRPWGRYAAEIRDPVRKARVWLGTFDTPEQAARAYDAAARRLRGPRATTNYPGDVVREAPCTAPALAASASGSTESSSSSSSRDDGHPPPPLPTAPSSLGLGLGLFPXRRWPPSRACSWTRRRWRGRKVGFDFDLNLPPPAEMVM

SEQ ID NO: 5968 - protein, 364 aa, Zea mays
  unsure (1)..(364): unsure at all Xaa locations
MCGGAILSDIIPPPPPRRVTAGHLWPESKKXXRRAAAGRRRAPVEQEQEEDFEADFEEFEVESGESELESEDDKPKPFAAPSSALARGGLNTGAAGVDGPAANSVKRKRKNQFRGIRRRPWGKWAAEIRDPRKGVRVWLGTFNSPEXEAARAYDAEARRIRGKKAKVNFPDEVPTAVSQKRRAAGLASLKAPKMDVEEEKPIIKPAVNNMTNSNAYHYPAVDNIIPEPFMQTQDMPFAPLVNYAXXLVNLSSDQGSNSFGCSDFSLENDSRTPDITSVPAPVATLAAVGESAFVQNTAGHAVAPPATGNAGVDLAELEPYMNFLMDGGSDDSISTLLSCDGSQDVVSNMDLWSFEDMPMSAGFY

SEQ ID NO: 5969 - protein, 208 aa, Zea mays
  unsure (1)..(208): unsure at all Xaa locations
MCGGAIIFDYIPARRRVSTADFWPGSDSTDPQRAPPPRAKAKPGRRKNQYRGIRQRPWGKWAAEIRDPVKGVRVWLGTYPTAEAAARAYDRAARRIRGAKAKVNFPSDTSSSVTVPTAVSRSAAAAAAQAPAVLPPPKVEAQTQXXSDEVKELSEELMAYENYMNFLGIPYMEGGTTAASATTAAAAPAGLWSFEDYYYPPSLSLFTE

SEQ ID NO: 5970 - protein, 164 aa, Zea mays
  unsure (1)..(164): unsure at all Xaa locations
MAPRTSEKTMTPAAAAAATGLALSVSGGAGASGPHFRGVRKRPWGRYAAEIRDPAKKSRVWLGTFDTAEEAARAYDAAARDYRGPKAKTNFPFPSSGSLPAAKAVTGGGGSRSSNSSTVESFSSGSDVQAXAHAGHAAPTVSGARPVPPRGGCGHGHGPPPYGS

SEQ ID NO: 5971 - protein, 167 aa, Zea mays
  unsure (1)..(167): unsure at all Xaa locations
XPSRVNLQEEAAAGGGAGGDAPLIGVRRRPWGKFAAEIRDSTRNGERVWIGTFDTPEAAALAYDQAAYSMRSSSAVLNFPVEHVQESLRALGLSVDAGVSPVLALKRRHCIRKRSKNKTAAGAKEERTKVAASSSSRGHGGHAPCVLELEDLGADYLEELLALSDQX

SEQ ID NO: 5972 - protein, 297 aa, Zea mays
  unsure (1)..(297): unsure at all Xaa locations
MAAAIDLSGEELMRALEPFIRDASAHGSSPLLHPHQPLSPSSPFSFHQAVAVAAASSYGGNYPFAAPDEAGQLSPSQMQYIQARLHLQRRPVLGPRAQPMKASASXXAPAPARPQKLYRGVRQRHWGKWVAEIRLPRNRTRLWLGTFDTAEEAALAYDQAAYRLRGDAARLNFPDNAASRGPLHASVDAKLQSLCQSIAASKKGAKKPASAAAAASSSAPTSNCSSPSSDDATSSCLESATESSCPSRSPSPSASPGPTVPEMQQLDFSEAPWDEAAGFALTKYPSYEIDWDSLLAN

SEQ ID NO: 5973 - protein, 360 aa, Zea mays
  unsure (1)..(360): unsure at all Xaa locations
MCGGAILSDIIPPPPPRRVTAGHLWPESKKPRRAASGRRGAPVEQHEQEEDFEADFEEFEVESGESELESEDEPKPFAAPRSALARGGLNTXXAAGVDGPAANSVKRKRKNQFRGIRRRPWGKWAAEIRDPRKGVRVWLGTFNSPEEAARAYDAEARRIRGKKAKVNFPDAAVSQKRRAAGPASLKAPKMDVEEEKPIIKLAVNNMTNSNAYHYPAASATTSYXEPFMQTQNMPFAPLVNYAALVNLSSDQGSNSFGCSDFSLENDSRTPDITSVPAPVATLAAVGESVFVQNTAGPVASPATGNTGVDLAELEPYMNFLMDGGSDDSISTLLSCDGSQDVVSNMDLWSFEDMPMSAGFY

SEQ ID NO: 5974 - protein, 327 aa, Zea mays
  unsure (1)..(327): unsure at all Xaa locations
MCGGAILAELIPTTPARRGGAAWPAGKCKRRKADDFEAAFREFDEDSEEEEEEDEGVVESKPAXSSSAPRPRRRSPGRARSSXSRRRAPDQQYRGVRRRPWGKWAAEIRDPVKGVRVWLGTFPSAEAAARAYDHAARHIRGPRAKLNFPXXPPPPPPGPPPAASAPAXADAVIDLEEQEQRPAAAALXXHEAAECSGSDALPDFSWQGVSAAYEAPRAAPGLRLXEARPESAADEASPRASDSESDALFDSLLFGDQFAFFDAGAYESLDSLFSADAVQSNAAAAADQDMPLWSFDDGCLVEDXPLVLSFGDCCCVLSFVNYDLFFF

SEQ ID NO: 5975 - protein, 351 aa, Zea mays
  unsure (1)..(351): unsure at all Xaa locations
PAGPGSNCLLQPSISALCCAPRIVYARSRDLSLDSLGYPLLSVSCKNPWRLRRXIGTPATTPRFPPPCMAXGRAGQQXXLVRALIAPPMPFAYPCSGVEQQSAAGSFLGAGGGGLTPAQILQVQSRLQFXAPAGGGRGRHPADEAAGRAAAAXXPAVSKLYRGVRQRHWGKWVAEIRLPRNRTRLWLGTFDTAEEAALAYDSAAFRLRGDSARLNFPELRRGGQHLGPPLHAAVDAKXXTPSATARTSSCRRRRAGATTXTVVATATATATTAPSPFSSASPHVKSEPGSSGSDSSFXXQTATCPPLGPPTXVLDMQLLDFSEASWDDSESFRLRKYPSLEIDWDSILLIS

SEQ ID NO: 5976 - protein, 209 aa, Zea mays
  unsure (1)..(209): unsure at all Xaa locations
DPLESTCRRRRRPAAAPAATRXLIGVRRRPWGKFAAEIRDSTRNGERVWIGTFDTPEAAALAYDQAAYSMRSSSAVLNFPVEHVQESLRALGLSVDAGVSPVLALKRRHCIRKRLPKNKTAAGAKEERTKQKQQQAAPCVLELEDLGADYLEELLALSDQXANYSSSTKSCLXVNHQCTSMNYRVLKXXMFCSTVMRARLLGQAHTHAF

SEQ ID NO: 5977 - protein, 194 aa, Zea mays
  unsure (1)..(194): unsure at all Xaa locations
AQPRRAKLAREASIAERTQRQSEHARLQRRTDSSVHGAQEEQRGARGGGAGEPRLRGVRKRPWGRYAAEIRDPVRKARVWLGTFDTPEQAARAYDAAARRLRGPRATTNYPGDAASASGSTESSSSSSSRDDGHPPPPMPPAPSSLGLGLGXLPGDGGHPAGHLNIIYLPLFKKRETGKTLALPNLIPFKENPF

SEQ ID NO: 5978 - protein, 409 aa, Zea mays
  unsure (1)..(409): unsure at all Xaa locations
MCGGAILSGLIPPSGVPAAAAAAKKKQQRRATADLLWPGPGKKGAPREEDFEADFREFERGLGEDDVDGAGDEVQELPLPEPARLAFAAAVGAPRTAVDGVMTPKDGEGDMPTTANNSXQQISARRKNQYRGIRRRPWGKWAAEIRDPSKGXVRVWLGTYSTXAEEAARAYDAEARRIRGKKAKVNFRDEAAAAGAQKPPAXQLLQLRASAARLAPPPPPPKFRADEVFGNMDGGSNDLFAMLAFSDSKAVEEVLVDEPLLPGSKRSAANMLLLSDQSSDSYGSCDLGWEWDWDDDTMTSDYASVFAPAAPSNVVPALVHASGPVSKRTRSSYGVAMPGGFDPETNYQYRPLPYVVESSPSSDGASTDDMDCLQMMRAGDVPQDGASGGGGGAGDIWSLDELLMAAGAY

SEQ ID NO: 5979 - protein, 221 aa, Zea mays
  unsure (1)..(221): unsure at all Xaa locations
PLTRSSAPCRVEPASRPIESERIRAPGRALLVGGPTQRTTAGGSDAAPRYRGVRKRPWGRFAAEIRDPAKRARVWLGTFDSAEAAARAYDVAARALRGPLARTNFPXXSPPPPAAPXPTCSSGSTVESSSGPRAGDPRARAAHRGRAAAKPRRPPRQAPPPPTDADCHSDCASSASVVDDGDDASTVRSRARPSLDLNLPAPLDLDGGHDLGFCTDLRLCL

SEQ ID NO: 5980 - protein, 267 aa, Zea mays
  unsure (1)..(267): unsure at all Xaa locations
DPQRQPTPPQPCPAHHHQHLAPSSAVVVTRSNAPPSMAPKNALPAASGMTLEPRYRGVRKRPWGRYAAEIRDPARKARVWLGTFDTAEAAARAYDAAALHFRGPKAKTNFPVAFATATDTRALPLPLRLPLPPPPPKKLSXEPERQHRGVLVPGLARRAGPRAVARPXSLGMPAMVAAQPFLFLDPRLAVTVAVAAPVPRRPTAAAAGAGASKQAAYSCCREDEQSDTGSSSSVVDASPAVGVGFDLNMPPPGEVAXLDRAAALKDX

SEQ ID NO: 5981 - protein, 237 aa, Zea mays
PCPSAQPPPPPPGRNVTRSPPSMAPRNAVPAASAVANGMVMEPRFRGVRKRPWGRFAAEIRDPARKARVWLGTFDTAEAAARAYDAAALHFRGPKAKTNFPVAFAALPPPPPKKYLHPAAVTVSPSSSSTVESSSSSSRDSPATPPRAASPSQQAPSLDLSLGGTPAMVAAQPFLFLDPRLAVTVAVPAPAGANKHAAASCREEEQSDTGSSSSVVDASPAVGVGFDLNMPPPAEVA

SEQ ID NO: 5982 - protein, 340 aa, Zea mays
  unsure (1)..(340): unsure at all Xaa locations
MCGGAILAELIPTTPARRGGAAWPAGKCKRRKANDFEAAFREFDEDSEEEEEDEGVVESKPAFVVRASSAATQPRARQEQRSRRRAPDQQQYRGVRRRPWGKWAAEIRDPVKGVRVWLGTFPSAEAAARAYDHAARGIRGPRAKLNFPXXPPPPPPGPPPAASAPXTADADAVIDLEEQEQRPAAAALKHEAAECSGSDALPDFSWQGVSAAYEAPRAAPGLRLXEARPESAADEASPRASDSESDALFDSLLFGDQFAFFDAGAYESLDSLFSADAVQSNAAAAADQDMPLWSFDDGCLVEDXPLVLSFGDCCCVLSFVNYDLFFFWSFCSCISVSMVS

SEQ ID NO: 5983 - protein, 243 aa, Zea mays
  unsure (1)..(243): unsure at all Xaa locations
RHAAPAQRAHGRHXAAESDSFSDDMEAASSESSSSACSANSQQEATRRPQQQPDGGHSNGSNKSSKKQHQQQPPAPYIGVRKRPWGKFAAEIRDSTRKGARVWLGTFDSPEAAAMAYDQAAFSVRGAAAVLNFPVERVQESLRALALSSASSAAGSPVLALKCRHSIRKRSPXXRTRTRTRSRSGSNRVXRGRRRTTAAAVPHQXXVELEDLGADYLDELLRVSSEFHWQXPIANGGPARCKR

SEQ ID NO: 5984 - protein, 296 aa, Zea mays
  unsure (1)..(296): unsure at all Xaa locations
MAATIDLSGEELMRALEPFIRDASAHGSSPLLHPHQPLSPSSPFSFHQAVAAASSYGGNYPFAAADEAGQLSPSQMQYIQARLHLQRRPVLGPRAQPMKASASXXAPAPARPQKLYRGVRQRHWGKWVAEIRLPRNRTRLWLGTFDTAEEAALAYDQAAYRLRGDAARLNFPDNAASRGPLQPPSDAKLQSLCQSIAASKKGAKKPASAAAATSTSAPTSNCCSSPSSDDATSSCLESATESSCPSRSPSPSASPGPTVPEMQQLDFSEAPWDEAAGFALTKYPSYEIDWDSLLAN

SEQ ID NO: 5985 - protein, 175 aa, Zea mays
  unsure (1)..(175): unsure at all Xaa locations
MCGGAIIADFVPAGARRPATDXTPCPPPSSPVLRCEDHPELPLPAPGRKTAYRGIRRRPWGRWAAEIRDPRKGARVWLGTYATPEDAARAYDVAAREIRGPKAKLNFPPAVGGGGGGARAPAPAAAKRRRKSAAAEESSASSPPAAAAAAVVAGACCXTENXSKKTEIWSVKKKK

SEQ ID NO: 5986 - protein, 352 aa, Zea mays
  unsure (1)..(352): unsure at all Xaa locations
MCGGAILAELIPTTPARRGGAAWPAGKCKRRKANDFEAAFREFDEDSEEEEEDDEGVVESKPAXSSSAPRPRRRSPGRARSSXSRRRAPDQQYRGVRRRPWGKWAAEIRDPVKGVRVWLGTFPSAEAAARAYDHAARHIRGPRAKLNFPSXXPPPPLPGPPPAASAPXTADADAVIDLEEQEQRPAAAALKHEAAECSGSDALPDFSWQGVSAAYDEACAAPGLRLXEARPESAADEASPRASDSESDAMFDSLLFGDQFAFFDAGAYESLDSLFSADAVQSNAAAAADQDMPLWSFDDGCLVEDXPLVLSFGDCCCVLSFVNYDLFFFFFEFLLMYICIDGELNEIILLRK

SEQ ID NO: 5987 - protein, 226 aa, Zea mays
  unsure (1)..(226): unsure at all Xaa locations
MCGGAIIADFVPAGARRPATDDTMSASSSEDHPELPLPLPAPAPGRKTAYRGIRRRPWGRWAAEIRDPRKGARVWLGTYATPEDAARAYDVAAREIRGPKAKLNFPPAVGGGGGARAPAPAAAKRRRKSAAAEESSASSPPAAVVVAGGGEEALRDCMSGLEAFLGLQDADEGGGVEAWDAVVLAXAGVRRSRAAGGPSPSPSARVPSLXTAAAAVLDRVIILLVV

SEQ ID NO: 5988 - protein, 116 aa, Zea mays
  unsure (1)..(116): unsure at all Xaa locations
XKFRGVRRRPWGKFAAEIRDPWRGVRVWLGTFDTAEEAARVYDTAAIQLRGANATTNFSAAANSGSRAGQRDPATPGYESGTESSPAASSPTSVLRKVPSLSSLAEDDSCAAPCEX

SEQ ID NO: 5989 - protein, 255 aa, Zea mays
  unsure (1)..(255): unsure at all Xaa locations
GRDKSFLTSALLQLQSVLLKWNRAILLPPPLPATATLPPHHPRGSRSTTTTTRPTATTRFYSSSTQFSSAWTTTTLPPPTTAAAPAGXSSSPSPSPSSSSEATTTASPPPSTPAQAAPGERRHRLGGRRRREAGGDXXAAFIGVRKRPWGKFAAEIRDSTRKGARVWLGTFDTPEAAALAYDQAALAARGAAAVLNFPVERVVESLGALALAGAGSPVLALKRRHSKRTRRRKPSAVAAAATAAACDGARPEPHA

SEQ ID NO: 5990 - protein, 234 aa, Zea mays
  unsure (1)..(234): unsure at all Xaa locations
TSSAAAQIQQIQAQLMFQQQQQQQQRGPFLGPRAQPMKPGSPSPPPPLAPAPAQSKLYRGVRQRHWGKWVAEIRLPKNRTRLWLGTFDTAEGAALAYDEAAFRLRGDTARLNFPSLRRGGGARLAGPLHASVDAKLTAICQSLAGSKNSSSSDESAASLXXDSPKCSASTEGDXXDSASAGSPPSPTQAPPVPEMAKLDFTEAPWDETEAFHLRKYPSWEIDWDSILSXTINYN

SEQ ID NO: 5991 - protein, 147 aa, Zea mays
  unsure (1)..(147): unsure at all Xaa locations
MAKIGLKPDPVXXNNAKEIRYRGVRKRPWGRYAAEIRDPGKKTRVWLGTFDTAEEAARAYDAAARDFRGAKAKTNFPNFLELSEKMPAAGGGFERSPSQSSTLDCDSPPAAVTPASAGIVPPQLELRLGGYQIPMARPIYFLDVXGX

SEQ ID NO: 5992 - protein, 364 aa, Zea mays
  unsure (1)..(364): unsure at all Xaa locations
MCGGAILAELREPAPRRLTERDIWQQKKKPKRGGAGGRRSFAAEDDEDFEADFEDFEADSGDSDLELGEGADDDVIEIKPFAAKSTFSRDGLSTMTTAGYDAPAARLAKRKRKNQYRGIRQRPWGKWAAEIRDPQKGVRVWLGTFNSPEEAARAYDAEARRIRGKKAKVNFPDAPAVGQKCRSSSASAKALKSCVEQKPIVKTDMNILANTNAPFYQSVNYASNXXPFVPAMNSTVSFEDPIMNLHSDXRGSNSLGXCSDLGWENDTKTPDITSIAPIPTIAEGDESVFVNSNSNSSMVPPVLENNAVDLTDGLTDLESYMRFLMDGGASDSIDSLLNLDGSQDLGSNMDLWTFDDMPIAGDFF

SEQ ID NO: 5993 - protein, 364 aa, Zea mays
MCGGAILANLREPAPRRLTERDIWQQKKKLKRGGGGGRRSFAAEDDEDFEADFEVFEADSSDSDLELREGTDDDVVEIKPFTAKRTFSSDGLSTMTSDVARSAKRKRKNLYRGIRQRPWGKWAAEIRDPQKGVRVWLGTFNSPEEAARAYDAEARRIRGKKAKVNFPDAPAVGQKRRSSGSASAKASKSSFGQKPIVKVAMNNLANTNASFFQSVSYPSNSFVQHGNIPFVPAMNSTGSVEDPIMNLHSDQGSNSFGCSDLGWENDTKTPDITSIAPISTIAEGDESAFVDSNSNNSFVLPALENSAVDLTDGLTDLESYMRFVLDGGPSDSVDSLLNLDGSQDVGSDMDLWSFDDMPIVGDFF

SEQ ID NO: 5994 - protein, 207 aa, Zea mays
  unsure (1)..(207): unsure at all Xaa locations
MCGGAIIFDYIPARRXVSTADFWPGSEADAEDIHASHSPDPQRGKRRRKNQYRGIRQRPWGKWAAEIRDPVKGVRVWLGTYPTAEAAARAYDRAARRIRGAKAKVNFPSDTSSSVTVPTAVSRSAAAAAQAPAVLPQPSVEAQTQXXSDEVKELLEELIYYGFYMNSLIEGYNAAATTAPATTAAAPTGLWSFEDYYYPPSLSLFPE

SEQ ID NO: 5995 - protein, 233 aa, Zea mays
MAPRTSEKTMAPAAAAATGLALSVGGGGGAGGPHYRGVRKRPWGRYAAEIRDPAKKSRVWLGTYDTAEDAARAYDAAAREYRGAKAKTNFPYPSCVPLSAAGCRSSNSSTVESFSSDAQAPMQAMPLPPSLELDLFHRAAAAATGTGAAAVRFPFGSIPVTHPYYFFGQAAAAAAEAGCRVLKLAPAVTVAQSDSDCSSVVDLSPSPPAAGSARKPAAFDLDLNCSPPTEAEA

SEQ ID NO: 5996 - protein, 257 aa, Zea mays
  unsure (1)..(257): unsure at all Xaa locations
QPCPAHHQHLAPSSSAVVTRSIAPPSMAPKNALPAASGMTLEPRYRGVRKRPWGRYAAEIRDPARKARVWLGTFDTAEAAARAYDAAALHFRGPKAKTNFPVAFATATATDTRALPLPLRLPLPPPPQAGREPQRQHRGVVVPGLARRAGPRAVARPEPRHAAHGGRPAVPVPGPEAXAVTVAVAAPVPRRPTAAAAGAGASKQAAYSCCREDEQSDTGSSSSVVDASPAVGVGFDLNMPPPGEVAXLDRAAALKDX

SEQ ID NO: 5997 - protein, 242 aa, Zea mays
  unsure (1)..(242): unsure at all Xaa locations
SFTDSQILASNTNSPIHVRSRTLALRXSGGMRRRGVAAADADGDVELRFRGVRKRPWGRYAAEIRDPAKKARVWLGTFDSAEDAARAYDAAARMLRGPKARTNFPLPAAAAXPPPPHARCCRRSSSTIHNISHRHGRRLXTPPVARPACSSLSSTVESFSGARPRPVLPPRFPXXPSIPDGDCRSDCGSSASVVDDDCTDAAASASCPFPLPFDLNLPPGGXAEPASGFNEEDELRLTALRL

SEQ ID NO: 5998 - protein, 124 aa, Zea mays
  unsure (1)..(124): unsure at all Xaa locations
MDPTPRAVLISISSGGAKGGGGGSHAHYRGVRKRPWGRYAAEIRDPWKKTRVWLGTFDTPLEAALAYDRAARTLRGAKARTNFPDDHXRAAAAAAPPSAPTPAAAARPRQPRHRQRRWSWARAX

SEQ ID NO: 5999 - protein, 195 aa, Zea mays
  unsure (1)..(195): unsure at all Xaa locations
MCGGAILAELREPAPRRLTERDIWQQKKKPKKSTFSRDGLSTMTTAGYDAPAARLAKRKRKNQYRGIRQRPWGKWAAEIRDPQKGVRVWLGTFNSPEEAARAYDAEARRIRGKKAKVNFPDAPAVGQKCRSSSASAKALKSCVEQKPIVKTDMNTLANTNAPFYQSVNYASNXXPFVPAMNSTVSFEDPIMNLHX

SEQ ID NO: 6000 - protein, 127 aa, Zea mays
  unsure (1)..(127): unsure at all Xaa locations
RAGIASXLHSPIPIPAHTFAFGLSGGMRRSGVAAAXADGDVESRFRGVRKRPWGRYAAEIRDPAKKARVWLGTFDSAEDAARAYDAAARMLRGPKARTNFPHPAAXPPPPPHGHRRRRRSAINNTHX

SEQ ID NO: 6001 - protein, 237 aa, Zea mays
MAPRVADKSPLPPATGLGLGVGGGVGGVGMGPHYRGVRKRPWGRYAAEIRDPAKKSRVWLGTYDTAEEAAKAYDSAAREFRGAKAKTNFPFPSQCSVASGAAGSASSNSTVDSSGGGSGCGIQAPMQAMPLPPALDLDLFHRAAAVNAVSTGMRFPFKGYPVACPTPQQYFFYEQAAAAASGYRMLKVAPPAVTVAAVAQSDSDSSSVVDHSPSPPAVTANKVGFELDLNWPPPAEN

SEQ ID NO: 6002 - protein, 382 aa, Zea mays
  unsure (1)..(382): unsure at all Xaa locations
PAGXKKKYLSPAGRGSNCLLQPSISALCCAPRIVYARSRDLSLDSLGYPLLSVSCKNPWRLRRXIGTPATTPRFPPPCMAXGRAGQQXXLVRALIAPPTPFAYPRSGVEQQSAAGSFLGAGGSGLTPAQILQVQSRLRFXAPAGGGRRRHPADEAAGRAXXQAPVPARAGVSKLYRGVRQRHWGKWVAEIRLPRNRTRLWLGTFDTAEEAXALAYDGAAFRLRGXDSARLNFPELRRGGQHLGPPLHAAVDAKLQSAAARTSARRCRRARARAXAPAAATTATPSXPSPRCVKSEPGCSVSESSFSADGDVSSTGSSDVVPEMQLARLLGSAMGRVRQLPPSLTLAMRLLNFSEAPWDDFESFGLRKYPSLEIGWDSILLIS

SEQ ID NO: 6003 - protein, 210 aa, Zea mays
  unsure (1)..(210): unsure at all Xaa locations
MATKRSVCTLDQAHLKGKKELLPTDLNAPLDDAPNTPAPPSCAKAERRRNNQYRGIRQRPWRXWAAEIRDPVKGVRVWLGTYPTAEAAARAYDRAARRIRGAKAKVNFPSDSSSVPAPTAASGSAAAAAAQAPAVLPAPKVEARTQXXSAEVKELPEELMAYENYMSFLGVPYMEGGNAAVSAPPAAAAPTGLWSFEDYYYPPSLSLFPE

SEQ ID NO: 6004 - protein, 172 aa, Zea mays
  unsure (1)..(172): unsure at all Xaa locations
MAPRVADKSPLPPATGLGLGVGGGVGGVGMGPHYRGVRKRPWGRYAAEIRDPAKKSRVWLGTYDTAEEAAKAYDSAAREFRGAKAKTNFPFPSQCSVASGAAGSASSNSTVDSSGGGSGCGIQAPMQAMPLPPALDLDLFHRAAAXFIFFASFIICXLVNINKXXKYFHPXX

SEQ ID NO: 6005 - protein, 324 aa, Zea mays
  unsure (1)..(324): unsure at all Xaa locations
MAAAIDMYKYCNTSAHLIASSSPSDQELAKALEPFITSASSPYHRYSLAPDSYMPTPSSYTTSPLPTPTSSPFSQLPPLYSSPYAASTASGVAGPMGLNQLGPAQIQQIQAQLMFQHQQQRGLHAAFLGPRAQPMKQSGSPPAQSKLYRGVRQRHWGKWVAEIRLPKNRTRLWLGTFDTAEGAALAYDEAAFRLRGDTARLNFPSLRRGGGARLAGPLHASVDAKLTAICQSLAGSKNSSSSDESAASLXXDSPKCSASTEGDXXDSASAGSPPSPTQAPPVPEMAKLDFTEAPWDETEAFHLRKYPSWEIDWDSILSXTINYN

SEQ ID NO: 6006 - protein, 211 aa, Zea mays
  unsure (1)..(211): unsure at all Xaa locations
MCGGAIILDYIPARRRVSAADFWPDSEADAEDSDSHAPDPERRGKAKRGRKNQYRGIRQRPWGKWAAEIRDPVKGVRVWLGTYPTAEAAARAYDRAARRIRGAKAKVNFPNDASSSSVTAPTAASGVAAQAPXXVFLPAPKVEARAQXXSDEVKELSEELMAYENYMSFLGVPYMEGGNAAASATTAAAAPAGLWSFEDYYYPPSLSLFTE

SEQ ID NO: 6007 - protein, 174 aa, Zea mays
  unsure (1)..(174): unsure at all Xaa locations
RSPSPSRPPDRARRRPVDSSPLLGRSTARASAAARRGELFRCCITTTTAGGRXHIKARDVRRGXXVAAPRYRGVRKRPWGRFAAEIRDPAKRARVWLGTFDSAEAAARAYDMAARALRGPLARTNFPALTSPCQPPAPTPTCSSSSTVESSSGPRAGVPRAGRRAAGKPRAPRX

SEQ ID NO: 6008 - protein, 157 aa, Zea mays
  unsure (1)..(157): unsure at all Xaa locations
MLSGYERSREASMMVDALATVVAGGATPPATAGARQQQAAAAAGLSSCTGRSRARSGTDSXATTASPSSSSQAPSPSSTGSGTPRRRYRGVRQRPWGKWAAEIRDPHKAARVWLGTFDTAEAAARAYDVAALRFRGSRANLNFPESATLAKPPPTAX

SEQ ID NO: 6009 - protein, 287 aa, Zea mays
  unsure (1)..(287): unsure at all Xaa locations
MSRSRTVRIFWDDPDLTDSSGDDEGCGARRVGRMVRELAPAPAPAPAALPVPDQCNAGDGDRGRKAGVAGPGVCSGARRRVAKGAGGPASTKFRGVRRRPWGKFAAEIRDPWRGVRVWLGTFDTAEEAARVYDTAAVQLRGANATTNFAASAATNSGSGAGAGQDPATTPAAGYESGAESSPTSVLRKVPSLSSLAEDDSDAPAXPSAAXLAVLEEEELGEFVPFEDAPVYATSGFWDFEPDAGFLYAEPSSPEASWNAGAASPVQENDYFQDLRDLFPLNRLPAIF

SEQ ID NO: 6010 - protein, 118 aa, Zea mays
  unsure (1)..(118): unsure at all Xaa locations
CDIDGRXGGEPTKYRGVRRRPSGKFAAEIRDSSRQSVRMWLGTFDTAEEAARAYDRAAYAMRGQIAVLNFPAEARNYVRGGSSSSRQQQQGGGGGGGSGGGAGQQVIELECLDDQVLX

SEQ ID NO: 6011 - protein, 215 aa, Zea mays
  unsure (1)..(215): unsure at all Xaa locations
MCGGAIIFDYIPARRRVSAADFWPDSEADAEDSDSHAPDPERVPRPRGKAKRGRKNQYRGIRQRPWGKWAAEIRDPVKGVRVWLGTYPTAEAAARAYDRAARRIRGAKAKVNFPNDASSSSVTAPTAASGVAAQAPXXVFLPAPKVEARAQXXSDEVKELSEELMAYENYMNFLGVPYMEGGNAAVSATTAAAAPAGLWSFEDYYYPPSLSLFTE

SEQ ID NO: 6012 - protein, 402 aa, Zea mays
  unsure (1)..(402): unsure at all Xaa locations
MCGGAILSGFIPPSGVXXAAAAAKKKQQRRATADLLWPGPGKKGASREEDFEADFREFERGLGEDDVDGAGDEVQELALPEPARLAFAAAVGAPRTAVDGVMTPKDGEGDMPTTANNSAANKRRRKNQYRGIRRRPWGKWAAEIRDPSKGVRVWLGTYSTAEEAARAYDAEARRIRGKKAKVNFRDEAAAAATPTACASAARLAPPPPPPKFRAGEGFGQHDTGSNDLFAIMFAFSDSSSKVVRVEPDLLPGSKRSAANMLLLSDQSSDSYGSCDLGWEWDWDDDTMTSDYASVFAPAAPSNVVPAWYTQGGPVSKRTRSSYGYGAAMPGGFDPETNYQYQPLPYVVESSPSDGASTDDMDCLQMMRAGDVPQDGASSGGGGGDGGDIWSLDELLMXAAGAY

SEQ ID NO: 6013 - protein, 364 aa, Zea mays
  unsure (1)..(364): unsure at all Xaa locations
MCGGAILANLREPAPRRLTERDIWQQKKKLKRGGGGGRRSFAAEDDEDFEADFEVFEADSSDSDLELREGTDDDVVEIKPFTAKRTFSSDGLSTMTSAVARSAKRKRKNLYRGIRQRPWGKWAAEIRDPQKGVXRVWLGTFNSPEEAARAYDAEARRIRGKKAKVNFPDAPEVGQKRRSGSASAKASKSSFGQKPIVKVTMNSLANTNASFFQSVSYPSNSFVQHGNIPFVPAMNSTGSVEDPIMNLHSDQGSNSFGCSDLGWENDTKTPDITSIAPISTIAEGDESAFVDSNSNNSFVLPALENSAVDLTDGLTDLESYMRFVLDGGPSDSVDSLLNLDGSQDVGSNMDLWSFDDMPIAGDFF

SEQ ID NO: 6014 - protein, 133 aa, Zea mays
HWVPRGRPGHSSPAHQHNHHHRLAVVTRSPPSMAPRNALPAASAVANGMVMEPRFRGVRKRPWGRFAAEIRDPARKARVWLGTFDTAEAAARAYDAAALHFRGPKAKTNFPVAFAALPPPPPQMYLHPRSRPP

SEQ ID NO: 6015 - protein, 444 aa, Zea mays
  unsure (1)..(444): unsure at all Xaa locations
STASQKQRPGGQCAWGPTHRPRSRPRHTTASSSFLFSSSTRGTEHPGDGEQQNIGPRLFGPVLASTRPFINARXPAPSESEPRAPLAGARTXGRSXRPLPASLAKPLPRSRFSRAASSSSGAVRSGRPGXXILEDAPAAALLRPLKKIRSPDRRLNRSLSSFSPAPPSPESSSAFSPMPLPSALQHQQMISFGKQPATRAXEFVAAAAATPLFPPQLVAPXVHQQMLLRYWSEALNXSPRGXPRRGRATAASAAVPXXXAARVVGAAXKLYRGVRQRHWGKWVAEIRLPRNRTRLWLGTFDTAEDAAMAYDREAFKLRGDNARLNFPDLFLGKTETERVDNSEPEPNPELQSADHQGDGTTAMFQPSGGVXGVRADEAWFSAWGPGSSVWDWDYDMDNAHGLLLQSRFASEATSMDYVSSTPEVPAVGTAVASLSPPPPPRSPT

SEQ ID NO: 6016 - protein, 237 aa, Zea mays
KVSSPFRSRKSPSHRFVTGAGAPGAVARSAKRKRKNLYRGIRQRPWGKWAAEIRDPQKGVRVWLGTFNSPEEAARAYDAEARRIRGKKAKVNFPDAPAVGQKHRSGSASAKASKSSFGQKPIVKGSNSFGCSDLGWENDTKTPDITSIAPISTIAEGDESAFVDSNSNSSFVLPALENSAVDLTDGLTDLESYMRFLLDGGPSDSVDSLLNLDGSQDVGSDMDLWSFDDMPIVGDFF

SEQ ID NO: 6017 - protein, 230 aa, Zea mays
  unsure (1)..(230): unsure at all Xaa locations
RPGRVSSFHLKTHTLAPPRRKTPRPMAPRTSERAMTSAAAGLGGAGPHYRGVRKRPWGRYAAEIRDPAKKSRVWLGTFDTPEDAARAYDAAAREYRGAKAKTNFSFPAACRSGNSSSTTTTTTVDSFGGDVQAPPMQAMPLPPSXXCASGAVRFPFSSYPVTHPYYFFGQAAAGCHMLKLPPTTVTVAQSDSDSSSVEDLSPSPPAAVSATRAAAFDLDLNCPPPAEAEA

SEQ ID NO: 6018 - protein, 399 aa, Zea mays
  unsure (1)..(399): unsure at all Xaa locations
MCGGAILSGFIPPSGVAAAAAAAKKKQQQRCRVTADLLWPGPGSKEAPQDQEEDFEADFREFERGLGEDDVDSAGEGGDPEVQELPPPEPTRFAFATAAKAAVDGVMTTTPKDVKGDRPVKRGRKNQYRGIRQRPWGKWAAEIRDPNKGVRVWLGTYNTAEEAARAYDAEARKIRGKKAKVNFPDDDAPGTGHRPANAAPRLVAPPPPPKACADEIFNNLKNDDDDEVAVAVAASSXPAPAVAVVPGNKRRSSATNTMLSVSDDQRSNSYGSGSSDLVGSWSWDDDAAAAAMTSDYTSSVFAPDNAVPSYTQGGAPKRMRSSYGGAPPSLAHDAAMPGFGLDKVSYHHYQALPPYYVGSSNASVGNLGLLQHPAPQDGASAGDIWSLDELLMLAAAGAY

SEQ ID NO: 6019 - protein, 238 aa, Zea mays
  unsure (1)..(238): unsure at all Xaa locations
MCGGAILAGFIPPSAAAAAAKAAAAKKQQQQQQQQQRSVTADSLWPGLRKKAAEEEDFEADFRDFERDSSDDDXRGRGGSXPPPASAGFAFAAAVEVAPPAPARLDAVQHDGPAAKSVKRVRKNQYRGIRQRPWGKWAAEIRDPSKGVRVWLGTYDTAEEAARAYDAEARKIRGKKAKVNFPEEAPTVQKSTLKPTAVKSAKLAPPPKTCEDEPFNHLSRGDNDLFAMFALHDKKGSA

SEQ ID NO: 6020 - protein, 238 aa, Zea mays
MGTNPHLQELAASAVAASEPPPRARVVRILVHDADATDSSSSEDEAPPLLPRRRSRGGSSSLSVRRRVMEPAGASSAVRFRGVRRRPWGRWAAEIRDPHNRRRLWLGTFDTAEEAANAYDAANIRFRGASATTNFPAARYSPPPKPAKPIISLTPEPGKVITLPPVPVKPTFPVQVKEVGGSWGGLVKGARSEVKAFAPKPVWKMIPRVHQKFPGCADGSGLRAVHAASIYVEEVGGG

SEQ ID NO: 6021 - protein, 229 aa, Zea mays
  unsure (1)..(229): unsure at all Xaa locations
XLFRIPLAAGFLGPQAQPMKHAGAPPLAAAKLYRGVRQRHWGKWVAEIRLPRNRTRLWLGTFDSAEDAALAYDKAAFRLRGDAARLNFPSLRRGGAHLAGPLDASVDAKLTAICQGITAEPTSKAAAAAPSDSXXKASASTTTTEGDESVHSAGSPPSLPTFPQQQQQVTPPLPEMASLDFTEAPWDESAALHLNSYPSWDIDWDSILSXSINPTSKCLVTRCNFCQWI

SEQ ID NO: 6022 - protein, 153 aa, Zea mays
  unsure (1)..(153): unsure at all Xaa locations
EEEGTVALSGTVGLVDAALLSETHPAASLSLSGEGTSREAHYRGVRKRPWGRYAAEIRDPWRKTRVWLGTYDTPVEAAMAYDRAAVALRGSKARTNFTAGRGGXPGPLPVQARPLPXXPAXAPGHFSGXDATHSSPWHVVYLPPPSSSKKKKK

SEQ ID NO: 6023 - protein, 279 aa, Zea mays
MAAAINLPGPSEDLMRAMESFMQDDAPSPLAMPPAPSFPAAAAHGAQYPATHLSPAQMQFIQAQLHLQRNPGLGPRAQPMKPAVPVPPAPAPQRPVKLYRGVRQRHWGKWVAEIRLPRNRTRLWLGTFDTAEQAALAYDQAAYRLRGDAARLNFPDNAESRAPLDPAVDAKLQAICATIAAASSSSKNSKAKSKAMPINASVLEAAAASPSNSSSDEGSGSGFGSDDEMSSSSPTPVVAPPVADMGQLDFSEVPWDEDESFVLRKYPSYEIDWDALLSN

SEQ ID NO: 6024 - protein, 410 aa, Zea mays
  unsure (1)..(410): unsure at all Xaa locations
MCGGAILSGFIPPSGVAAAAAAAKKKQQQRRVTADLLWPGPGSKGAPQDQEEDFEADFREFERGLGEDDVDSAGEGGDPEVQELPPPEPTRFAFATAAKAAVDGVMTTTPKDVKGDRPVKRGRKNQYRGIRQRPWGKWAAEIRDPNKGVRVWLGTYNTAEEAARAYDAEARKIRGKKAKVNFPDDDAPGTGHRPANAAPRLVAPPPPPKACADEIFNNLRTTTTTXNNNNDDLFAMFAGSFLVPAPAVAVVPGNKRRSSATNTMLSVSDDQRSNSYGSGSSDLVGSWSWDDDAAAAAMTSDYTSSVFAPDNAVLPAASYSYMQGGAPKSMRSSYGGAPPSLAHDAAMPGFGLDKVSYHYQALPPYYVGSSNASVGSLGLLQADDAPQDGASAGDIWSLDELLMLAAAGAY

SEQ ID NO: 6025 - protein, 148 aa, Zea mays
  unsure (1)..(148): unsure at all Xaa locations
MCGGAIISEFIPHRGAKRGLCAEDIWPHAAAADMHAYCTAEPPARKRERKTMYRGIRRRPWGKWAAEIRDPAKGARVWLGTFATAEAAERAYDRAARRIHGDKAKVNFPNEDPTXXSTTTTTTDTPTPTPTPAGNRGCSPCTTAEAGX

SEQ ID NO: 6026 - protein, 158 aa, Zea mays
  unsure (1)..(158): unsure at all Xaa locations
XSAAARVVGAAXKLYRGVRQRHWGKWVAEIRLPRNRTRLWLGTFDTAEDAAMAYDREAFKLRGDNARLNFPDLFLGKTETERVDNSEPEPNPELQSADHQGDGTTAMFQPSGGVWGPADEAWFSAWGPGSSVWDWDYDMDNAHGLLLQSRFASEATSM

SEQ ID NO: 6027 - protein, 275 aa, Zea mays
  unsure (1)..(275): unsure at all Xaa locations
MTNLSAMAASQSYVIRFDGHFDEPSPSSAGAEPPAPFAGRMISLEREHQVIVAALLHVVSGXXATPPPQVFTPPPAAARCQVCGMERCLGCEFFAAGEGALXAAARRRQPRQEARRXAGGGAXRRRRKKKNKYRGVRQRPWGKWAAEIRDPRRAVRKWLGTFDTAEEAARAYDQAAIEFRGPRAKLNFPFPEQPPTGHDEPISSNGDASAAASADAEERGQPEWPSAGQEAGDQLLWEGLQDLMRLDEGXALAPSSLKRLELKFETPAIRSQPFN

SEQ ID NO: 6028 - protein, 222 aa, Zea mays
MQFIQAQLHLQRNPGLGPRAQPMKPAVPVPPAPAPQRPVKLYRGVRQRHWGKWVAEIRLPRNRTRLWLGTFDTAEQAALAYDQAAYRLRGDAARLNFPDNAESRAPLDPAVDAKLQAICATIAAASSSSKNSKAKSKAMPINASVLEAAAASPSNSSSDEGSGSGFGSDDEMSSSSPTPVVAPPVADMGQLDFSEVPWDEDESFVLRKYPSYEIDWDALLSN

SEQ ID NO: 6029 - protein, 232 aa, Zea mays
PAGPGVFLPLKTHTLAPPRRTPRPMAPRTSERAMTSAAAGLGGAGPHYRGVRKRPWGRYAAEIRDPAKKSRVWLGTFDTPEDAARAYDAAAREYRGAKATAAWADAGGLPLAAAGSTTTTTTVDSFGGDVQAPPMQAMPLPPSLCATGAVRFPFSSYPVTHPYYFFGQAAAGCHMLKLPPTTVTVAQSDSDSSSVEDLSPSPSPSPPAAVSATRSATFDLDLNCPPPAEAEA

SEQ ID NO: 6030 - protein, 432 aa, Zea mays
MHAHALTDSPYSILDGVMTPKDGEGDMPTTATNSAANKRRRKNQYRGIRRRPWGKWAAEIRDPSKGVRVWLGTYSTAEEAARAYDAEARRIRGKKAKVNFRDEAAAAAAPTACGNAARLGPPPPPPKFRADEVFGNMNGGTGSNDLFAIMFAFSDSSSKVVRVEPPLLPGSKRSAANMLLLSGQSSDSYGSCDLGWEWDWDDDTMTSDYASVFAPAAPSNVVPAWYTQGGPASKRTRSSYGYGVAMLQQGDGAQAMPGGFDPETNYQYLVELRSSKEKCYEKSIECVGKIKTSFANVGAYSSEDNFVRGDPEGPIDWISNKAEAFEEILSGHGDVCAFSGARGIAAIMEKSGCDHVKALAQAEATLSINDTKDPSAEASLIDGKFFADIWENGGRGMAHEIIKKSEKDSHDAREAAEAAEKIAELERRICIA

SEQ ID NO: 6031 - protein, 316 aa, Zea mays
  unsure (1)..(316): unsure at all Xaa locations
MCGGAILSGFIPPSRGGGGGGGGGQEEAAAAVPCDCGPAMAGARXSKGAPQDKEEDFEADFREFERGXLGEDDVEQRRRRRRPRGPGASSAGADEVCLRHRGQGSRKNQYRGIRQRPWGKWAAEIRDPNKGXVRVWLGTYNTAXEEAARAYDAEARKIRGKKAKVNFPDDDATGTXSQANERRERSEASSSTPTPEGLRRXDVXNNLKNDDGDNNNNDDLFAMFAFGDNKKEAVXLQRSQPPPRVAVAVADWFNXVAASSSLRLRWRRRCPVIRGGRPRPTLWSPSPTTRAATPTAPAPPTWWGRGRGTTPPPPPP

SEQ ID NO: 6032 - protein, 238 aa, Zea mays
MGTNPHLQELAASAVAASEPPPRARVVRILVHDADATDSSSSEDEAPPLLPRRRSRGGSSSLSVRRRVMEPAGASSAVRFRGVRRRPWGRWAAEIRDPHNRRRLWLGTFDTAEEAANAYDAANIRFRGVSATTNFPAARYSPPPKPAKPIISLTPEPGKVITLPPVPVKPTFPVQVKEVGGSWGGLIKGARSEVKAFAPKPVWKMIPRVHQKFPGCADGSGLRAVHAASIYVEEVGGG

SEQ ID NO: 6033 - protein, 310 aa, Zea mays
MCGGAILANLREPAPRRLTERDIWQQKKKLKRGGGGGRRSFAAEDDEDFEADFEGFEADSSDSDLELREGTDDDVVEIKPFAAKRTFSSDGLSAMTSAVARSVKRKRKNLYRGIRQRPWGKWAAEIRDPQKGVRVWLGTFNSPEEAARAYDAEARRIRGKKAKVNFPDAPAVGQKHRSGSASAKASKSSFGQKPIVKGSNSFGCSDLGWENDTKTPDITSIAPISTIAEGDESAFVDSNSNSSFVLPALENSAVDLTDGLTDLESYMRFLLDGGPSDSVDSLLNLDGSQDVGSDMDLWSFDDMPIVGDFF

SEQ ID NO: 6034 - protein, 111 aa, Zea mays
MAPRTSERAMTSAAAGLARGAGPHYRGVRKRPWGRYAAEIRDPAKKSRVWLGTFDTPEDAARAYDAAAREYRGAKAKTNFSFPSCLPLAAGNSSSTTTTVDSFGGDVQATL

SEQ ID NO: 6035 - protein, 163 aa, Zea mays
ARDHYLEHPNRKNHPSLYRGVRRRPWGKWAAEIRDPRRAARKWLGTFDTAEDAARAYDVAAVELRGQRAKLNFPAQPPHPVHCPISRASARTADPTPQKKVAGARGAGADHAAGHLGGFERDHDDGGGTQLLVYAMILPAPSPMHPSPYLLLFNAFILSYSIS

SEQ ID NO: 6036 - protein, 231 aa, Zea mays
MNFSSYFFSSSSSDKKSSSKRQQQQAAQPQTDANTTRYLGVRRRPWGRYAAEIRDPATKERHWLGTFDTAEEAAVAYDRAARSLRGARARTNFAYPDLPPGSSVTPYLSPDPPATTPPTAIVPRTCPLSYDLTIPDDLTADYGAEDAGGSVDMSSMYGGGGSSANASSASSGGGGWCDASEFSAYGASAASHGVYFEEGYVHSPLFSPMPAVDDACADGFQLGGSSSSYYY

SEQ ID NO: 6037 - protein, 341 aa, Zea mays
  unsure (1)..(341): unsure at all Xaa locations
FARFEPRLLVISCNEIXGGGLAVAAVDLRPTAMSAADSLTSGRGRRAEPPLPRLKRVRVYFVDADATDTDSSGNEDERGNRRXXREVIHIDVESASAXDAVGAAAGAPEEAAAAXSQAAAAALVRRRSSGAGFRRRFPGVRLRPWGKYAAEIRDPHQRKRLWLGTFDTAEEAAAAYDDAALRLKXXRATSSPASPLRRLPPXAAPGAPSSPGAKEAAEGAAEEDGEALASAPAPVPAAAPGSLDSQAVDGTALSKKKKKVCPFSSPISVLRHAADETPAAHALPAFEFLYSGLGELGDLGTATAPSKAVAAEFDCLPWWEGEDFVTVTGLTASAGAAVSVI

SEQ ID NO: 6038 - protein, 181 aa, Zea mays
  unsure (1)..(181): unsure at all Xaa locations
MGSFFDAVTCLLPRLTGLEVIFFYCLSGTIYSSTRSSAGTPFRPKKILRKRGRGREWASGVEEVKKTNGSVAAPRYRGVRKRPWGRFAAEIRDPAKRARVWLGTFDSAEAAARAYDVAARALRGPLARTNFPALTSRPPAXPARAHAHVQLKLHRRVLQRAPRRGAQGGQARCWEAACPAA

SEQ ID NO: 6039 - protein, 203 aa, Zea mays
  unsure (1)..(203): unsure at all Xaa locations
RPASRXDPASAPLPPTTRTPKPHPIHLPSSSQLPPLYSSPYAAPCMAGQMGLNQLGPAQIQQIQAQXHVPAAXQQQQRGLHAAFLGPRAQPMKQSXVAVAAAAAGAGAXSKLYRGVRQRHWGKWVAEIRLPKNRTRLWLGTFDTVEDAALAYDKAVFRLRGDTVRLNFPVLRRGGAHLAGPLHASVDAKLTGICQSLAESKSK

SEQ ID NO: 6040 - protein, 411 aa, Zea mays
  unsure (1)..(411): unsure at all Xaa locations
MCGGAILSGFIPPSGVAAAAAAAKKKQQQRCRVTADLLWPGPGSKEAPQDQEEDFEADFREFERGLGEDDVDSAXXEGGDPEVQELPPPEPTKVXAFATAAKAAVDGVMTTPPKDVQGDRAVKKRGRKNQYRGIRQRPWGKWAAEIRDPNKGVRVWLGTYNTAEEAARAYDAEARKIRGKKAKVNFPDEPPGTRHRPAPKACARXDVXQPEERRCNDDLFAMFAFGDNKKKVPAAKPAAAPAPAVAAVPGNKRRSSATNIMLSVSDDQSSNSYGSGSSDLVGSWSWDDDAAAAAMTSDYTSSVFAPDNAVLPAASYSYMQGGAPKRMRSSYGGAPPQPRTXRGHAWLWPXXXVSYHYQALPPYYVGSSNASVGNLGLLQQADDAPAPQDGASAGDIWSLDELLMLAAAGAY

SEQ ID NO: 6041 - protein, 217 aa, Zea mays
  unsure (1)..(217): unsure at all Xaa locations
MEDASAALLRPLKKIGRAPDRLQPLSTTSSSVPPSPRSSAAGATSPASLSPPASPQQQQQQQAQAPVQRQQQMISFGAPPQYQAQFLLPEGAQQQQHLLRYWSEALNLSPRGGQAAGVLPSLYQHLLRPPPPQKLYRGVRQRHWGKWVAEIRLPRNRTRLWLGTFDSAEDAAMAYDREAFKLRGENARLNFPDRFFGKGXRRGERPHQRHTRSRADX

SEQ ID NO: 6042 - protein, 414 aa, Zea mays
MCGGAILSGFIPPSGVAAAAAAAKKQQQQRRVTADLLWPGPGSKGAPQDKEEDFEADFREFERGLGEDDVDSAGEGGDPEVQELPPPEPTRFAFATAAKAAVDGVMTTTPKDVQGDRAVKKRGRKNQYRGIRQRPWGKWAAEIRDPNKGVRVWLGTYNTAEEAARAYDAEARKIRGKKAKVNFPDDDATGTRQTNAANAARLVAPPPPPKACADEMFNNLKNDDGDNNNNDDLFAMFAGSFLVPAPAVAAVPGNKRRSSATNIMLSVSDDQSSNSYGSGSSADLVGSWSWDDDDAAAAAAAAAMTSVFAPDNAVLPAASYSYMQGGAPKRMRRSYGGAPPSLAHDAAMPGFGLDKVSYHYQALPPYYVGSSNASVGNLGLLQQADDAPAPQDGASAGDIWSLDELLMLAAAGAY

SEQ ID NO: 6043 - protein, 277 aa, Zea mays
MCGGAIIFDYIPARRRVSTADFWPGSEADAEDNASHSPDPQRAPPPRAKAKPGRRKNQYRGIRQRPWGKWAAEIRDPVKGVRVWLGTYPTAEEAARAYDAEARKIRGKKAKVNFPDDDATGTRHRPTNAANAARLVAPPPPPKACADEMFNNLKNDDGDNNNNDDLFAISSVFAPASYSYMQGGAPKRMRSSYGGAPPSLAHDAAMPGFGLDKVSYHHYQALPPYYVGSSNASVGNLGLLQQADDAPAPQDGARAGDIWSLDELLMLAAGGSLESSA

SEQ ID NO: 6044 - protein, 192 aa, Zea mays
LLLRASSGPPKLYRGVRQRHWGKWVAEIRLPRNRTRLWLGTFDTAEDAAMAYDREAFKLRGDNARLNFPDLFLGKGRVGGSGRTSAAASCSSELQSADHQGDGTTAMFQPSGGVWGPADEAWFSAWGPGSSVWDYDMDNAHGLFLQSRFASEATSMDYVPSTPEVPAVGTAVASLSPPPPPPRSPTYMKEKD

SEQ ID NO: 6045 - protein, 159 aa, Zea mays
LLLRASSGPPKLYRGVRQRHWGKWVAEIRLPRNRTRLWLGTFDTAEDAAMAYDREAFKLRGDNARLNFPDLFLGKGRVGGSGRTSAAASCSSELQSADHQGDGTTAMFQPSGGVWGPADEAWFSAWGPGSSVWDYDMDNAHGLFLQSRFASEATSMDYV

SEQ ID NO: 6046 - protein, 109 aa, Zea mays
  unsure (1)..(109): unsure at all Xaa locations
PCPSAQPPPPPPGRNVTRSPPSMAPRNALPAASAVANGMVMEPRFRGVRKRPWGRFAAEIRDPARKARVWLGTFDTAEAAARAYDAAALHFRGPKGKTNFPIDCLVLIX

SEQ ID NO: 6047 - protein, 166 aa, Zea mays
MCGGALIHDYGDDDWEAAFREFIAGDDDDDPAAAVVERPRRRRRVRRNPYRGVRQRPWGRWASEIRDPVKGARVWLGTFDTAVEAARAYDAEARRIHGHKARTNFPPDEPPLPAPSQAPKKVLLPARRRRRRRRRGPWKQPGVVVGAGQSLRLHDVVDGGVRRARR

SEQ ID NO: 6048 - protein, 395 aa, Zea mays
  unsure (1)..(395): unsure at all Xaa locations
MCGGAILSGFIPPSGVAAAAAAAKKQQQQRRVTADLLWPGARRKGAPQDKEEDFEADFREFERGLGEDDVDSAGEGGDPEVQELPPPEPTRFAFATAAKAAVDGVMTPPPKDVQGDRAVKKRGRKNQYRGIRQRPWGKWAAEIRDPNKGVRVWLGTYNTAEEAARAYDAEARKIRGKKAKVNFPDDATGTRHRPTTDEIFXXNLKNDDNNNNDDLFAMFAFGDNKKKVPAAKPAAAPAPAVAVVPGNKRRSSATNTMLSVSDDQRSNSYGSGSSDLVGSWSWDDDAAAAAMTSDYTSSVFAPDNAVPSYTQGGAPKRMRSSYGGAEPHASAMPGFGLDKVSYHYQALPPYYVGSSNASVGSLGLLQADDAPQDGASAGDIWSLDELLMLAAAGAY

SEQ ID NO: 6049 - protein, 198 aa, Zea mays
  unsure (1)..(198): unsure at all Xaa locations
LLRAPKLYRGVRQRHWGKWVAEIRLPRNRTRLWLGTFDTAEDAAMAYDREAFKLRGENAKLNFPDLFLGKGXRRRERPHQCQCSRNSQLQSADHHGGDGSTVMLAVGGVERHVGPGRXEAWFSAWGPGSSVWDYDMDNAHGLFLQSRFASEAASMDYVSSMPEAPATPAAGTAVASAASLSSPPPLPLPRSPTYRGSE

SEQ ID NO: 6050 - protein, 167 aa, Zea mays
  unsure (1)..(167): unsure at all Xaa locations
LPCDSSRILLLRAPKLYRGVRQRHWGKWVAEIRLPRNRTRLWLGTFDTAEDAAMAYDREAFKLRGENAKLNFPDLFLGKGXRRRERPHQCQCSRNSQLQSADHHGGDGSTVMLAVGGVERHVGPGRXEAWFSAWGPGSSVWDYDMDNAHGLFLQSRFASEAASMDYV

SEQ ID NO: 6051 - protein, 363 aa, Zea mays
MCGGAILANLREPAPRRLTERDIWQQKKKLKRGGGGGRRSFAAEDDEDFEADFEVFEADSSDSDLELREGTDDDVVEIKPFTAKRTFSSDGLSTMTSAVARSAKRKRKNLYRGIRHAPWGKWAAEIRDPQKGVRVWLGTFNSPEEAARAYDAEARRIRGKKAKVNFPDAPAVGQKHRSGSASAKASKSSFGQKPIVKVAMNNLANTNASFFQSASYPSNLFVQHGNMPFVPAMNSTASVDDLIMNLHSDQGSNSFGCSDLGWENDTKTPDITSIAPISTIAEGDESAFVDSNSNSSFVLPALENSAVDLTDGLTDLESYMRFLLDGGPSDSVDSLLNLDGSQDVGSDMDLWSFDDMPIVGDFF

SEQ ID NO: 6052 - protein, 320 aa, Zea mays
  unsure (1)..(320): unsure at all Xaa locations
RPGKAEPQPRRSCVASFSQLVTVPLVSFTPGPPNQXSIDPSAAATPLRRCAAAAAKKKQQQQRCRVTADLLWPGPGSKGAPQDQEEDFEADFREFERGLGEDDVDSAGEGGDPEVQELPPPEPTRFAFATAAKAAVDGVMTTTPKDVQGDRAVKKRGRKNQYRGIRQRPWGKWAAEIRDPNKGVRVWLGTYNTAEEAARAYDAEARKIRGKKAKVNFPDDATGTRHRPTTDEIFXXNLKNDDNNNNDDLFAMFAFGDNKKKVPAAKPAAAPAPAVAVVPGNKRRSSATNTMLSVSDDQRSNSYGSGSSDLVGSWSWDDDX

SEQ ID NO: 6053 - protein, 154 aa, Zea mays
  unsure (1)..(154): unsure at all Xaa locations
MCGGAIIFDYIPARRRVSTADFWPGSEADAEDIHASHSPDPQRGKRRRKNQYRGIRQRPWGKWAAEIRDPVKGVRVWLGTYPTAEEAARAYDAEARKIRGKKAKVNFPDDDATASTPTPEGLRRXDVXQPEERRRRQQQLLMLAAGGSLESSAX

SEQ ID NO: 6054 - protein, 175 aa, Zea mays
  unsure (1)..(175): unsure at all Xaa locations
XAETATVPKLVRVFCDDLDATDSSGDDEGGGVAARGARKFILEIXSRRGIERVAMPRRLFRRLAVARGKRRRXTLAPEEPRYRGVRRRPWGKYAAEIRDPHKGERLWLGTFDTAEEAAREYDSAARRLRGPSATTNFPAPPTPSDRVPAVRELSSAEESDSDETHTVSSPVSVLX

SEQ ID NO: 6055 - protein, 240 aa, Zea mays
  unsure (1)..(240): unsure at all Xaa locations
MVKARWDASLIKGHLARVPLLGRPCSAVQDEGPSRHGRPHYRPERAAHPSMDASLRTLPPAGTSSFPGEGYNVRSAVSSLLLSSPGTSALDTVFSHLPPPVTIPPLGSSVYYRQCELLRHFAASQSQPQARQHAAACSASSSSPSSAAASSXPVPAVRAARRHAXRQKLYRGVRQRQWGKWVAEIRLPQNRVRVWLGTYDSPETAAHAYDRAAHRLRGEYARLNFPGAMDGPDXXGLPRA

SEQ ID NO: 6056 - protein, 136 aa, Zea mays
  unsure (1)..(136): unsure at all Xaa locations
MQQQTAMPTPTPMGWSEQSLAAETAAIVSALTHVVASGRGPPPRRRRSSCRGTVRTAAPSSTGRXAAQGTTPAPAPAAAGPARKYRGVRRRPWGKWAAEIRDPQKAARVWLGTFPTAEDAARAYDAAALRFRGGXX

SEQ ID NO: 6057 - protein, 281 aa, Zea mays
MAQELHETSSCSATTTSSCTTSCCSSTVTDSSSSPPSPAAANAAPATRKRQALEAEAEAEAGGEEEEEEEEGCAGNKAAPAKKRPRGSEGKHPTFRGVRMRAWGKWVSEIREPRKKSRIWLGTFPTAEMAARAHDVAALAIKGRAAHLNFPDLAGALPRAASAAPKDVQAAAALAAAFTSPSSEPGAGAHEEPAAKDGAAPEEAAADAQAPVPVALPPPAASRPGTPSSGVEDERQLFDLPDLLLDIRDGFGRFPPMWAPLTDVEEVVNAELRLEEPLLWE

SEQ ID NO: 6058 - protein, 281 aa, Zea mays
MAQELHETSSCSATTTSSCTTSCCSSTVTDSSSSPPSPAAANAAPATRKRQALEAEAEAEAGGEEEEEEEEGCAGNKAAPAKKRPRGSEGKHPTFRGVRMRAWGKWVSEIREPRKKSRIWLGTFPTAEMAARAHDVAALAIKGRAAHLNFPDLAGALPRAASAAPKDVQAAAALAAAFTSPSSEPGAGAHEEPAAKDGAAPEEAAADAQAPVPVALPPPAASRPGTPSSGVEDERQLFDLPDLLLDIRDGFGRFPPMWAPLTDVEDVVNAELRLEEPLLWE

SEQ ID NO: 6059 - protein, 411 aa, Zea mays
  unsure (1)..(411): unsure at all Xaa locations
SFPKKSLSFPLYLSSLNDLSLSTQXSSLPASXASSSPLLLSPSIPASFSPSHXRAMVEAAAVKRSRPKIKQEPAETTAIRKIVRVFCDDRDGTDSSGDDGGGAGAAAGARKFLVEIPVEKHRPGCNATAPAXXRAAGGGKRKAAAXXGTPAEPRYRGVRRRPWGRYAAEIRDPHKGERLWLGTFDTAEEAARRYDSETRRLRGPSAITNFPATPGVPLPAPALSLHGVAAVGEHSSAEEESCDESQLVVGSPVSVLRAMPDETARATLPPKIADAAAGCATKKDAPDGRGGLSPFSADDALLPQLGEDAFSFGGVPFDDDLPTPQXXASTTSPPTPRXDLGSLPMWPGVDGCRFSDIGDDDLFSLPALXTIVDQRGRHRPKPFVLSPVRTDGAKCCSFLLLFTLLETLGVV

SEQ ID NO: 6060 - protein, 281 aa, Zea mays
MAQELHETSSCSATTTSSCTTSCCSSTVTDSSSSPPSPAAANAAPATRKRQALEAEAEAEAGGEEEEEEEGSCAGNKAAPAKKRPRGSEGKHPTFRGVRMRAWGKWVSEIREPRKKSRIWLGTFPTAEMAARAHDVAALAIKGRAAHLNFPDFAGALPRAASAAPKDVQAAAALAAAFTSPSSEPGAGAHEEPAAKDGAAPEEAAADAQAPVPVALPPPAASRPGTPSSGVEDERQLFDLPDLLLDIRDGFGRFPPMWAPLTDVEEVVNAELRLEEPLLWE

SEQ ID NO: 6061 - protein, 129 aa, Zea mays
  unsure (1)..(129): unsure at all Xaa locations
SCSAAGRQQALASRSATAKPFAERSRPAQRGMGGPDNTRHNYRGVRQRRWGKWVAEIREPNRGKRHWLGTFDNPVDAAVAYDRAAVSIHGAHAHLNFPCSMASRERIASMRGSMATPFTRRCGHWXXDX

SEQ ID NO: 6062 - protein, 192 aa, Zea mays
  unsure (1)..(192): unsure at all Xaa locations
RGRPGRHSHSHPSIHPPKLLGRQAAARESKQGRGSCVAGRSVHGXPKRPVSAAAAAEQPRLRGVRKRPWGRYAAEIRDPVRKARVWLGTFDTPEQAARAYDAAARKLRGPGAATNYPAPERPXRRRRRWRRLQRRAGAGAPWCTSRRRRRRRRRRAPCRWRPRRWTSAWRCRLRRRPQSRTSCSRTRRRRPP

SEQ ID NO: 6063 - protein, 408 aa, Zea mays
  unsure (1)..(408): unsure at all Xaa locations
MCGGAILSGFIPPSGVPAAAAAAKKKQQRRATADLLWPGPGKKGAPREEDFEADFREFERGLGEDDDVDGAGDEVQXXLPLPEPARLAFAAAVGAPRTAVDGVMTPKDGEGDMPTTATNSAANKRRAXKNQYRGIRGGPWGKWAAEIRDPSKGXVRVWLGTYSTAEEAARAYDAXEARRIRGKKAKVNFRDEAAAAAAPTACGNAARLAPPPPPPKFRADEVFGNMNGGTGSNDLFAIMFAFSDSSSKVVRVEPPLLPGSKRSAANMLLLSDQSSDSYGSCDLGWEWDWDDDTMTSDYASVFAPAAPSNVVPAWYTQGGPVSKRTRSSYGYGAAMPGGFDPETNYQYQPLPYVVESSPSDGASTDDMDCLQMMRAGDVPQDGASSGGGGGDGGDIWSLDELLMAAGAY

SEQ ID NO: 6064 - protein, 174 aa, Zea mays
  unsure (1)..(174): unsure at all Xaa locations
MAMSEPSSDTSCTSSCSSGPSTSTSPRAAPSSAAAAASGGGKKRRPRSNAPPPTYRGVRMRAWGKWVSEIREPRKKSRIWLGTFATAEMAARAHDVAALAIKGRAAHLNFPELANDLPRPATAAPKDVQAAAALAAAADFQAXXANAAAATDPDDGPDAGADSASASPPPPPPQ

SEQ ID NO: 6065 - protein, 112 aa, Zea mays
  unsure (1)..(112): unsure at all Xaa locations
XWRTWPTHTSTPTPTGASVPSRPRSKTGTGTSTXSMKGARYRGVRRRPWGRFAAEIRDPMSKERRWLGTFDTAEQAACAYDIAARAMRGNKARTNFVAAPPSVPTRRGRRGX

SEQ ID NO: 6066 - protein, 398 aa, Zea mays
  unsure (1)..(398): unsure at all Xaa locations
MCGGAILSGFIPPSGVAAAAAAAKKQQQQRRVTADLLWPGARRKGAPQDKEEDFEADFREFERGLGEDDVDSAGEGGDPEVQELPPPEPTRFAFATAAKAAVDGVMTPPPKDVQGDRAVKKRXARKNQYRGIRQRPWGKWAAEIRDPNKGVRVWLGTYNTAXEEAARAYDAEARKIRGKKAKVNFPDDATGTRHRPTTDEIFXXNLKNDDNNNNDDLFAMFAFGDNKKKVPAAKPAAAEGPAVAVVPGNKRRSSATNTMLSVSDDQRSNSYGSGSWSWDDDDAAAAAAAAAMTSASVLAPASYSYMQGGAPKRMRHSYSGAPPHDAAMPGFGLDKVSYHYQPLPLPPYYVGSSSGSSDDASVGSLGLLQADGAPQDGASAGDIWSLDELLMLATAGAY

SEQ ID NO: 6067 - protein, 273 aa, Zea mays
  unsure (1)..(273): unsure at all Xaa locations
GPRGRPAKCKRKTPYRGIRRRPWGKWAAEIRDPTKGVRVWLGTYKTPKDAARAYDAEARKIRGNKAKVNFPNEPPNMVSNAPKLIVTAMTTMAIPADKLNDELMCHKNYSNEDFFSMVNFSGXTMVTLFLLRPLXLQCIKKPRVPYDIPRMGECSNQNRMTYGLSNGLGNEASRNLNGCSFLPQAGMPIFIQPTFDGPSRMIGRNDGVIVPTLTNATPMAGVDAAKKMNQQPIFQEMESEDIPSILQGDVSEDVAAEISMWEFYDNLLDNKEN

SEQ ID NO: 6068 - protein, 183 aa, Zea mays
  unsure (1)..(183): unsure at all Xaa locations
MCGGAILSGFIPPSGRCRVTADLLWXXGPGSKGAPQDQEEDFEADFREFERGLGEDDVDSAGEGGDPEVQELPPPEPDEVCLRHRGQGGRDRPVKRGRKNXQYRGIRQRPWGKWAAEIRDPNKGXVRVWLGTYNTAEEAARAYDAEARKIRGKKGEGXNFPKTLGVXDDDAPGTGHRPANAAP

SEQ ID NO: 6069 - protein, 241 aa, Zea mays
APPAEAAAGSGPAGGEGRKGKAPKGGPENGKFRYRGVRQRSWGKWVAEIREPRKRSRKWLGTFATAEDAARAYDRAALLLYGPRAHLNLTSPPPPTLAAPRSHPHSSSATSSAPPALRPLLPRPPLHQLSSDGAPAPDFHYHNQFQRRLLPQPTPTLYYANTATASTVTTSVPTRVAVPQEPAIAPAVGSLTSPGEPQVGRKEEARGEAGWDYNGGEEEDYAAALLWDEPEPFFWFDVFLK

SEQ ID NO: 6070 - protein, 137 aa, Zea mays
  unsure (1)..(137): unsure at all Xaa locations
MQSYGRKRAWKKGPTRGKGGPQNAACEYRGVRQRTWGKWVAEIREPNKRTRLWLGSFATAEEAALAYDEAARRLYGPDAFLNLPHLRASAVSSAAAHQRIRWLPASARGAAAAAVPAYGLLNLNAQHNVHVIHQRLX

SEQ ID NO: 6071 - protein, 276 aa, Zea mays
MCGGAILANLREPAPRRLTERDIWQQKKKLKRGGGGGRRSFAAEDDEDFEADFEVFEADSSDSDLELRERTDDDVVEIKPFTAKRTFSSDGLSTMTSAVARSAKRKRKNLYRGIRQRPWGKWAAEIRDPQKGVRVWLGTFNSPEEAARAYDAEARRIRGKKAKGSNSFGCSDLGWENDTKTPDITSIAPISTIAEGDESAFVDSNSNSSFVLPALENSAVDLTDGLTDLESYMRFLLDGGPSDSVDSLLNLDGSQDVGSDMDLWSFDDMPIVGDFF

SEQ ID NO: 6072 - protein, 276 aa, Zea mays
MCGGAILANLREPAPRRLTERDIWQQKKKLKRGGGGGRRSFAAEDDEDFEADFEVFEADSSDSDLELRERTDDDVVEIKPFTAKRTFSSDGLSTMTSAVARSAKRKRKNLYRGIRQRPWGKWAAEIRDPQKGVRVWLGTFNSPEEAARAYDAEARRIRGKKAKGSNSFGCSDLGWENDTKTPDITSIAPISTIAEGDESAFVDSNSNSSFVLPALENSAVDLTDGLTDLESYMRFLLDGGPSDSVDSLLNLDGSQDVGSNMDLWSFDDMPIAGDFF

SEQ ID NO: 6073 - protein, 173 aa, Zea mays
  unsure (1)..(173): unsure at all Xaa locations
FSRTYWLVVVVATSYYKRWTRCWASTCRCLPXLRAPPASSRSRRRRRRSSSSXYRGVRKRKWGKWVSEIRQPGTKTXRIWLGSFESAEMAAVAHDVAALRLRGRDAQLNFPGCVAWLPRPATSHARGLRAAARAAAAARPCSWTRRAGPPASSATRRRWPCAGHTAPSGTPAX

SEQ ID NO: 6074 - protein, 155 aa, Zea mays
  unsure (1)..(155): unsure at all Xaa locations
LDLDPRRDERERSGGRSTGRSTKVDPRRHGKRPLPADEEEEQPPPPPEAYAQYYYSARADHDATAMVSALSHVIRAXHRTSNKPTTPPDPPLSQENSSNAAAAAAIAEEQGRKRHYRGVRQRPWGKWAAEIRDPKKAARVWLGTFDTAEDAAIAX

SEQ ID NO: 6075 - protein, 176 aa, Zea mays
  unsure (1)..(176): unsure at all Xaa locations
VVGVGRRGGGGGQGTTSRTRRQAGQGRAGQRGRKRRRRRSAWRSGMRRARLPPVPVPTAPGDAGPEVKYRGVRRRPSGRYAAEIRDPARKTPIWLGTFDSAEAAARAYDAAARTIRGAAARTNFPSAPTSAAVAPPPPLPASTAAAAGAATSSLSSTVESWSGGGGGGAPAGIXRA

SEQ ID NO: 6076 - protein, 318 aa, Zea mays
  unsure (1)..(318): unsure at all Xaa locations
MMNTRACGSSGSGGRNDQTMMGFSEHPKPAASGQAQPSPPSSPSERPPAGRGRRRAQEPGRFLGVRRRPWGRYAAEIRDPTTKERHWLGTFDTAQEAALAYDRAALSMKGAQARTNFVYTHATYNYPPFLAPFHHPSXGAAAAXYGAAPHVGSYGHHHYHHXXGSAAAVGASSGECSSXXMATAVPPVERADGTLLLDRGGGGHHHHPEFLFASADDNSGYLSSVVPESCLRPRSSAAAVXXDLRRYSDADAYGMGVGLREDVDDLAQMVAGFWGGGAGDADQLCGGGFPSGGAGDSMAVASSQGSSDGYSPFSFLSH

SEQ ID NO: 6077 - protein, 313 aa, Zea mays
MNTRACGSSGSGGRNDQTMMGFSEHPKPAASGQAQPSPPSSPSERPPAGRGRRRAQEPGRFLGVRRRPWGRYAAEIRDPTTKERHWLGTFDTAQEAALAYDRAALSMKGAQARTNFVYTHAAYNYPPFLAPFHHPSSVQQQHYGAAPHVGSYGHHHYHHQGSAAAVGASSGECSSTMATAVPPVERADGTLLLDRGGGGHHHHPEFLFASADDNSGYLSSVVPESCLRPRSSAAAVEDLRRYSDADAYGMGVGLREDVDDLAQMVAGFWGGGAGDADQLCGGGFPSGGAGDSMAVASSQGSSDGYSPFSFLSH

SEQ ID NO: 6078 - protein, 244 aa, Zea mays
  unsure (1)..(244): unsure at all Xaa locations
MARPQQRYRGVRQRHWGSWVSEIRHPLLKTRIWLGTFETAEDAARAYDEAARIMCGSRVRTNFPEDAGGGGGGDGQQQQQAAPSLLSPALVAKLHRSNLASAQAAQGKADASAAAAAALPRVAAAVPAGMGVSASPSASASAAGDWSGGLLEEQYVDQMIEELLDYFSMEISYXSCAPARTTRHPAPPASSAPSHLNSHLISLFGFVGQVGKCSAVSYLVLAVSLAMPGVTRGYFGLLARRVGS

SEQ ID NO: 6079 - protein, 325 aa, Zea mays
  unsure (1)..(325): unsure at all Xaa locations
MSSQWPQPYTCTSTGITAPHLIASSSPSDQELAKALEPFITSASSPYHRYSLAPDSSCLHPPSYTTSPLPTPTSSPFSQLPPLYSSPYAASTASAMGLNQLGPAQIQQIQAQXHVPAPXSRGACTRGSLGPRAQPMKEXSGSPPAQSKLYRGVRQRHWGKWVAXRSRLPKNRTRLWLGTFDTPXRARALAYDEAAFRLRGDTARLNFPSLRRGGRRAPRXXPLHASVDAKLTAICQSLSESKSKSGSSGDESAGSPPDSPKCSASASTEGEEESGSAGSPPSXDAGAARAGDGEAGLPEAPWDETETFHLRKYPSWEIDWDSILS

SEQ ID NO: 6080 - protein, 219 aa, Zea mays
  unsure (1)..(219): unsure at all Xaa locations
MEMVLDNSAPGVVAAGQKHHQSYRGVRKRKWGKWVSEIREPGKKTRIWLGSFESPEMAAVAHDVAALRLRGREARLNFPGLVHRFRRPATAEPDDVRAAALEAAAQVRFRPDLVAMQASGGEGGCRFGGAGGSDDTGSPEPLAAGEDDVAWDXLARDRRGGGXXSRPRCGMSWPNARGPAASVGGRYGGHXRLEGGNLWDLPVWALGPTGRCSFTSFGF

SEQ ID NO: 6081 - protein, 278 aa, Zea mays
  unsure (1)..(278): unsure at all Xaa locations
XPLKEEAGSARPFRGNRPRPLAFPGRKRKSNGPGPGPNPRFRGLRRGPWGKSPAEIRNPWRRLPFWFGTFNTAEEAAKVYNSAAFQFRGADATTNFKHAAVPVPVPDKVGVRLPKPPPVPASKNASSSATSSYDSGKESHAGAASPTSVLRTFPPSSAAADATSRNRRRPPDESTGVGGSRSSVYAYPXXFANDDCFGGDFPPLYTDFDLLADFPEPTLDFLADIPEEKLPLPEPFPAASPDECPSDAEAASPARWQQVDDFFQDITDLFQIDPLPVV

SEQ ID NO: 6082 - protein, 214 aa, Zea mays
  unsure (1)..(214): unsure at all Xaa locations
MTENLHSRKMVQPKKFRGVRQRHWGSWVSEIRHPLLKRRVWLGTFETAEEAARAYDEAAVLMSGRNAKTNFPIQRSSTGEPTPAAGRDARSNFSSGSSTTNLSQILSAKLRKCCKAPSPSLTCLRLDPEKSHIGVWQKRAGARADSNWVMTVELNKDAASTDAASQSTSATTAPPATPXXDEEERIALQMIEELLSSSSPASPSNGDDQGRFII

SEQ ID NO: 6083 - protein, 141 aa, Zea mays
  unsure (1)..(141): unsure at all Xaa locations
HASASRTRRQAGRQRGRKRRKRRRSAWRSGMRRARLPPVPVPTAPGDAGPEVKYRGVRRRPSGRYAAEIRDPARKTPIWLGTFDSAEAAARAYDAAARTIRGAAARTNFPSAPTSAAVAPPLPLPASTAAAAVTPPVQNXX

SEQ ID NO: 6084 - protein, 248 aa, Zea mays
MEASNNESAPTAEAAAGSGPAGGEGRKGKAPKGGPENGKFRYRGVRQRSWGKWVAEIREPRKRSRKWLGTFATAEDAARAYDRAALLLYGPRAHLNLTSPPPPTLAAPRSHPHSSATSSAPPALRPLLPRPPLHQLSSDGAPAPDFHYHNQFQRRLLPQPTPTLYYANTATASTVTTSVPTRVAVPQEPAIAPAVGSSTSLQEPQVGTPEEARGEAGWDYNGGEEEDYAAALLWDEPEPFFWFDVFLK

SEQ ID NO: 6085 - protein, 205 aa, Zea mays
  unsure (1)..(205): unsure at all Xaa locations
AEAAAAATATGAASRSRSGYKHPSYRGVRRRSWGKWVSEIREPRKKSRIWLGTFPTAEMAARAHDVAALAIKGRGAHLNFPERAHELPRPASTSPADVQAAAAQAAAAADVQCDAPPSPSPSPETAAASPDDAACCLEAATTTTXCTAAATVEENALFDLPDLLLNLRDGLWWPPVWPSSAIMAIEEYDGCDVVGMHEPLLWAEX

SEQ ID NO: 6086 - protein, 333 aa, Zea mays
  unsure (1)..(333): unsure at all Xaa locations
MELHFQPQPPVFQLEGYTSSSSYYYYYQQEAAAQAKPSKPRCRKKGSNNHSKFVGVRQRPSGRWVAEIKDTTQKIRMWLGTFETAEAAAKAYDEAARLLRGSDARTNFAPRISPDCPLAVRIRGLLHQRRSRRPRPPRRPPPPSSRRRALLPPVXTTSNSNSNSHSHSTNSVLGAGEVYRPEFATAGAEEFDSWMFDSAFAQFPALDSFVAVDSVVPVAGATDEXGRRRDAGRRDXAEFERIKVERRISASLYAMNGLQEYFDRVLDASAXXDSLWDLSPLCHXISFTCCPVLCSDLPPSGLWPWPLLVKVTSVRCMCFCSTKGANVRGSSLL

SEQ ID NO: 6087 - protein, 269 aa, Zea mays
  unsure (1)..(269): unsure at all Xaa locations
ARDPGLPRPXXQRPPSPPAKXPIQILAQQIDSQRARKPRQRPKQLSITRRATPACTTLSRAAGERERDRKRDSANSGSQQRRLELLPMQGEYRSSSEESAXPLQQPQPXAPLAAAAAAAVKMXGGAGGDGGRQYRGVRMRKWGKWVAEIREPHKRTRIWLGSYATAVAAARAYDTAVFYLRGRSARLNFPXDPLVRAGGWRGRGGARARAAAAAPAXAVRXARVDALHGMVAPAAAPPRAPXAPQPPAAGRVKNPDLNRAPSPESSDAE

SEQ ID NO: 6088 - protein, 156 aa, Zea mays
  unsure (1)..(156): unsure at all Xaa locations
MSSSPETEAAGSSSSSRKFKGVRKRKWGKWVSEIRLPNSRERIWLGSYDAPDKAARAFDAAFVCLRGPGADLNFPDSPPPCPGGCSSDPREVQAAALSHAXTAPPSRPSRRPPRSPWTAAAPMARRRHGTTTTTTPWRTTRXGVLGGAAGTSSTAX

SEQ ID NO: 6089 - protein, 139 aa, Zea mays
  unsure (1)..(139): unsure at all Xaa locations
KPHEKAGRQAERKEEEEEEEKRVEERDAAGEAAAGPGPXTAPGDAGPEVKYRGVRRRPSGRYAAEIRDPARKTPIWLGTFDSAEAAARAYDAAARTIRGAAARTNFPSAPTSGKAAEEDCRSYCGSSSSVRYPPRSKLK

SEQ ID NO: 6090 - protein, 252 aa, Zea mays
  unsure (1)..(252): unsure at all Xaa locations
MSLLVTASFAQCSSPMEERALFPVSDSSTTCSSSGCTGPNSPVSSSQYLDDTSDGAGSSSSRKRPRRELKHPTYRGVRMRAWGKWVSEIREPRKKSRIWLGTFDTPEMAARAHDVAALAIKGRAAHLNFPEMSHELPRAASAAPEDVRAAAALAAAMEMESVAPPTSSESRDGARNDENEGPAASSSSGNDADNALFELPDVLLEFGFAPPPPSTSCGYDLSWDEPLLLXGALTSKRGQRDMHANVKLDRCS

SEQ ID NO: 6091 - protein, 169 aa, Zea mays
  unsure (1)..(169): unsure at all Xaa locations
MARPQQRYRGVRQRHWGSWVSEIRHPLLKARIWLGTFETAEDAARAYDEAARIMCGPRARTNFPADANGPPPSXXLSAALVDKLHRFNLASVQAXXQRQREAAAAAAAAAATSAPATPPTPPATQWGGGGRSLEEQHVEQMIEELLDYFSMEICCXCXASRDATCLATG

SEQ ID NO: 6092 - protein, 275 aa, Zea mays
  unsure (1)..(275): unsure at all Xaa locations
ARDHYLEPKNPLLHPQNPNTNTXXQQIDSQRDGGGKPRKPRQRPKQLSITRRATPACTTLSRAAGERERDRKRDSANSGSQQRRLELLPMQGEYRSSSEESAXPLQQPQPXAPLAAAAAAAVKMXGGAGGDGGRQYRGVRMRKWGKWVAEIREPHKRTRIWLGSYATAVAAARAYDTAVFYLRGRSARLNFPDEIGDGDGGEPARDPADGGGTLSAASIRKKAIEVGSRVDALQTGIGAAAAPPRAPEAPPPPPPRRVKNPDLNRAPSPESSDAE

SEQ ID NO: 6093 - protein, 206 aa, Zea mays
  unsure (1)..(206): unsure at all Xaa locations
XCSSSGCTGPNSPVSSSQYLDDTSGGASSSSSRKRPRRELKHPTYRGVRMRAWGKWVSEIREPRKKSRIWLGTFDTPEMAARAHDVAALAIKGRAAHLNFPEMSHELPRAASAAPEDVRAAAALAAAMEMESVAPPTSSESRDGGKNDENEGPAASSSSGNNADNALFELPDILLEFGFALPLPPPSTSCSYDLSWDEPLLLWEHX

SEQ ID NO: 6094 - protein, 183 aa, Zea mays
GGGGGGRTLRDPGAPAWKNLWSRGKYPESCSRQTNRKKRPRRSRDGPNSVSETIRRWKEVNQQLEHEKRARKPPAKGSKKGCMQGKGGPENTQCGFRGVRQRTWGKWVAEIREPNRVSRLWLGTFPTAEDAARAYDEAARAMYGALARTNFPVHPAQAPAVAVAAAIEGVVRGASASCESTTT

SEQ ID NO: 6095 - protein, 184 aa, Zea mays
  unsure (1)..(184): unsure at all Xaa locations
LGRQRSRVAIAMPKLQRFRGVRQRHWGSWVSEIRHPLLKTRIWLGTYETAEDAARAYDEAARLMSGPSARTNFPLSXXSGGGGTLSPTLRAKLEKCCTALAQEPQHGADVSRAGGGRDDDSSSRGAPRXXDAGAVKVDPDADGEDQYIEEMIRELTYYGPVEIXAPPVRVLRRRRRRRLLELSD

SEQ ID NO: 6096 - protein, 150 aa, Zea mays
  unsure (1)..(150): unsure at all Xaa locations
MARKRKASDSAAGIDGVHSLPPPLALASTDACAWASSGGTSMAAVAEAAAAQQQRRGRKRFVGVRQRPSGRWVAEIKDTIQKIRVWLGTFDTAEEAARAYDEAACLLRGANTRTNFWPRPSPASSVAVAAAAHLNYSSSKKKKKKKKKKX

SEQ ID NO: 6097 - protein, 130 aa, Zea mays
  unsure (1)..(130): unsure at all Xaa locations
XTXSGGGGGKGTNKRPRRDLKHPTYRGVRMRAWGKWVSEIREPRKKSRIWLGTFDNPEMAARAHDAAAVAIKGRAAHLNFPDLAHDLPRAASAAPKDVQAAAALAAATDLPPQQCNAGMREREPAGSALX

SEQ ID NO: 6098 - protein, 99 aa, Zea mays
SWRRRRTAAGQLVPPRSTSRGRRFVGVRQRPSGRWVAEIKDSAQRVRLWLGTFDTADEAARAYDEAARALRGENTRTNFTYRARSRRPRRRRLRRGQGQ

SEQ ID NO: 6099 - protein, 200 aa, Zea mays
  unsure (1)..(200): unsure at all Xaa locations
MARPQQRYRGVRQRHWGSWVSDIRHPLLKTRIWLGTFETAEDAARAYDEAARIMCGPRVRTNFPEDAAADGQGQPAATALLSPALVAKLHRFNLASVQAARGRXXDDSAAAAASAPAVXARIAPMPASNASMRIAPLTSAAVAAGHWSGDFLEEQYVDQMIEELLDYFSVEIYXFHPTPLLRLISLFGFVSSAQLGSVVS

SEQ ID NO: 6100 - protein, 183 aa, Zea mays
  unsure (1)..(183): unsure at all Xaa locations
GXRPSGRYAAEIRDPAKKSRVWLGTYDTAEDAARAYDAAAREYRGAKAKTNFPYPSCVPLSAAGCRSSNSSTVESFSSDAQAPMQAMPLPPSLELDLFRXXRFPFGSIPVTHPYYFFGQAAAAAAEAGCRVLKLAPAVTVAQSDSDCSSVVDLSPSPPAAVSARKPAAFDLDLNCSPPTEAEA

SEQ ID NO: 6101 - protein, 159 aa, Zea mays
  unsure (1)..(159): unsure at all Xaa locations
XXXISGSKSSSXVSSSXRDQAAGPPSXPRRPRAHTAVRRPRALDAXXNAGGLRRRRQPGVDAGQRAQEGRGRGRGWEKRRPAYRGVRMRAWGKWVSEIREPRKKSRIWLGTFPTAEMAARAHDAAALVVKGRGAVLNFPEMAARLPRPASAAPRDVQAA

SEQ ID NO: 6102 - protein, 217 aa, Zea mays
  unsure (1)..(217): unsure at all Xaa locations
SPLRCRSGPAARPPPLRRQEAAKDMDDAQEPPSPPSPSQSSSSSSSSSSVAPNPKKRARKDGSRPTYRGVRMRSWGKWVSEIREPRKKSRIWLGTFDTPEMAARAHDVAALAIKGRDAHLNFPGLAHLLPRPATAAPEDVQAAAALAAAMEMESSSSSGSASDNAKAASRAAPSEHSLQAAEPIPDVAVFDLPDLLLELSFGPTSPILSCAKKKKKX

SEQ ID NO: 6103 - protein, 95 aa, Zea mays
  unsure (1)..(95): unsure at all Xaa locations
LQRFRGVRQRHWGSWVSEIRHPLLKTRIWLGTYETAEDAARAYDEAARLMSGPSARTNFPLSLSATPTPTARISTSRRXSGSSPTTAPGRYSTTX

SEQ ID NO: 6104 - protein, 184 aa, Zea mays
  unsure (1)..(184): unsure at all Xaa locations
XGAGGGAGGGHGHGHGTGTAGXRRVRADTRHPVYRGIRYRGGKWVSEIREPRKSSRIWLGTYPAPEMAAAAYDTAALALRGAEAALNFPGAALSRPVPASRSPDDIRAAAASAARSQSPQVGGEAAAAAGGGGGGASTIVDEDDVFQVPRLLAGMAEGLMMSPPRLAGAALLEEDVVVSLWDHS

SEQ ID NO: 6105 - protein, 160 aa, Zea mays
  unsure (1)..(160): unsure at all Xaa locations
NQHPSPSWTKSSSLALTAPSRPAQHFRCPRAHTLQASLLGGTGSGTGGNAGXSDVPSPASSPLGSVQKIARGRKSRRGGGRSPAYRGVRMRAWGKWVSEIREPRKKSRIWLGTFPTAEMAARAHDAAALVVKGRGAVLNFPEMAASLPRPASAAPRDVQA

SEQ ID NO: 6106 - protein, 215 aa, Zea mays
  unsure (1)..(215): unsure at all Xaa locations
EGKPRKPRHRQXAAADTTAAAPAQPSAGGRERDREREGGGSGSVSQQRRRLAARAVADAGRVPVFQRGVGGGRRYRGVRMRKWGKWVAEIREPHKRTRIWLGSYATAVAAARAYDTAVFYLRGRSARLNFPEEIPSLGXGGWRGRGGPRARRTLSAASIRKKAIEVGSRVDALQTGIGPAAAPPRAPXAPQPPAAGRVKNPDLNRAPSPESSDAE

SEQ ID NO: 6107 - protein, 149 aa, Zea mays
  unsure (1)..(149): unsure at all Xaa locations
XAVRRAHLTLTMPADSDDVASPASPLGLGSVHKRGGGGGGKSGGRRRPGPAYRGVRMRAWGKWVSEIREPRKKSRIWLGTFPTAEMAARAHDAAALVVKGRGAVLNFPEMAARLPRPASAAPRDVQAAAARAAAMDVXTCPWARAAAAX

SEQ ID NO: 6108 - protein, 250 aa, Zea mays
MKGKGGPDNTQCGYRGVRQRTWGKWVAEIREPNRVDRLWLGTFPTAEDAARAYDEAARAMYGDLARTNFPGQDATTSAQAALASTSAQADPTAVEALQTGTSCESTTTSNYSDIASTSHKPEPEASDISSSLKAKCPAGSCGIQDGTPSVADKEVFGPLEPITNLPDGGDGFDIGEMLRMMESDPHNAGGADAGMGQPWYLDELDSSVLESMLQPEPEPEPEPFLMSEEPDMFLAGFESAGFVEGLERLN

SEQ ID NO: 6109 - protein, 169 aa, Zea mays
  unsure (1)..(169): unsure at all Xaa locations
MARPQQRYRGVRQRHWGSWVSEIRHPLLKARIWLGTFETAEDAARAYDEAARIMCGPRARTNFPADANGPPPSXXLSAALVDKLHRFNLASVQAAQRQREAAAAAAAAAATSRARDASDAAGHXXWGGGGRSLEEQHVEQMIEELLDYFSMEICCXCXASRDATCLATG

SEQ ID NO: 6110 - protein, 191 aa, Zea mays
  unsure (1)..(191): unsure at all Xaa locations
XSTEDNEASASVGEKAEAAAAATATGAASRSRSGXXKHPSYRGVRRRSWGKWVSEIREPRKKSRIWLGTFPTAEMAARAHDVAALAIKGRGAHLNFPERAHELPRPASTSPADVQAAAAQAAAAADVQCDXAAVAVAXSPETAAASPDDAXXAASENALFDLPDLLLNLRDGLWWPPVWPSSAIMAIEEYX

SEQ ID NO: 6111 - protein, 203 aa, Zea mays
  unsure (1)..(203): unsure at all Xaa locations
MEADALLHAPMTSSSSSSSSSSDSVGGSCVVNGAQELPSNTGKPHKNVKRKRTASPSAAPGGGVAPAPPEAAIADDDCGGXAAQEGERRHXRHPTFRGVRMRVWGKWVSEIREPRKKSRIWLGTFPTAEMAARAHDVAALAIKGRGAHLNFPHLAHDLPRPXSTSPXDIQXRAAKAAAAAADADVXVEQCESSHAVETPSSSX

SEQ ID NO: 6112 - protein, 172 aa, Zea mays
  unsure (1)..(172): unsure at all Xaa locations
GAAAMGGHYSPTGSAAEAGGXXRGVRGVRERPWGKWAGEIRDPHKGGVVGVXTFNTAEAAGRAYYEAALRFRGSRAKLNFPEDARLTTGPSAAGAPAGGGSTRTMAVAGSGGGSYQQEASAXVXFADYLQYQMMLRGTSGQGSSSHGGDPXYYYYGGHRGAGAGAGGGAMSX

SEQ ID NO: 6113 - protein, 126 aa, Zea mays
  unsure (1)..(126): unsure at all Xaa locations
MCGGAIIADFVPAGARRPATDDTMSASSSEDHPELPLPLPAPAPGRKTAYRGIRRRPWGRWAXAVIRDPRKGARVWLGTYATPEDAARAYDVAAREIRGPKAKLEYAXSRGAGPAPAPARAKVPSL

SEQ ID NO: 6114 - protein, 134 aa, Zea mays
  unsure (1)..(134): unsure at all Xaa locations
XQQPQPXAPLAAAAAAAVKMXGGAGGDGGRQYRGVRMRKWGKWVAEIREPHKRTRIWLGSYATAVAAARAYDTAVFYLRGRSARLNFPDEIDGDGGEPARDPADGGGGTLSAASIRKKAIEVGSRVDALHEYQG

SEQ ID NO: 6115 - protein, 173 aa, Zea mays
  unsure (1)..(173): unsure at all Xaa locations
MPCRCSPRPCSPEEHMEQRAVLWCMVPSEQPRGRRKKRPRRSRDGPTSVAAVIQRWAERNKHLEYEESARKAPAKGSKKGCMKGKGGPDNTQCGYRGVRQRTWGKWVAEIREPNRVDRLWLGTFPTAEDAARAYDEAARAMYGDLARTNFPGQDATTSSACFRFLKKRKKXAA

SEQ ID NO: 6116 - protein, 273 aa, Zea mays
  unsure (1)..(273): unsure at all Xaa locations
XRVRVRDLLASAVHSXYSSHLYLSAHAGGEQAAHDVQGAAAMEGHYSPTASAAEAGGXXRRFRGVRQRPWGKWAAEIRDPHKAARVWLGTFDTAESSASAWSYPATTGSWSASSQYPPSTLRGLPKKTYKIDDFVQDACIRARSNRRLQYFVSXSADYLQYQMMLLQGAATSGQGSSSSXXGGYPLYYDYGGHGGAGAGAGGGAMSSSYSFPASTVTVASVPSSSASSAPSYGEAAQWAGSWPESSAWSYPATTASWSGSSQYEYPPSTRPPQ

SEQ ID NO: 6117 - protein, 202 aa, Zea mays
  unsure (1)..(202): unsure at all Xaa locations
MVKGAHFQDAAVDGGAGGNAEAAMQGGAKRQYKGVRMRSWGSWVSEVRAPSQKTRIWLGSYSTAEAAARAYDAALLCLKGSAAADLNFPVHLPFHVPAAAAMSPKSIQRVAAAAAASGGATCSPPQLQAGAAASAPYSAGAGAADGASPPCSYGDASSGVSCYDGPMQHVLXAPAPMATDAASEWEWEEEGQIDLWSFSSLN

SEQ ID NO: 6118 - protein, 113 aa, Zea mays
  unsure (1)..(113): unsure at all Xaa locations
MDMAMSQHSSDTSSTSSYSSDPSSTSSTTSGKKRPXXPHAAAAPAYRGVRMRAWGKWVSEIREPRKKSRIWLGTFPRPEMAARAHDAAALSVKGARAVLNFPALACRLLRPVX

SEQ ID NO: 6119 - protein, 122 aa, Zea mays
  unsure (1)..(122): unsure at all Xaa locations
XPRVRPRVRPRVRPRVRGKASAEIRDPHKGVRVWLGTYNTAEEAARAYDEAAKRIRGEKAKLNFPQTPHLTQPPAKKRCMMAPELTPPSSETKSPPTPQLFMGFGYENGVYRPSEAMESEME

SEQ ID NO: 6120 - protein, 182 aa, Zea mays
  unsure (1)..(182): unsure at all Xaa locations
RPAAAAGLSTQARVNLKRNGGNGTDGTARASEPGAAAARAAHDDDRFVRGMVKGAQLQDAAADAARNAAAAAARQQGCGGGGPAGCGKKYKGVRMRSWGSWVSEIRAPNQKTRIWLGSYSTAEAAARAYDAALLCLKGSAADLNFPVHLPFHIXXAAAMSPKSIQRVAAAAAANATCGSPLX

SEQ ID NO: 6121 - protein, 215 aa, Zea mays
  unsure (1)..(215): unsure at all Xaa locations
STRARSGAARDMVKGAHFQDAAVDGGAGGNAEAAMQGGAKRQYKGVRMRSWGSWVSEVRAPSQKTRIWLGSYSTAEAAARAYDAALLCLKGSAAADLNFPVHLPFHVPAAAAMSPKSIQRVAAAAAAASGGATCSPPXATPPCSYGDASSSSGVSSPETGRNAGLCYGTTHYDDMDMDLAGDADADLAAPPVATDAASEWAEEGEIDLWSFSSLN

SEQ ID NO: 6122 - protein, 147 aa, Zea mays
  unsure (1)..(147): unsure at all Xaa locations
PVSMQVAAMQRHQQQQQFVHHLQQVHQQGTQHXXATAATAPERQQQQRRQDRRRPXKCCPLRRSRKGCMKGKGGPDNQQCPFRGVRQRTWGKWVAEIREPNRGARLWLGTFGSALEAARAYDAAARTLYGDCARLNLQLYTLKKKKK

SEQ ID NO: 6123 - protein, 205 aa, Zea mays
  unsure (1)..(205): unsure at all Xaa locations
LKHLKSTHHRTDRDRGAEWPPIAMPKLQRFRGVRQRHWGSWVSEIRHPLLKTRIWLGTYETAEDAARAYDEAARLISGPAARTNFPLTDGGGGGGTLSPTLRAKLEKCXAARRRRRSRSTAATARTRRGRVRVGATTAVAAAIAGGTATRRXEEAGVKVEPDADADGEEYIEEMIRELTYYGPVEIQHHPSAAGGGGACSSSAIG

SEQ ID NO: 6124 - protein, 102 aa, Zea mays
  unsure (1)..(102): unsure at all Xaa locations
KWAAEIRDPVKGVRVWLGTFPSAEAAALAYDEAARAIRGPRAKLNFSSSSAVAXPRPRERASAXXAAPPAAKPAPVITLVDDEEEXXRRAFVKHEDEASEGS

SEQ ID NO: 6125 - protein, 276 aa, Zea mays
  unsure (1)..(276): unsure at all Xaa locations
SRAYYIVHQESCVANHRVVDRVSKSKRRRRLGTTKPKPESYTIPVIQPASQPSHHIMVKTAASSSSXXDAAAAKRRTYKGVRMRSWGSWVSEVRAPGQKTRIWLGSHATAEAAARAHDAALLCLRGSAADLNFPLRLPFDLPPAATMSPKAIQRVAAAAASASSSSFAPRAENNGTSACSDGDGDATPASSTTSSPTSHADDVSSPDSTVSSAGDVDYYTSLADIDAFFQSPNVVDYALMDPCSAFFAPDSTAADDDGGWDGGGIALWSFSATLDC

SEQ ID NO: 6126 - protein, 193 aa, Zea mays
  unsure (1)..(193): unsure at all Xaa locations
XITSSQSVDDTCGGAGSSSSRKRPRRELKHPTYRGVRMRAWGKWVSEIREPRKKSRIWLGTFDTPEMAARAHDVAALAIKGRAAHLNFPGMSHELPRAASAAPEDVRAAAALAAAMEMESSSSSGNDADNAQSEEQAAPSEHSVLADGHVLDLALFELPDVLLEFGFALPPTLTSCAYDLSWDEPLLXSGSTX

SEQ ID NO: 6127 - protein, 168 aa, Zea mays
  unsure (1)..(168): unsure at all Xaa locations
SCTYSSSSNATSGSLNGSSSPTSSDDSGGGGGKGTNKRPRRDLKHPTYRGVRMRAWGKWVSEIREPRKKSRIWLGTFDNPEMAARAHDAAAVAIKGRAAHLNFPDLAHDLPRAASAAPKDVQAAAALAAATVPDTLDDDADTETEEDLPPQQCNAGMREREPAGSALX

SEQ ID NO: 6128 - protein, 73 aa, Zea mays
  unsure (1)..(73): unsure at all Xaa locations
MPKLQRFRGVRQRHWGSWVSEIRHPLLKTRIWLGTYETAEDAARAYDEAARLISGPAARTNFPLNTCRLPHLX

SEQ ID NO: 6129 - protein, 223 aa, Zea mays
  unsure (1)..(223): unsure at all Xaa locations
MAQELHETSSSSATTTASSCTTSCCSSTVTDSSSSPPSPAAANAAPAPRKAEAETGGDEDGCAGKAAPAKKRERSSEGKHPTYRGVRMRAWGKWVSEIREPRKKSRIWLGTFPTAEMAARAHDAAALAIKGRATXEVPATRAAAVRLAGPAPRRPGRVRALPADVGPVPXRVGGQCGGGAAALGIAVLQLQRGSKQXXVPVVXPISSSLFSPSLSFFFLWKSS

SEQ ID NO: 6130 - protein, 222 aa, Zea mays
  unsure (1)..(222): unsure at all Xaa locations
MAQELHETSSCSATTTSSCTTSCCSSTVTDSSSSPPSPAAANAAPAPRKAEAETGGDEDGCAGKAAPAKKRERSSEGKHPTYRGVRMRAWGKWVSEIREPRKKSRIWLGTFPTAEMAARAHDAAALAIKGRATXEVPATRAAAVRLAGPAPRRPGRVRALPADVGPVPXRVGGQCGGGAAALGIAVLQLQRGSKQXXVPVVXPISSSLFSPSLSFFFLWKSS

SEQ ID NO: 6131 - protein, 191 aa, Zea mays
  unsure (1)..(191): unsure at all Xaa locations
SGEPSPRSSGKHAFYRGIRCRSGKWVSEIREPRKARRIWLGTYPMAEMAAAAYDVAARALRGADAVLNFPGAIASRAAPASASPEDIRAAAAAXAARVLASGSYRQSSPSSCFSSSAAAAQDWHQQHDAASYTQAGTDEFMDEEAIFXMPQLLRNMAAGMMMSPPXXLSPDTSDESPDPSDGESLWSYRDP

SEQ ID NO: 6132 - protein, 86 aa, Zea mays
  unsure (1)..(86): unsure at all Xaa locations
MAPKRKERAAAEQEQEQPRLRGVRKRPWGRYAAEIRDPVRKARVWLGTFDTPEQAARAYDXRRAQALAASASGNTESSSSSSSRDX

SEQ ID NO: 6133 - protein, 289 aa, Zea mays
  unsure (1)..(289): unsure at all Xaa locations
IGRDGSKLFHTGIALEKSAGLVFNSFLLTRIRYMTLYISYDDGLPCWVRKKRMRRKSTGPDSIAETIKWWKEQNQKLQDESGSRKAPAKGSKKGCMMGKGGPENVNCVYRGVRQRTWGKWVAEIREPNRGRRLWLGSFPTAVEAAHAYDEAAKAMYGPKARVNFSESSADANSGCTSALSLLASSVPAAALQRSDEKVETEVESVETEEVVHEVKTEAKNGXTWEASRSPASFSPRRRXVLHKEGDVSYDYFNVEDVVEMIIVELNADKKFEAHEEYLDGDDGFSLFAY

SEQ ID NO: 6134 - protein, 119 aa, Zea mays
  unsure (1)..(119): unsure at all Xaa locations
GGTSKATVAXAAAAQQQRRGRKRFVGVRQRPSGRWVAEIKDTIQKIRVWLGTFDTAEEAARAYDEAACLLRGANTRTNFSSKVTNLLLLRLRARNNQQQLLLNATPARQQEAAAAALLQ

SEQ ID NO: 6135 - protein, 157 aa, Zea mays
PTPCYLCIFAFLIALLLLLTVDITRTHRTLYSSQSTRARSGAARDMVKGARLQDAAVAGGNAETAMQGAGGGAKRQYKGVRMRSWGSWVSEVRAPSQKTRIWLGSYSTAEAAARAYDAALLCLKGSAAADLNFPVHLPFHVPAAAAMSPKSIQRVAA

SEQ ID NO: 6136 - protein, 157 aa, Zea mays
  unsure (1)..(157): unsure at all Xaa locations
HSPRPAPLQPQSPSGPPAAPPPPLRRQAKAAMDTDDAQEPASPTSPSPSSSSSSSSSSSVPXKKRARRDGGRHPTYRGVRMRSWGKWVSEIREPRKKSRIWLGTFATAEMAARAHDVAALAIKGARDAHLNFPGLARLLPRPATAAPRDVQAAAALA

SEQ ID NO: 6137 - protein, 149 aa, Zea mays
  unsure (1)..(149): unsure at all Xaa locations
RCCRVKNPSSNGVLTAAAAFSDSKAMRESGKAAAARPYKGVRMRSWGSWVSEIRAPNQKRRIWLGSYATPEAAARAYDAALLCLKGSDAVLNFPSSSAGGRPDDDDPGASGGMSPRSIQRAAAAAAAAFGDAAPTPASLSTQGSTDHAX

SEQ ID NO: 6138 - protein, 109 aa, Zea mays
  unsure (1)..(109): unsure at all Xaa locations
MAPEQAAATTARNRRGCRRSXRYKGVRLRKWGRWVSEIRMPNSRERVWLGSYESAEKAARAFDAAAVCLRGSRAGFNFPESPPNVRYVPGALLTPEQIQAEAARHANQQ

SEQ ID NO: 6139 - protein, 252 aa, Zea mays
MELHFQAQPPVFQLENYSSSSASSYYYYYQQQEAAAQAKPSKPRGRKKGSNNHSKFVGVRQLPSGRWVAEIKDTTQKIRMWLGTFETAEAAAKAYDEAARLLRGTDARTNFAPRISPDCPLAVRIRGLLHHKEDQEGQGRRRSRQQQASSSSPASTTSNSNSNSHSTNSARTGALDAGEVYRPGFATAGTEEEFDSWMFDSAFPALDSFAAVDSAVPAAGTTEEPGAEMAEFERIKVERRISASLYAMNGLQ

SEQ ID NO: 6140 - protein, 189 aa, Zea mays
  unsure (1)..(189): unsure at all Xaa locations
WLSSSRPILLTRRCKCNDRDRQQATAARLVRLQPRLILLLQWCRATTTGRRRRPRRARGSRRRGXSGKHAFYRGIRCRSGKWVSEIREPRKARRIWLGTYPTPEMAAAAYDVAARALRGADAVLNFPGAIASRAAPASASPADIRAAAAAAAQAQLEYSQSQGAASNPLAAAAAQGRHQQQHHGASSTA

SEQ ID NO: 6141 - protein, 197 aa, Zea mays
  unsure (1)..(197): unsure at all Xaa locations
XRSXSRSYYSSPSTSRARIELRQYKGVRMRSWGSWVSEVRAPSQKTRIWLGSYSTAEAAARAYDAALLCLKGSAAADLNFPVHLPFHVPAAAAMSPKSIQRVAAAAAAATGAAASAPYSAGGGAGATPPCSYGDASSSSGVSSPETGRNAGLCYGTAHYDDMDMDLAGVAPAPVATDAASEWAEEGEIDLWSFSSLN

SEQ ID NO: 6142 - protein, 201 aa, Zea mays
  unsure (1)..(201): unsure at all Xaa locations
MWPMEEEEVFVTVRRTEHVDVTSRAVVVAAGRAAVAGPRTVRVFCDDYDATDSSGDEAEEEETARRRVKRYVQEIRLERAAKXRRXEEEEATAAASLGAVLPGRKRKRKPDGEASEPRFRGVRQRPWGKXYAAEIRDPWRRXWRVWXLGTFDXTAEEAAKVYDSAAAKXLRGRDATTNFQAAGGPRALSQGRAGSKSAATS

SEQ ID NO: 6143 - protein, 176 aa, Zea mays
  unsure (1)..(176): unsure at all Xaa locations
DPDATDSDSDSDDEEAGARTKRFSFEAFIGKAPAKPVLPAAAVAACTSGGAXXERYRGVRLRKWGKWAAEIRNPFTGKRQWLGTFDTAGAASAAYLSASRSFADEKRRRRGLPVAASTPDTPASGSTPTASSSSSASTAPFAHPSPSSVLEPSKEAQNTQSPELTPAPPSTESAQX

SEQ ID NO: 6144 - protein, 93 aa, Zea mays
  unsure (1)..(93): unsure at all Xaa locations
RHTPGKDCINGGGSKPGGRSPLRRSRKGCMKGKGGPDNQQCPFRGVRQRTWGKWVAEIREPNRGARLWLGTFGSALEAARAYDAAARALYGDX

SEQ ID NO: 6145 - protein, 226 aa, Zea mays
  unsure (1)..(226): unsure at all Xaa locations
IYQATCSRISVTLPSPPPRHGQRKIXAPRRTATYMMVKNPSSNGVLTATAFSDSKTRPERAVGGEAARRPYRGVRMRSWASWVSEIRAPNQKRRIWLGSYATPEAAARAYDAALLCLKGSNAVLNFPAASSSSHPDDDPAAAGGDMSPRSIQRAAAAAAAAIDDDAGMGASAADDRCSSSAGATTPTSASLSTQGSTADHVGQEQHATTTXAAASTGSPPEGKEEX

SEQ ID NO: 6146 - protein, 179 aa, Zea mays
  unsure (1)..(179): unsure at all Xaa locations
LPTLCDGAILLEFIPSVLVRRGVTPGHGRGVKVRLTAANDDDDFEAAFRDLCEDSEKQPVWXXFYRRRSGXAGSGSRRSISPYXSVRCRPWGKWAAEVPVPVRGVRVWLGTFATAEDLARAXDHSARDLRGATTRLNFPSNSTPLRSRQGGAARERARALERERVRRRXENQDRPVVPX

SEQ ID NO: 6147 - protein, 220 aa, Zea mays
  unsure (1)..(220): unsure at all Xaa locations
MVQSKKKFRGVRQRHWGSWVSEIRHPLLKRRVWLAXTFETAEEAARAYDEAAVLMSGRNAKTNFPVPRSGTGELLAPAVPAAREARGGGGGGTSLSQILSAKLRRCCKTPSPSLTCLRLDPEKSHIGVWQKRAGARADSSWVMTVELNKDAPPPPSSGEEPAPRATTSTSTPTSSTITAGSPPPEMMDDEESVALQMIEELLGSHGMMLQVQGAAGSLVI

SEQ ID NO: 6148 - protein, 316 aa, Zea mays
LCCSSCAVQETAPTLSKKFPPSHLWSIWKRCVKMRPSVQKVRIFCSDPDATDSSDDEDGQIIAVKKMVMEILVPVTNSKTSNSLKTLVPCGAKDLEVSEKKGKSSRFRGVRRRRWGRWAAEIRDPVRKTRKWIGSYDSEEAAAAAYQAYAKQIREELLAIKNQRSVSERAALSSSSSVSCVSSSPPCEQTGHEPQTRVLVEKDPEPVDEVFLNFSLTPKGISMDDLLGRIDEIPVCDDPVSPADELPLDNFTSLEDAFPISDFIGSRDEHLYEHYIGLADISHLPLPMDDPAFNLDAELDWSGFDFAAIEGELDVL

SEQ ID NO: 6149 - protein, 262 aa, Zea mays
  unsure (1)..(262): unsure at all Xaa locations
MGAAVKEEEVPPRQAAPLGLLGSPTSPSRCSSGAVRPATMDAAVGAPRAXVEAAVRGVGQSHWGSWVSEIRHPLLKRRVWLGXTFETAEEAARAYDEAAVLMSGRNAKTNFPVPRSRPRALPAPAGPAGRAAGGGGGGCTSLSQVLSAKLRRCCKTPSPSLTCLRLDPERSHIGVWHKGAGARADSSWVMTVQLSDKDAAPAPSATSSATATTXXTAASHPPPATVVVVDDEEGIALRIVGYLLDPLGKVLQTAEEAAGLVC

SEQ ID NO: 6150 - protein, 82 aa, Zea mays
  unsure (1)..(82): unsure at all Xaa locations
XDAWARGWWRASPPSSSSPRPRRRSPEHRTRRRRPDQNQSRGVRGRPWGRWAARIRDPVKGVRVWLGTFPSAEAARRAYNHA

SEQ ID NO: 6151 - protein, 134 aa, Zea mays
  unsure (1)..(134): unsure at all Xaa locations
CARTRVPCCWRRSAAXAAERKARARRQKLSSWTGVRFRHWGKWAAEIRVPRTREKLWIGTFESARQAALAYDAAVFCFYGERGKPNFPAMPRPEVDEGSRLHLSVAEVKVIAERHARDVXTPSSRRWRTRTAQG

SEQ ID NO: 6152 - protein, 326 aa, Zea mays
  unsure (1)..(326): unsure at all Xaa locations
MAPLNHHQHVLLKKALAKKPKAKRMSRFGLKPSAXSPPEVPAAAAAAQPRRRVRVLFEDPDATDSDSDDEEAGGPAEAKRFSFEAFVGKVPAKPVLPAAAVAACTSGGAXXERYRGVRLRKWGKWAAEIRNPFTGKRQWLGTFDTAGAASAAYLSASRSFADEKRRRRGLPVAASSADTPASGSTPTASSSSSASTAPFAHPSPSSVLEPSKEARNTQSPEATPARPSTDSAQLPEDPEFYQDLLRGLQLPDIDPLDFRAGLDALDLSDADFGLDDEHDLLLGDFGDEEMEIDLDLDDINDVFPEMPGCDLGRGMDDFLQTVDFCV

SEQ ID NO: 6153 - protein, 280 aa, Zea mays
KKKTSPPPTPSLPPSLTQWGSQSRAATAKILRGLLSPARHCAARAIHPRFTQPTIHPPPHPAAAMCGGAILSGFIPPSGVPAAAKKKQQRRATADLLWPGPGKKGAPREEDFEADFREFERGLEEDDVDDGAGGEVQELPLPEPARLAFAAAVGAPRTAVDGVMTPKDAEGDMPTTANNSAANKRRRKNQYRGIRRRPWGQVGGRDQRPQQGASASGSAHTAPAEEAARAYDAEARRIRGKKAKVNFRDEAAAAGAQKPPAATATTPTACASAARLAPRP

SEQ ID NO: 6154 - protein, 371 aa, Zea mays
  unsure (1)..(371): unsure at all Xaa locations
SPTAAAPEDSSSAASTATTESAAAAQPPPAAAPPGGGAVGGGDAVAVSPAADEQAVTSQPSAVPQGSSRFKGVVPQPNGRWGAQIYERHARVWLGTFADEEAAARAYDVAALRYRGREAATNFPGAGASAPELAFLAAHSKAEIVDMLRKHTYADELRQGLRRGRSRAQPTPAWARVLLFDKAVTPSDVGKLNRLVVPKQHAEKHFPLKRAPPSVEAQAPTTAKGVLLNFEDGEGKVWRFRYSYWNSSQSYVLTKGWSRFVKEKGLQAGDVVGFYRSAAGADSKLFIDCKXVDTAASTTSRVGSSPPPAPVAKAVRLFGVDLLTAPAXRHGPVQXSQGLGLAPXQAAIKKQLVELALASVDQCYGAGRSFS

SEQ ID NO: 6155 - protein, 111 aa, Zea mays
SLPHNTQVLIFPPASSAHHHKPNRELSLSRSFNSRMLLNPASVLDTIRQHLLEEPPAAADESFGILVADQWSGSLPFRTDDADDDDDPTDEAGQAAGDRTLLGREEERIVQ

SEQ ID NO: 6156 - protein, 117 aa, Zea mays
RPAPRRAQWLGTFDTAEDAARAYDAAAVELRGRRAKLNFPDAAAAAAARDVQPRRPLPGQSLRENCGSNAASPLHVAVARAPTTLQGTGPAPPKDQDIWDGLNEILTMDDRSFWSMP

SEQ ID NO: 6157 - protein, 263 aa, Zea mays
  unsure (1)..(263): unsure at all Xaa locations
SPCSLVRTTHTHTHTEEERTLRYNPVAADYADRVHGNQAKQSKRRIGRSRRPTDRPSYLATAHQPMVKTATATATAAARHGGAHKRTYKGVRMRSWGSWVSEVRAPGQKTRIWLGSHSTAEAAARAYDAALLCLRGSAAPDLNFPPRRPLADGLHPLPPAAMSPKAIQRVAAAAAACNGIGSACGHAETAPALSGSPPSSDSDVSSPEAGSTASSDGELARYGDGDGDXXGVSVDYGSLADIDAFFQSPNIALWSFSFPALDC

SEQ ID NO: 6158 - protein, 225 aa, Zea mays
VAACTSGGAPERYRGVRLRKWGKWAAEIRNPFTGKRQWLGTFDTAGAASAAYLSASRSFADEKRRRRGLPVAASSADTPASGSTPTASSSSSASTAPFAHPSPSSVLEPSKEARNTQSPEATPARPSTDSAQLPEDPEFYQDLLRGLQLPDIDPLDFRAGLDALDLSDADFGLDDEHDLLLGDFGDEEMEIDLDLDDINDVFPEMPGCDLGRGMDDFLQTVDFCV

SEQ ID NO: 6159 - protein, 195 aa, Thellungiella halophila
MTKMGFKPDSNPSPNPNESNAKEIRYRGVRKRPWGRYAAEIRDPGKKTRVWLGTFDTAQQAARAYDAAAREFRGAKAKTNFPTFLELNAAKDGGFARSPSQSSTVDSVSPTSARLVTPPQLELSLGGGGGGACYQIPVARRPVYFYNMTTFPAAAAATCGVQSESDSSSVVDFECGAEKKYRPLDLDLNLAPPAE

SEQ ID NO: 6160 - protein, 235 aa, Matricaria chamomilla
MIRNNAFDSDFALLESVRRHLLDDNAPPMSCRSNNFLFPHLSDSWGELPLQQNDSEDMLIAKFLNEALPLQQNDSEGIITPEMTSSSENIFFVKSEPETSSFQPKSLGSQKGKHYRGVRRRPWGKYAAEIRDPAKNGARVWLGTYETAEDAAVAYDMAAYRMRGSRALLNFPLRINSGEPEPVRITSKRKTTSPSEGLVVKKVKVELEMSTQAEFPLVYGCYYCVILGPFLVKCF

SEQ ID NO: 6161 - protein, 475 aa, Streptomyces coelicolor A3(2)
MSLHQGPRPSRDSDRDRRRLAVNPFHAAANPLGGMTEAPPAHRLPDSPLPPESAYRLVHDELMLDGNARLNLATFVTTWMEPQAGVLMSECRDKNMIDKDEYPRTAELERRCVAMLADLWHAPDPSTAVGCSTTGSSEACMLAGMALKRRWALRNADRYPAKDVRPNLVMGVNVQVCWDKFCNFWEVEARQVPMEGDRFHLDPQAAAELCDENTIGVVGILGSTFDGSYEPVADLCAALDALQERTGLDVPVHVDGASGAMVAPFLDEDLVWDFRLPRVASINTSGHKYGLVYPGVGWALWRDAEALPEELVFRVNYLGGDMPTFALNFSRPGAQVVAQYYNFLRLGREGYRAVQQSARDIAGSLAERVAALGDFRLLTRGDQLPVFAFTTADDVTAYDVFDVSRRLREGGWLVPAYTFPPHREDLSVLRVVCRNGFSADMADLLLADLERLLPELRRQPGPLTRDKGAATGFHH

SEQ ID NO: 6162 - protein, 568 aa, Mus musculus
MPGTDLLKLKDFEPYLEILESYSTKAKNYVNGYCTKYEPWQLIAWSVLCTLLIVWVYELIFQPESLWSRFKKKLFKLIRKMPFIGRKIEQQVSKAKKDLVKNMPFLKVDKDYVKTLPAQGMGTAEVLERLKEYSSMDGSWQEGKASGAVYNGEPKLTELLVQAYGEFTWSNPLHPDIFPGLRKLEAEIVRMTCSLFNGGPDSCGCVTSGGTESILMACKAYRDLALEKGIKTPEIVAPESAHAAFDKAAHYFGMKIVRVALKKNMEVDVQAMKRAISRNTAMLVCSTPQFPHGVMDPVPEVAKLAVRYKIPLHVDACLGGFLIVFMEKAGYPLEKPFDFRVKGVTSISADTHKYGYAPKGSSVVMYSNEKYRTYQFFVGADWQGGVYASPSIAGSRPGGIIAACWAALMHFGENGYVEATKQIIKTARFLKSELENIKNIFIFGDPQLSVIALGSNDFDIYRLSNMMSAKGWNFNYLQFPRSIHFCITLVHTRKRVAIQFLKDIRESVTQIMKNPKAKTTGMGAIYGMAQATIDRKLVAEISSVFLDCLYTTDPVTQGNQMNGSPKPR

SEQ ID NO: 6163 - protein, 568 aa, Mus musculus
MPGTDLLKLKDFEPYLEILESYSTKAKNYVNGYCTKYEPWQLIAWSVLCTLLIVWVYELIFQPESLWSRFKKKLFKLIRKMPFIGRKIEQQVSKAKKDLVKNMPFLKVDKDYVKTLPAQGMGTAEVLERLKEYSSMDGSWQEGKASGAVYNGEPKLTELLVQAYGEFTWSNPLHPDIFPGLRKLEAEIVRMTCSLFNGGPDSCGCVTSGGTESILMACKAYRDLALEKGIKTPEIVAPESAHAAFDKAAHYFGMKIVRVALKKNMEVDVQAMKRAISRNTAMLVCSTPQFPHGVMDPVPEVAKLTVRYKIPLHVDACLGGFLIVFMEKAGYPLEKPFDFRVKGVTSISADTHKYGYAPKGSSVVMYSNEKYRTYQFFVGADWQGGVYASPSIAGSRPGGIIAACWAALMHFGENGYVEATKQIIKTARFLKSELENIKNIFIFGDPQLSVIALGSNDFDIYRLSNMMSAKGWNFNYLQFPRSIHFCITLVHTRKRVAIQFLKDIRESVTQIMKNPKAKTTGMGAIYGMAQATIDRKLVAEISSVFLDCLYTTDPVTQGNQMNGSPKPR

SEQ ID NO: 6164 - protein, 568 aa, Mus musculus
MPGTDLLKLKDFEPYLEILESYSTKAKNYVNGYCTKYEPWQLIAWSVLCTLLIVWVYELIFQPESLWSRFKKKLFKLIRKMPFIGRKIEQQVSKAKKDLVKNMPFLKVDKDYVKTLPAQGMGTAEVLERLKEYSSMDGSWQEGKASGAVYNGEPKLTELLVQAYGEFTWSNPLHPDIFPGLRKLEAEIVRMTCSLFNGGPDSCGCVTSGGTESILMACKAYRDLALEKGIKTPEIVAPESAHAAFDKAAHYFGMKIVRVALKKNMEVDVQAMKRAISRNTAMLVCSTPQFPHGVMDPVPEVAKLAVRYKIPLHVDACLGGFLIVFMEKAGYPLEKPFDFRVKGVTSISADTHKYGYAPKGSSVVMYSNEKYRTYQFFVGADWQGGVYASPSIAGSRPGGIIAACWAALMHFGENGYVEATKQIIKTARFLKSELENIKNIFIFGDPQLSVIALGSNDFDIYRLSNMMSAKGWKFNYLQFPRSIHFCITLVHTRKRVAIQFLKDIRESVTQIMKNPKAKTTGMGAIYGMAQATIDRKLVAEISSVFLDCLYTTDPVTQGNQMNGSPKPR

SEQ ID NO: 6165 - protein, 568 aa, Rattus norvegicus
MPSTDLLKLKDFEPYLEILEAYSTKAKNYVNGYCTKYEPWQLIAGSVLCTLLVVWVYELIFQPESLWSRFKNKLFRLIRKMPFIGRKIQQQLTKAKKDLVKNMPFLKLDKDYVKTLPAQGLSTAEVLERLKEYSSMDVFWQEGKASGAVYSGEPKLTELLVQAYGEFTWSNPLHPDIFPGLRKLEAEIVRMTCSLFNGGPDSCGCVTSGGTESILMACKAYRDLALEKGIKTPEIVAPESAHAAFDKAAHYFGMKIVRVAQKKNMEVDVRAMKRAISRNTAMLVCSAPQFPHGVIDPIPEVAKLAVKYKIPFHVDACLGGFLIVFMEKAGYPLEKPFDFRVKGVTSISADTHKYGYAPKGSSVVMYSNEKYRKYQFFVDADWQGGIYASPSIAGSRPGGIIAACWAALMHFGENGYVEATKQIIKTARFLKSELENIKNIFILGDPQLSVIALGSNDFDIYRLSNMMSAKGWNFNYLQFPRSIHFCITLVHTRKRVAIQFLKDIRESVTQIMKNPKAKTTGMGAIYGMAQATIDRKMVAEISSVFLDSLYSTDPVTQGNQMNGSPKPR

SEQ ID NO: 6166 - protein, 488 aa, Rattus norvegicus
MPFIGRKIQQQLTKAKKDLVKNMPFLKLDKDYVKTLPAQGLSTAEVLERLKEYSSMDVFWQEGKASGAVYSGEPKLTELLVQAYGEFTWSNPLHPDIFPGLRKLEAEIVRMTCSLFNGGPDSCGCVTSGGTESILMACKAYRDLALEKGIKTPEIVAPESAHAAFDKAAHYFGMKIVRVAQKKNMEVDVRAMKRAISRNTAMLVCSAPQFPHGVIDPIPEVAKLAVKYKIPFHVDACLGGFLIVFMEKAGYPLEKPFDFRVKGVTSISADTHKYGYAPKGSSVVMYSNEKYRKYQFFVDADWQGGIYASPSIAGSRPGGIIAACWAALMHFGENGYVEATKQIIKTARFLKSELENIKNIFILGDPQLSVIALGSNDFDIYRLSNMMSAKGWNFNYLQFPRSIHFCITLVHTRKRVAIQFLKDIRESVTQIMKNPKAKTTGMGAIYGMAQATIDRKMVAEISSVFLDSLYSTDPVTQGNQMNGSPKPR

SEQ ID NO: 6167 - protein, 467 aa, Synechocystis sp. PCC 6803
MVHKKIDLNQLSEAESLLTPTYAARGLANSVSKYEMPETEMLPAIAYNLIHDELGLDGNSRLNLATFVTTWMEPEARQLMADTFDKNMIDKDEYPQTAEIELRCVNILSRLWNAPASAEATGCSTIGSSEAAMLGGMAMKWKWRQRRQAAGKPGDRPNLVMGINVQVCWEKFCRYWEVEPRFVPMEGDRYHISPEEAVKLIDENTIGVIGILGSTFDGSYEPIEALNDALETLNQRTGWQVPLHIDAASGGFIAPFLDPDLRWDFRLPWVKSINTSGHKYGLVYPGVGWIIWRDKEELPEELIFHCNYLGGDLPNFALNFSRPGNQVVAQYYNFLRLGKEGYRKIQQTCRDTALYLSGKIAQLGPFELLTDGGDIPVFAWRLKDEVLANTCYTLYDMADKLRERGWLVPAYRMPKNREDLVVQRIVVKEGFSRDMADLLLADMERAIAYFASQPDHKPKQEGSHFSH

SEQ ID NO: 6168 - protein, 468 aa, Ralstonia metallidurans
MSTLRGVSMSDMQEHKVTPYDQFNYEVPENVFPREGISANAAAAIVISDEWTDTNPMLNMSSFVTTFAEPEAREVAARNIFKNYIDHDMYPRLFAMEGRMVRWLHELWNGPKGVEPYGTCTVGSSEACMLGGLAHKWNWRQRRQAEGKDATRPNMVTGGNVQIVWKKFLRYFDVEPRIVPLKPGNYCLTAEDLDKYVDENTICVVAIAGQTFTGEDDDIQGIHDWLDAYEKRTGISIPMHIDGASGGFVNPFLYPDYKWDFRLPRVQSINASGHKYGLTPPGLGWVVFRERKIFNEELVFYVNYLGGEMPTATLNFSRNAFQVAVQYYQFLRLGFDGYKRVMQHTLDNAIFLRQQLVDSGYFDIMNTTQRIPVVAVTLNKKYKNFNEFDVSNKVREKGWVLSAYTMPPNAESVTSLRVVVRPHVNHNVAQLLANDIINACKFLEANGGNAKPPALHKHAEAQSTSLKC

SEQ ID NO: 6169 - protein, 519 aa, Burkholderia fungorum
MPRRRDAVRHRTDFDRRDAHRGSGSFSAYLTSSFHSLRHSSRDRHEPGTLTSNQELHAMTFLKSPPPTPEDVADEYAATISGSSLPKYRIPEASSDRRAVFDLVRDELFMDGNSRQNVATFCTTYADDEVRHLMDLSIDKNMIDKDEYPQTAEIEMRCVHMLADLWHASKAWKTTGCSTTGSSEACMLGGLALKWQWKKRREAQGKPTDKPNFVCGPVQVCWAKFARYFDVEMRQVPLRGEATGLTPEDLAEYCDENTIGVVATLGITFTCVYEPVKALAGALDALQANVGLDIPIHVDAASGGFVAPFIQPDLEWDFSVPRVKSINASGHKYGLAPLGVGWVVWRSTQDLPDELIFRVDYLGGDMPTFALNFSRPAGQIIAQYYMLLRLGREGYRRIQQECADTAQALADGLAKIDQLEMIYDGRGALPAVCYKLKHPETAGFTLFDLSDQVRMRGWQIASYELPAGREDTIVQRVLIRRGVTRDMAAMLLEDIRHAIGHLTKNPVLHSSAGPTFHHN

SEQ ID NO: 6170 - protein, 461 aa, Burkholderia fungorum
MTFLKSPPPTPDAVADEYAAMISGSSLPKYRIPEASSDRRAVFDLVRDELFMDGNSRQNVATFCTTYADDEVRRLMDLSIDKNMIDKDEYPQTAEIEMRCVHMLADLWHATKSWKTTGCSTTGSSEACMLGGLALKWQWKKRREAQGKPTGKPNFVCGPVQVCWAKFARYFDVEMRQVPLSGDATGLRPEDLAQYCDENTIGVVATLGITFTCVYEPVKALAGALDALQANVGLDIPIHVDAASGGFVAPFIQPDLEWDFSVPRVKSINASGHKYGLAPLGVGWIVWRSTQDLPDELIFRVDYLGGDMPTFALNFSRPAGQIIAQYYMLLRLGREGYRHIQQECADTAQALADGLAKIDALDMIYDGRGALPAVCYKLKHPDTAGFTLFDLSDRVRMRGWQIASYELPAGREDTIVQRVLIRRGVTRDMAAMLLEDIKHAIAHLTKNPVPNSTAGPTFHHD

SEQ ID NO: 6171 - protein, 466 aa, Enterococcus faecium
MLYGKDNQEEKNYLEPIFGSASEDVDLPKYKLNKESIEPRIAYQLVQDEMLDEGNARLNLATFCQTYMEPEAVKLMTQTLEKNAIDKSEYPRTTEIENRCVNMIADLWHAPNNEKFMGTSTIGSSEACMLGGMAMKFAWRKRAEKLGLDIQAKKPNLVISSGYQVCWEKFCVYWDVELREVPMDEKHMSINLDTVMDYVDEYTIGIVGIMGITYTGRYDDIKGLNDLVEAHNKQTDYKVYIHVDAASGGFYAPFTEPDLVWDFQLKNVISINSSGHKYGLVYPGVGWVLWRDQQYLPEELVFKVSYLGGEMPTMAINFSHSAAQLIGQYYNFVRYGFDGYRDIHQRTHDVAVYLAKEIEKTGIFEIINDGSELPVVCYKLKEDPNREWTLYDLSDRLLMKGWQVPAYPLPKDLDQLIIQRLVVRADFGMNMAGDYVQDMNQAIEELNKAHIVYHKKQDVKTYGFTH

SEQ ID NO: 6172 - protein, 219 aa, Lactococcus lactis
GGLYAPFVEPELEWDFRLKNVISINTSGHKYGLVYPGVGWVLWRDKKYLPEELIFKVSYLGGELPTMAINFSHSASQLIGQYYNFVRYGFDGYKAIHERTHKVAMFLAKEIEKTGMFEIMNDGSQLPIVCYKLKEDSNRGWNLYDLADRLLMKGWQVPAYPLPKNLENEIIQRLVIRADFGMNMAFNYVQDMQEAIEALNKAHILYHEEPENKTYGFTH

SEQ ID NO: 6173 - protein, 163 aa, Lactococcus lactis
GGLYAPFVEPELEWDFRLKNVISINTSGHKYGLVYPGVGWVLWRDKKYLPEELIFKVSYLGGELPTMAINFSHSASQLIGQYYNFVRYGFDGYKAIHERTHKVAMYLAEEIEKTGMFEIMNDGSQLPIVCYKLKENSNLGWNLYDLADRLFNEGMASACLSTS

SEQ ID NO: 6174 - protein, 157 aa, Lactococcus lactis
FVDPELEWDFRLKNVISINTSGHKYGLVYTGVGWVLWRDKKYLPEELIFKVSYLGGELPTMAINFSHSASQLIGQYYNFVRYGFDGYKAIHERTHKVAMYLAEEIEKTGMFEIMNDGSQLPIVCYKLKENSNLGWNLYDLADRLFNEGMASACLSTS

SEQ ID NO: 6175 - protein, 105 aa, Lactococcus lactis
MLYGKENRDEAEFLEPIFGSESEQVDLPKYKLAQQSIEPRVAYQLVQDEMLDEGNARLNLATFCQTYMEPEAVKLMSQTLEKNAIDKSEYPRTTEIENRCVNMIA

SEQ ID NO: 6176 - protein, 466 aa, Lactococcus lactis subsp. cremoris
MLYGKENRDEAEFLEPIFGSESEQVDLPKYKLAQQSIEPRVAYQLVQDEMLDEGNARLNLATFCQTYMEPEAVKLMSQTLEKNAIDKSEYPRTTEIENRCVNMIADLWNASEKGKIYGTSTIGSSEACMLGGMAMKFSWRKRAEKLGLDINAKKPNLVISSGYQVCWEKFCVYWDIEMREVPMDREHMSINLEKVMDYVDEYTIGVVGIMGITYTGRYDDIKALDNLIEEYNKQTDYKVYIHVDAASGGLYAPFVEPELEWDFRLKNVISINTSGHKYGLVYPGVGWVLWRDKKYLPEELIFKVSYLGGELPTMAINFSHSASQLIGQYYNFVRYGFDGYKAIHERTHKVAMYLAEEIEKTGMFEIMNDGAQLPIVCYKLKENSNRGWNLYDLADRLLMKGWQVPAYPLPKNLENEIIQRLVIRADFGMNMAFNYVQDMQEAIDALNKAHILFHQEPENKTYGFTH

SEQ ID NO: 6177 - protein, 466 aa, Lactococcus lactis subsp. lactis
MLYGKENRDEAEFLEPIFGSESEQVDLPKYKLAQQSIEPRVAYQLVQDEMLDEGNARLNLATFCQTYMEPEAVKLMSQTLEKNAIDKSEYPRTTEIENRCVNMIADLWNASEKEKFMGTSTIGSSEACMLGGMAMKFSWRKRAEKLGLDINAKKPNLVISSGYQVCWEKFCIYWDIEMREVPMDKEHMSINLDKVMDYVDEYTIGVVGIMGITYTGRYDDIKALDNLIEEYNKQTDYKVYIHVDAASGGLYAPFVEPELEWDFRLKNVISINTSGHKYGLVYPGVGWVLWRDKKYLPEELIFKVSYLGGELPTMAINFSHSASQLIGQYYNFVRYGFDGYKAIHERTHKVAMFLAKEIEKTGMFEIMNDGSQLPIVCYKLKEDSNRGWNLYDLADRLLMKGWQVPAYPLPKNLENEIIQRLVIRADFGMNMAFNYVQDMQEAIEALNKAHILYHEEPENKTYGFTH

SEQ ID NO: 6178 - protein, 466 aa, Escherichia coli O157:H7 EDL933
MDQKLLTDFRSELLDSRFGAKAISTIAESKRFPLHEMRDDVAFQIINDELYLDGNARQNLATFCQTWDDENVHKLMDLSINKNWIDKEEYPQSAAIDLRCVNMVADLWHAPAPKNGQAVGTNTIGSSEACMLGGMAMKWRWRKRMEAAGKPTDKPNLVCGPVQICWHKFARYWDVELREIPMRPGQLFMDPKRMIEACDENTIGVVPTFGVTYTGNYEFPQPLHDALDKFQADTGIDIDMHIDAASGGFLAPFVAPDIVWDFRLPRVKSISASGHKFGLAPLGCGWVIWRDEEALPQELVFNVDYLGGQIGTFAINFSRPAGQVIAQYYEFLRLGREGYTKVQNASYQVAAYLADEIAKLGPYEFICTGRPDEGIPAVCFKLKEGEDPGYTLYDLSERLRLRGWQVPAFTLGGEATDIVVMRIMCRRGFEMDFAELLLEDYKASLKYLSDHPKLQGIAQQNSFKHT

SEQ ID NO: 6179 - protein, 466 aa, Escherichia coli O157:H7 EDL933
MDKKQVTDLRSELLDSRFGAKSISTIAESKRFPLHEMRDDVAFQIINDELYLDGNARQNLATFCQTWDDENVHKLMDLSINKNWIDKEEYPQSAAIDLRCVNMVADLWHAPAPKNGQAVGTNTIGSSEACMLGGMAMKWRWRKRMEAAGKPTDKPNLVCGPVQICWHKFARYWDVELREIPMRPGQLFMDPKRMIEACDENTIGVVPTFGVTYTGNYEFPQPLHDALDKFQADTGIDIDMHIDAASGGFLAPFVAPDIVWDFRLPRVKSISASGHKFGLAPLGCGWVIWRDEEALPQELVFNVDYLGGQIGTFAINFSRPAGQVIAQYYEFLRLGREGYTKVQNASYQVAAYLADEIAKLGPYEFICTGRPDEGIPAVCFKLKDGEDPGYTLYDLSERLRLRGWQVPAFTLGGEATDIVVMRIMCRRGFEMDFAELLLEDYKASLKYLSDHPKLQGIAQQNSFKHT

SEQ ID NO: 6180 - protein, 464 aa, Listeria monocytogenes
MLYSKENKESYLEPVFGSSAEDRDIPKYTLGKEPLEPRIAYRLVKDELLDEGSARQNLATFCQTYMEDEATKLMSETLEKNAIDKSEYPRTPELENRCVNIIADLWHAPKDQKFMGTSTIGSSDACMLGGMAMKFAWRKRAEKLGLDIYAKKPNLVISSGYQVCWEKFCVYWDIDMRVVPMDKEHMQLNTDQVLDYVDEYTIGVVGILGITYTGRYDDIYALNEKLEEYNSKTDYKVYIHVDAASGGFFTPFVEPDIIWDFRLKNVISINTSGHKYGLVYPGIGWVLWKDESYLPEELIFKVSYLGGEMPTMQINFSRSASHIIGQYYNFLRYGFEGYRTIHQKTSDVAQYLAHAVEQTGYFDIFNDGSHLPIVCYKLKTTANVNWTLYDLADRLQMRGWQVPAYPLPKSLENIIIQRYVCRADLGFNMAEEFIQDFQASIQELNNAHILFHDTQQSGVHGFTH

SEQ ID NO: 6181 - protein, 464 aa, Listeria monocytogenes
MLYSKENKESYLEPVFGSSAEDRDIPKYTLGKEPLEPRIAYRLVKDELLDEGSARQNLATFCQTYMEDEATKLMSETLEKNAIDKSEYPRTAELENRCVNIIADLWHAPKDQKFMGTSTIGSSEACMLGGMAMKFAWRKRAEKLGLDIYAKKPNLVISSGYQVCWEKFCVYWDIDMRVVPMDKEHMQLNTDQVLDYVDEYTIGVVGILGITYTGRYDDIYALNEKLEEYNSKTDYKVYIHVDAASGGFFTPFVEPDIIWDLRLKNVISINTSGHKYGLVYPGIGWVLWKDESYLPEELIFKVSYLGGEMPTMQINFSRSASHIIGQYYNFLRYGFEGYRTIHQKTSDVAQYLAHAVEQTGYFDIFNDGSHLPIVRYKLKDDANVNWTLYDLADRLQMRGWQVPAYPLPKSLENIIIQRYVCRADLGFNMAEEFIQDFQASIQELNNAHILFHDTQQSGVHGFTH

SEQ ID NO: 6182 - protein, 462 aa, Listeria monocytogenes
MFKTNVEQNNVPVFGSFESGQDLPEKRMNKESVDPRIAYQLVKDQLIDEGSARQNLATFCQTYMEPEAEQIMAETMEKNAIDKSEYPQTAKLESSCVNMLADLWNVDESEHYMGTSTVGSSEACMLGGMAMKFRWRSAALKNGLDIHAKKPNLVISSGYQVCWEKFCVYWDIELREVPMSEEHLSINTDIIMDYVDEYTIGIVGILGITYTGKFDDIMTLNDLVEDYNNTHDNEVVIHVDGASGAMFTPFVEPGLEWDFRLPNVVSINTSGHKYGLVYPGVGWILWRDKEYLPEELVFDVSYLGGHMPTMAINFSRSASQIIGQYYNFLRFGYEGYRQIHMRTRDGALQLSQAVAETGLFEIYNDGANLPIVCYKLKDDANVAWTLYDLADRLQMKGWQVPAYPLPKEMGNTIIQRYVCRGDLGQNMVTAFKNDLSESIEELNNAHILYHDVNTSKTHGFTH

SEQ ID NO: 6183 - protein, 464 aa, Listeria innocua
MLYSKENKESYLEPVFGSSAEDRDIPKYTLAKEPLEPRIAYRLVKDELLDEGSARQNLATFCQTYMEDEATKLMSETLEKNAIDKSEYPRTAELENRCVNIIADLWHAPKDQKFMGTSTIGSSEACMLGGMAMKFAWRKRAEKLGLDIYAQKPNLVISSGYQVCWEKFCVYWDIDMRVVPMDKDHMQLNTDQVLDYVDEYTIGVVGILGITYTGRYDDIYALNEKLEEYNSKTDYKVYIHVDAASGGFFTPFVEPDIIWDFRLKNVISINTSGHKYGLVYPGIGWVLWKDESYLPEELIFKVSYLGGEMPTMQINFSRSASHIIGQYYNFLRYGFEGYRTIHQKTSDVAQYLAHAVEQTGYFDIYNDGSHLPIVCYKLKDDANVKWTLYDLADRLQMRGWQVPAYPLPKNLENIIIQRYVCRADLGFNMAEEFIQDFQASIQELNNAHILFHDTQQSGVHGFTH

SEQ ID NO: 6184 - protein, 467 aa, Listeria innocua
MLYSENDKRKHESYRIPLFGSEEESTSIPKYVLKKEPMEPRIAYQLVKDQLMDEGNARQNLATFCQTYMEKEAEILMAETLEKNAIDKSEYPQTAELENRCVNILADLWNAPKEMSYLGTSTVGSSEACMLGGLAMKFRWRNNAEKRGLDIQAKRPNLIISSGYQVCWEKFCVYWDVDMRVVPMDKEHLSLDVEKVFELVDEYTIGIVGILGITYTGKFDDIALLDEKVEAYNEANEHQLVIHIDGASGAMFTPFVNPELPWDFRLKNVVSINTSGHKYGLVYPGVGWILWKDKEYLPKELIFEVSYLGGSMPTMAINFSRSASQIIGQYYNFLRYGFEGYREIHEKTKKTALYLSKTVEKSGYFEIINDGSNLPIVCYKLKDDLDVEWTLYDLADQLLMKGWQVPAYPLPADLSDTIIQRFVCRADLGYNVAEEFAADFADALHNLEHARVLYHDKERNDSYGFTH

SEQ ID NO: 6185 - protein, 464 aa, Listeria monocytogenes EGD-e
MLYSKENKESYLEPVFGSSAEDRDIPKYTLGKEPLEPRIAYRLVKDELLDEGSARQNLATFCQTYMEDEATKLMSETLEKNAIDKSEYPRTAELENRCVNIIADLWHAPKDQKFMGTSTIGSSEACMLGGMAMKFAWRKRAEKLGLDIYAKKPNLVISSGYQVCWEKFCVYWDIDMRVVPMDKEHMQLNTDQVLDYVDEYTIGVVGILGITYTGRYDDIYALNEKLEEYNSKTDYKVYIHVDAASGGFFTPFVEPDIIWDFRLKNVISINTSGHKYGLVYPGIGWVLWKDESYLPEELIFKVSYLGGEMPTMQINFSRSASHIIGQYYNFLRYGFEGYRTIHQKTSDVAQYLAHAVEQTGYFDIFNDGSHLPIVCYKLKDDANVNWTLYDLADRLQMRGWQVPAYPLPKSLENIIIQRYVCRADLGFNMAEEFIQDFQASIQELNNAHILFHDTQQSGVHGFTH

SEQ ID NO: 6186 - protein, 467 aa, Listeria monocytogenes EGD-e
MLYSEDDKRKQESYRIPLFGSEEESTSIPKYVLKKEPMEPRIAYQLVKDQLMDEGNARQNLATFCQTYMEKEAEILMAETLEKNAIDKSEYPQTAELENRCVNILADLWNAPKDMSYLGTSTVGSSEACMLGGLAMKFRWRNNAEKRGLDIQAKRPNLIISSGYQVCWEKFCVYWDVDMRVVPMDKNHLSLDVDKVFDLVDEYTIGVVGILGITYTGKFDDIQLLDEKVEAYNETNEHQLVIHIDGASGAMFTPFVNPELPWDFRLKNVVSINTSGHKYGLVYPGVGWILWKDKEYLPKELIFEVSYLGGSMPTMAINFSRSASQIIGQYYNFLRYGFEGYREIHEKTKKTAIYLAKTVEKSGYFEIINDGANLPIVCYKMKEGLDVEWTLYDLADQLLMKGWQVPAYPLPADLSDTIIQRFVCRADLGYNVAEEFAADFADAIHNLEHARVLYHDKERNDSYGFTH

SEQ ID NO: 6187 - protein, 462 aa, Listeria monocytogenes EGD-e
MFKTNVEQNNVPVFGSFESGQDLPEKRMNKESVDPRIAYQLVKDQLIDEGSARQNLATFCQTYMEPEAEQIMAETMEKNAIDKSEYPQTAKLESSCVNMLADLWNVDESEHYMGTSTVGSSEACMLGGMAMKFRWRSAALKNGLDIHAKKPSLVISSGYQVCWEKFCVYWDIELREVPMSEEHLSINTDIIMDYVDEYTIGIVGILGITYTGKFDDIMTLNDLVEDYNNTHDNEVVIHVDGASGAMFTPFVEPGLEWDFRLPNVVSINTSGHKYGLVYPGVGWILWRDKEYLPEELVFDVSYLGGHMPTMAINFSRSASQIIGQYYNFLRFGYEGYRQIHMRTRDGALQLSQAVAETGLFEIYNDGANLPIVCYKLKDDANVAWTLYDLADRLQMKGWQVPAYPLPKEMGNTIIQRYVCRGDLGQNMVTAFKNDLSESIEELNNAHILYHDVNTSKTHGFTH

SEQ ID NO: 6188 - protein, 363 aa, Methanothermobacter thermautotrophicus str. Delta H
MTYTSGRILGSMCTSSHPLARRVYCDFLESNLGDPGLFRGTRELESGVIGMLGELLSEPDAAGHIITGGTEANLMAMRAARNMAGAEKPEIIVPKSAHFSFRKAADILGLRLREAELDQDYRVDVESVRKLISENTVAVVGVAGTTELGRIDPVEELSEICLDEDIHLHIDAAFGGFIIPFLRETGAELPEFDFKLQGVSSITVDPHKMGLAPIPSGCILFRDASYLDAMSIETPYLTEKQQSTIVGTRTGASAAATWAIMKHMGREGYRKLALRVMGVTRRLRDGLVELDYQLVVEPELNIVAFNHPAMGPHELADRLEELGWAVSVSSCPPAIRVVLMPHIMEEHIELLLRDLEGIRLREE

SEQ ID NO: 6189 - protein, 468 aa, Methanosarcina acetivorans C2A
MISRKMNLESLDESKKYRVGAYSARYVPKTKEKGIPKYEFPEEGMSPRAAYQLVHDEQSLDGNPFLNLASFVNTWMEPEADKLVMENISKNIIDIFEYPQTSRVIHHNMVNMLGRLFNGHHTDFVGTSTAGSSEAIMLGLLAHKWSWKKSGRGTDKPNIIFGNDAHVCWDKFARYFDVDTRKVPIDKDRRTITAEAVAERIDENTICVGCVLGTTFTGEIDPVKDINDLLLEYKEEKGWDIPIHIDAASGGFILPFTEPDFEWDFRLERVKSINVSGHKYGLTYPGLGWLIFRNKNALPEDLIFHVNYLGEMEDSYTLNFSGGSAMVAAQYYNFLRFGRAGYTGIMKKILAVSQDLAEKVDRLGRFEMLNKGERLPIIAFRQKEKTGYSLLQLSHKLREKGWIVPAYCLPENAADIEIMRIVVRENLTPDMASIIVEDLEKACQFLENGTEAGAEKPCPSGKDMAHIC

SEQ ID NO: 6190 - protein, 464 aa, Clostridium perfringens str. 13
MLFGKNELGSQFETPIFGTVESNESIPKYELAKKSIAPQVAYRLIKDDLLDEGNARQNLCTFCQTYMDDEAVKLMAETLEKNAIDKSEYPQTTDLENRCVNILADLWHAPKDESFMGTSTVGSSEACMLGGMAMKFRWRNRAKALGMDVTSRKPNLVISSGYQVCWEKFCVYWDIEMRLVPMDEEHMSINVDKVLDYVDDYTIGVVGILGITYTGKYDDIKALDKKLEEYNKTAKLTVPMHIDAASGGMFAPFIEPELEWDFRLKNVVSISTSGHKYGLVYPGIGWVLWRDKEYLPQELVFDVSYLGGKIPTMAINFSRSASQIIGQYYNFLRYGFEGYRQIHQRTKDVAMFLASELEKTGLFQIYNNGENLPIVCYKLRDDVNVDWTLYDLADRLLMKGWQVPAYPLPADLQDTIIQRIVCRADLSHNLAELYLRDLKAAIEDLNNARVLNQKSKTGVQGFTH

SEQ ID NO: 6191 - protein, 487 aa, Shigella flexneri 2a str. 301
MLPLRINPTFLLPSNKFKEFEMDQKLLTDFRSELLDSRFGAKAISTIAESKRFPLHEMRDDVAFQIINDELYLDGNARQNLATFCQTWDDENVHKLMDLSINKNWIDKEEYPQSAAIDLRCVNMVADLWHAPAPKNGQAVGTNTIGSSEACMLGGMAMKWRWRKRMEAAGKPTDKPNLVCGPVQICWHKFARYWDVELREIPMRPGQLFMDPKRMIEACDENTIGVVPTFGVTYTGNYEFPQPLHDALDKFQADTGIDIDMHIDAASGGFLAPFVAPDIVWDFRLPRVKSISASGHKFGLAPLGCGWVIWRDEEALPQELVFNVDYLGGQIGTFAINFSRPAGQVIAQYYEFLRLGREGYTKVQNASYQVAAYLADEIAKQGPYEFICTGRPDEGIPAVCFKLKDGEDPGYTLYDLSERLRLRGWQVPAFTLGGEATDIVVMRIMCRRGFEMDFAELLLEDYKASLKYLSDHPKLQGIAQQNSFKHT

SEQ ID NO: 6192 - protein, 489 aa, Shigella flexneri 2a str. 301
MHLLTLSINPTFLMRSNHFKEFKMDKKQVTDLRSELLDSRFGAKSISTIAESKRFPLHEMRDDVAFQIINDELYLDGNARQNLATFCQTWDDENVHKLMDLSINKNWIDKEEYPQSAAIDLRCVNMVADLWHAPAPKNGQAVGTNTIGSSEACMLGGMAMKWRWRKRMEAAGKPTDKPNLVCGPVQICWHKFARYWDVELREIPMRPGQLFMDPKRMIEACDENTIGVVPTFGVTYTGNYEFPQPLHDALDKFQADTGIDIDMHIDAASGGFLAPFVAPDIVWDFRLPRVKSISASGHKFGLAPLGCGWVIWRDEEALPQELVFNVDYLGGQIGTFAINFSRPAGQVIAQYYEFLRLGREGYTKVQNASYQVAAYLADEIAKLGPYEFICTGRPDEGIPAVCFKLKDGEDPGYTLYDLSERLRLRGWQVPAFTLGGEATDIVVMRIMCRRGFEMDFAELLLEDYKASLKYLSDHPKLQGIAQQNSFKHT

SEQ ID NO: 6193 - protein, 165 aa, Shigella flexneri 2a str. 301
MAFIMKNKSGNSCYREAVDIHSSLELSFILHKYHLRVDEKKSRNVFSAIRDELILDGDSRQNLATFCQTWLDDEIRELLNLAIDKNMIYKDEYPQMAEPEGRCVRMLSDSWSFPDSRHTLGCSTIGSSEAAMLGRLALKWQWCKKREVQGKSTEPDLRSCANMLA

SEQ ID NO: 6194 - protein, 466 aa, Shigella flexneri 2a str. 2457T
MDQKLLTDFRSELLDSRFGAKAISTIAESKRFPLHEMRDDVAFQIINDELYLDGNARQNLATFCQTWDDENVHKLMDLSINKNWIDKEEYPQSAAIDLRCVNMVADLWHAPAPKNGQAVGTNTIGSSEACMLGGMAMKWRWRKRMEAAGKPTDKPNLVCGPVQICWHKFARYWDVELREIPMRPGQLFMDPKRMIEACDENTIGVVPTFGVTYTGNYEFPQPLHDALDKFQADTGIDIDMHIDAASGGFLAPFVAPDIVWDFRLPRVKSISASGHKFGLAPLGCGWVIWRDEEALPQELVFNVDYLGGQIGTFAINFSRPAGQVIAQYYEFLRLGREGYTKVQNASYQVAAYLADEIAKQGPYEFICTGRPDEGIPAVCFKLKDGEDPGYTLYDLSERLRLRGWQVPAFTLGGEATDIVVMRIMCRRGFEMDFAELLLEDYKASLKYLSDHPKLQGIAQQNSFKHT

SEQ ID NO: 6195 - protein, 489 aa, Escherichia coli CFT073
MHLLTLSINPTFLMRSNHFKEFKMDKKQVTDLRSELLDSRFGAKSISTIAESKRFPLHEMRDDVAFQIINDELYLDGNARQNLATFCQTWDDDNVHKLMDLSINKNWIDKEEYPQSAAIDLRCVNMVADLWHAPAPKNGQAVGTNTIGSSEACMLGGMAMKWRWRKRMEAAGKPTNKPNLVCGPVQICWHKFARYWDVELREIPMRPGQLFMDPKRMIEACDENTIGVVPTFGVTYTGNYEFPQPLHDALDKFQADTGIDIDMHIDAASGGFLAPFVAPDIVWDFRLPRVKSISASGHKFGLAPLGCGWVIWRDEEALPQELVFNVDYLGGQIGTFAINFSRPAGQVIAQYYEFLRLGREGYTKVQNASYQVAAYLADEIAKLGPYEFICTGRPDEGIPAVCFKLKDGEDPGYTLYDLSERLRLRGWQVPAFTLGGEATDIVVMRIMCRRGFEMDFAELLLEDYKASLKYLSDHPKLQGIAQQNSFKHT

SEQ ID NO: 6196 - protein, 487 aa, Escherichia coli CFT073
MLPLRINPTFLLPSNKFKEFEMDQKLLTDFRSELLDSRFGAKAISTIAESKRFPLHEMRDDVAFQIINDELYLDGNARQNLATFCQTWDDENVHKLMDLSINKNWIDKEEYPQSAAIDLRCVNMVADLWHAPAPKNGQAVGTNTIGSSEACMLGGMAMKWRWRKRMEAAGKPTDKPNLVCGPVQICWHKFARYWDVELREIPMRPGQLFMDPKRMIEACDENTIGVVPTFGVTYTGNYEFPQPLHDALDKFQADTGIDIDMHIDAASGGFLAPFVAPDIVWDFRLPRVKSISASGHKFGLAPLGCGWVIWRDEEALPQELVFNVDYLGGQIGTFAINFSRPAGQVIAQYYEFLRLGREGYTKVQNASYQVAAYLADEIAKLGPYEFICTGRPDEGIPAVCFKLKDGEDPGYTLYDLSERLRLRGWQVPAFTLGGEATDIVVMRIMCRRGFEMDFAELLLEDYKASLKYLSDHPKLQGIAQQNSFKHT

SEQ ID NO: 6197 - protein, 396 aa, Methanocaldococcus jannaschii
MRNMQEKGVSEKEILEELKKYRSLDLKYEDGNIFGSMCSNVLPITRKIVDIFLETNLGDPGLFKGTKLLEEKAVALLGSLLNNKDAYGHIVSGGTEANLMALRCIKNIWREKRRKGLSKNEHPKIIVPITAHFSFEKGREMMDLEYIYAPIKEDYTIDEKFVKDAVEDYDVDGIIGIAGTTELGTIDNIEELSKIAKENNIYIHVDAAFGGLVIPFLDDKYKKKGVNYKFDFSLGVDSITIDPHKMGHCPIPSGGILFKDIGYKRYLDVDAPYLTETRQATILGTRVGFGGACTYAVLRYLGREGQRKIVNECMENTLYLYKKLKENNFKPVIEPILNIVAIEDEDYKEVCKKLRDRGIYVSVCNCVKALRIVVMPHIKREHIDNFIEILNSIKRD

SEQ ID NO: 6198 - protein, 469 aa, Lactobacillus plantarum WCFS1
MAMLYGKHNHEAEEYLEPVFGAPSEQHDLPKYRLPKHSLSPREADRLVRDELLDEGNSRLNLATFCQTYMEPEAVELMKDTLAKNAIDKSEYPRTAEIENRCVNIIANLWHAPDDEHFTGTSTIGSSEACMLGGLAMKFAWRKRAQAAGLDLNAHRPNLVISAGYQVCWEKFCVYWDVDMHVVPMDEQHMALDVNHVLDYVDEYTIGIVGIMGITYTGQYDDLAALDKVVTHYNHQHPKLPVYIHVDAASGGFYTPFIEPQLIWDFRLANVVSINASGHKYGLVYPGVGWVVWRDRQFLPPELVFKVSYLGGELPTMAINFSHSAAQLIGQYYNFIRFGMDGYREIQTKTHDVARYLAAALDKVGEFKMINNGHQLPLICYQLASREDREWTLYDLSDRLLMNGWQVPTYPLPANLEQQVIQRIVVRADFGMNMAHDFMDDLTKAVHDLNHAHIVYHHDAAPKKYGFTH

SEQ ID NO: 6199 - protein, 367 aa, Archaeoglobus fulgidus DSM 4304
MDIIEELRAYREKDIPYSRVLSSMCTVPHPVAVEAHRMFIETNLGDPGIFRGTVELEAKLMRLIGDILHCETPAGYICSGGTEANIQGIRAARNVQKKENPNIVIPKTAHFSFEKIGDILGVKIKRAGVDEEYKVDVGQVEDLMDENTVAIVGIAGTTELGQIDPIVELSKLAEERQVELHVDAAFGGLVIPFMDNPYPFDFQNRGVSSITIDPHKMGMATIPAGGIIFRNESYLRALEVETPYLTSKTQFTLTGTRPGTGVASAYAVLKSLGFEGMREVVKNCLKNTRILVEEMRDLGFEPVIEPVMNVVSFRTDEAERIKEELYRMRWVISTIREPKAIRFVVMPHVTEEVIKNFISDFRKVLRR

SEQ ID NO: 6200 - protein, 304 aa, Brucella melitensis 16M
MCWHKFARYWDVEIREIPMEPGRLFMGPEQMLEAVDENTIGVVPTFGVTYTGNYEFPEPLQDALDKLQKTKGLDIDIHVDAASGGFLAPFCAPDIPWDFRLPRVKSISASGHKYGLAPLGCGWVVWRDKEALPEELIFNVDYLGGQVGTFAINFSRPAGQVISQYYEFMRLGREGYTKVQQAAYRVAQYIAREIEPLGPYEFICAGEEKGGIPAVCFRIREGEDPGYSLYDLSERLRLTGWQVPAFALSGKASDITVMRVMCRRGFEMDLAALFIRDFKAGIEFFKSHPSPKITPSMGTGFHHT

SEQ ID NO: 6201 - protein, 167 aa, Brucella melitensis 16M
MKITLEVIMTGSNYPARDLIASVFGTEALQEIAASRGFREKEMQANAVYQIIHDELFLDGNARQNLATFCQTWDDDYVHKLMDLSINKNWIDKEEYPQSAAIDLRCVNMVADLWNAPKFADNATGTNTIGSSEACMLGGMAMKWRWRKKMQEMGKPTDKPNFVCGPV

SEQ ID NO: 6202 - protein, 481 aa, Bacteroides thetaiotaomicron VPI-5482
MEDLNFRKGDAKTDVFGSDRMLQPSPVERIPDGPTTPEVAYQMVKDETFAQTQPRLNLATFVTTYMDDYATKLMNEAININYIDETEYPRIAVMNGKCINIVANLWNSPEKDTWKTGALAIGSSEACMLGGVAAWLRWRKKRQAQGKPFDKPNFVISTGFQVVWEKFAQLWQIEMREVPLTLEKTTLDPEEALKMCDENTICVVPIQGVTWTGLNDDVEALDKALDAYNAKTGYDIPIHVDAASGGFILPFLYPDTKWDFRLKWVLSISVSGHKFGLVYPGLGWVCWKGKEYLPEEMSFSVNYLGANITQVGLNFSRPAAQILGQYYQFIRLGFQGYKEVQYNSLQIAKYIHGEIAKMAPFVNYSENVVNPLFIWYLKPEYAKSAKWTLYDLQDKLSQHGWMVPAYTLPSKLEDYVVMRVVVRQGFSRDMADMLLGDIKNAIAELEKLDFPTPTRMAQEKNLPVEAKMFNHGGRRHKTVKK

SEQ ID NO: 6203 - protein, 470 aa, Streptomyces avermitilis MA-4680
MPLHKGPVKSDERPMSFNPFFGEANPVSGMTEAPPKHRLADGPLPPSTAYQLVHDELMLDGNARLNLATFVTTWMEPQAGVLMAECQDKNMIDKDEYPRTAELEKRCVAMLADLWNAPDAGAAVGCSTTGSSEACMLAGLALKRRWARRNADRYPARDVRPNLVMGINVQVCWEKFCNFWEVEMRQVPLEGERYHLDPGAAAELCDENTIGVVGILGSTFDGSYEPIAELCAALDALQERTGLDIPVHVDGASGAMIAPFLDEDLVWDFRLPRVASINTSGHKYGLVSPGVGWALWRDSEALPEELVFRVNYLGGNMPTFALNFSRPGAQVVAQYYTFLRLGREGFRAVQQTTRNVARSLAERVAALGDFHLLTRGDELPVFAFTTAPEVASYDVFDVSRRMREHGWLVPAYTFPPNREDLSVLRVVCRNGFSTDLAELFVEDLSRLLPDLRRQARPQTHDKDAATGFHH

SEQ ID NO: 6204 - protein, 454 aa, Streptomyces avermitilis MA-4680
MTKRDVAALFGNRFLTEPAPSQTFPEEGMTATDTMRLLDEDLVMEGDPQRNLATFVTTWMEPEAQRIIAENLHRNFIDHAEYPISAEIEQRCVRMLADLFHAPGKTTGCRTQGSSEAIMLGALSLKWKWRERRQAANLPADRPNLVFGGDVHVVWEKFCRYFDVEPRIVPLAEDKYTIGPEDVEPHIDENTIGVVAVVGTTFTGHKDDVVGIDKLLRDVRKERDLDIPIHVDGASGGFVWPFLYPDSKWDFRLEQVRSINVSGHKYGLVYPGIGWLVFREESDLAKDLVFYENYLGKTDATFTLNFSTGASMVLAQYYNFVRLGRQGYTYVMETMQKNAHALADNLRSSGRFEVIGSDLEQLPLVAFRLAGEHAYDESDIAWQLSAERGWMVPAYTLPPNAERVKILRALVKETLSREQIERLTQDIADACATLDHKGGTTEVERAQIKRGTGY

SEQ ID NO: 6205 - protein, 502 aa, Arabidopsis thaliana
MVLSHAVSESDVSVHSTFASRYVRTSLPRFKMPENSIPKEAAYQIINDELMLDGNPRLNLASFVTTWMEPECDKLIMSSINKNYVDMDEYPVTTELQNRCVNMIAHLFNAPLEEAETAVGVGTVGSSEAIMLAGLAFKRKWQNKRKAEGKPVDKPNIVTGANVQVCWEKFARYFEVELKEVKLSEGYYVMDPQQAVDMVDENTICVAAILGSTLNGEFEDVKLLNDLLVEKNKETGWDTPIHVDAASGGFIAPFLYPELEWDFRLPLVKSINVSGHKYGLVYAGIGWVIWRNKEDLPEELIFHINYLGADQPTFTLNFSKGSSQVIAQYYQLIRLGHEGYRNVMENCRENMIVLREGLEKTERFNIVSKDEGVPLVAFSLKDSSCHTEFEISDMLRRYGWIVPAYTMPPNAQHITVLRVVIREDFSRTLAERLVIDIEKVMRELDELPSRVIHKISLGQEKSESNSDNLMVTVKKSDIDKQRDIITGWKKFVADRKKTSGIC

SEQ ID NO: 6206 - protein, 502 aa, Arabidopsis thaliana
MVLSHAVSESDVSVHSTFASRYVRTSLPRFKMPENSIPKEAAYQIINDELMLDGNPRLNLASFVTTWMEPECDKLIMSSINKNYVDMDEYPVTTELQNRCVNMIAHLFNAPLEEAETAVGVGTVGSSEAIMLAGLAFKRKWQNKRKAEGKPVDKPNIVTGANVQVCWEKFARYFEVELKEVKLSEGYYVMDPQQAVDMVDENTICVADILGSTLNGEFEDVKLLNDLLVEKNKETGWDTPIHVDAASGGFIAPFLYPELEWDFRLPLVKSINVSGHKYGLVYAGIGWVIWRNKEDLPEELIFHINYLGADQPTFTLNFSKGSSQVIAQYYQLIRLGHEGYRNVMENCRENMIVLREGLEKTERFNIVSKDEGVPLVAFSLKDSSCHTEFEISDMLRRYGWIVPAYTMPPNAQHITVLRVVIREDFSRTLAERLVIDIEKVMRELDELPSRVIHKISLGQEKSESNSDNLMVTVKKSDIDKQRDIITGWKKFVADRKKTSGIC

SEQ ID NO: 6207 - protein, 494 aa, Arabidopsis thaliana
MVLATNSDSDEHLHSTFASRYVRAVVPRFKMPDHCMPKDAAYQVINDELMLDGNPRLNLASFVTTWMEPECDKLIMDSVNKNYVDMDEYPVTTELQNRCVNMIANLFHAPVGEDEAAIGCGTVGSSEAIMLAGLAFKRKWQHRRKAQGLPIDKPNIVTGANVQVCWEKFARYFEVELKEVKLSEDYYVMDPAKAVEMVDENTICVAAILGSTLTGEFEDVKQLNDLLAEKNAETGWETPIHVDAASGGFIAPFLYPDLEWDFRLPWVKSINVSGHKYGLVYAGVGWVVWRTKDDLPEELVFHINYLGADQPTFTLNFSKGSSQIIAQYYQFIRLGFEGYKNIMENCMDNARRLREGIEMTGKFNIVSKDIGVPLVAFSLKDSSKHTVFEIAESLRKFGWIIPAYTMPADAQHIAVLRVVIREDFSRGLADRLITHIIQVLKEIEGLPSRIAHLAAAAAVSGDDEEVKVKTAKMSLEDITKYWKRLVEHKRNIVC

SEQ ID NO: 6208 - protein, 494 aa, Arabidopsis thaliana
MVLATNSDSDEHLHSTFASRYVRAVVPRFKMPDHCMPKDAAYQVINDELMLDGNPRLNLASFVTTWMEPECDKLIMDSVNKNYVDMDEYPVTTELQNRCVNMIANFFHAPVGEDEAAIGCGTVGSSEAIMLAGLAFKRKWQHRRKAQGLPIDKPNIVTGANVQVCWEKFARYFEVELKEVKLSEDYYVMDPAKAVEMVDENTICVAAILGSTLTGEFEDVKQLNDLLAEKNAETGWETPIHVDAASGGFIAPFLYPDLEWDFRLPWVKSINVSGHKYGLVYAGVGWVVWRTKDDLPEELVFHINYLGADQPTFTLNFSKGSSQIIAQYYQFIRLGFEGYKNIMENCMDNARRLREGIEMTGKFNIVSKDIGVPLVAFSLKDSSKHTVFEIAESLRKFGWIIPAYTMPADAQHIAVLRVVIREDFSRGLADRLITHIIQVLKEIEGLPSRIAHLAAAAAVSGDDEEVKVKTAKMSLEDITKYWKRLVEHKRNIVC

SEQ ID NO: 6209 - protein, 494 aa, Arabidopsis thaliana
MVLTKTATNDESVCTMFGSRYVRTTLPKYEIGENSIPKDAAYQIIKDELMLDGNPRLNLASFVTTWMEPECDKLIMDSINKNYVDMDEYPVTTELQNRCVNIIARLFNAPLEESETAVGVGTVGSSEAIMLAGLAFKRKWQNKRKAEGKPYDKPNIVTGANVQVCWEKFARYFEVELKEVNLSEGYYVMDPDKAAEMVDENTICVAAILGSTLNGEFEDVKRLNDLLVKKNEETGWNTPIHVDAASGGFIAPFIYPELEWDFRLPLVKSINVSGHKYGLVYAGIGWVVWRAAEDLPEELIFHINYLGADQPTFTLNFSKGSSQIIAQYYQLIRLGFEGYKNVMENCIENMVVLKEGIEKTERFNIVSKDQGVPVVAFSLKDHSFHNEFEISEMLRRFGWIVPAYTMPADAQHITVLRVVIREDFSRTLAERLVADISKVLHELDTLPSKISKKMGIEGIAENVKEKKMEKEILMEVIVGWRKFVKERKKMNGVC

SEQ ID NO: 6210 - protein, 494 aa, Arabidopsis thaliana
MVLTKTATNDESVCTMFGSRYVRTTLPKYEIGENSIPKDAAYQIIKDELMLDGNPRLNLASFVTTWMEPECDKLIMDSINKNYVDMDEYPVTTELQNRCVNIIARLFNAPLEESETAVGVGTVGSSEAIMLAGLAFKRKWQNKRKAEGKPYDKPNIVTGANVQVCWEKFARYFEVELKEVNLSEGYYVMDPDKAAEMVDENTICVAAILGSTLNGEFEDVKRLNDLLVKKNEETGWNTPIHVDAASGGFIAPFIYPELEWDFRLPLVKSINVSGHKYGLVYAGIGWVVWRAAEDLPEELIFHINYLGADQPTFTLNFSKGSSQIIAQYYQLIRLGFEGYKNVMENCIENMVVLKEGIEKTERFNIVSKDQGVPVVAFSLKDHSFHNEFEISEMLRRFGWIVPAYTMPADVQHITVLRVVIREDFSRTLAERLVADISKVLHELDTLPSKISKKMGIEGIAENVKEKKMEKEILMEVIVGWRKFVKERKKMNGVC

SEQ ID NO: 6211 - protein, 500 aa, Arabidopsis thaliana
MVLSKTASKSDDSIHSTFASRYVRNSISRFEIPKNSIPKEAAYQIINDELKFDGNPRLNLASFVTTWMEPECDKLMMESINKNNVEMDQYPVTTDLQNRCVNMIARLFNAPLGDGEAAIGVGTVGSSEAVMLAGLAFKRQWQNKRKALGLPYDRPNIVTGANIQVCLEKFARYFEVELKEVKLREGYYVMDPDKAVEMVDENTICVVAILGSTLTGEFEDVKLLNDLLVEKNKKTGWDTPIHVDAASGGFIAPFLYPDLEWDFRLPLVKSINVSGHKYGLVYAGIGWVVWRTKTDLPDELIFHINYLGADQPTFTLNFSKGSSQVIAQYYQLIRLGFEGYRNVMDNCRENMMVLRQGLEKTGRFNIVSKENGVPLVAFSLKDSSRHNEFEVAEMLRRFGWIVPAYTMPADAQHVTVLRVVIREDFSRTLAERLVADFEKVLHELDTLPARVHAKMASGKVNGVKKTPEETQREVTAYWKKFVDTKTDKNGVPLVASITNQ

SEQ ID NO: 6212 - protein, 493 aa, Arabidopsis thaliana
MVLSKTVSESDVSIHSTFASRYVRNSLPRFEMPENSIPKEAAYQIINDELMLDGNPRLNLASFVTTWMEPECDKLMMESINKNYVDMDEYPVTTELQNRCVNMIARLFNAPLGDGEAAVGVGTVGSSEAIMLAGLAFKRQWQNKRKAQGLPYDKPNIVTGANVQVCWEKFARYFEVELKEVNLREDYYVMDPVKAVEMVDENTICVAAILGSTLTGEFEDVKLLNDLLVEKNKQTGWDTPIHVDAASGGFIAPFLYPELEWDFRLPLVKSINVSGHKYGLVYAGIGWVVWRTKTDLPDELIFHINYLGADQPTFTLNFSKGSSQVIAQYYQLIRLGFEGYRNVMDNCRENMMVLRQGLEKTGRFKIVSKENGVPLVAFSLKDSSRHNEFEVAHTLRRFGWIVPAYTMPADAQHVTVLRVVIREDFSRTLAERLVADFEKVLHELDTLPARVHAKMANGKVNGVKKTPEETQREVTAYWKKLLETKKTNKNTIC

SEQ ID NO: 6213 - protein, 419 aa, Arabidopsis thaliana
MDSINKNYVDMDEYPVTTELQNRCVNIIARLFNAPLEESETAVGVGTVGSSEAIMLAGLAFKRKWQNKRKAEGKPYDKPNIVTGANVQVCWEKFARYFEVELKEVNLSEGYYVMDPDKAAEMVDENTICVAAILGSTLNGEFEDVKRLNDLLVKKNEETGWNTPIHVDAASGGFIAPFIYPELEWDFRLPLVKSINVSGHKYGLVYAGIGWVVWRAAEDLPEELIFHINYLGADQPTFTLNFSKGSSQIIAQYYQLIRLGFEGYKNVMENCIENMVVLKEGIEKTERFNIVSKDQGVPVVAFSLKDHSFHNEFEISEMLRRFGWIVPAYTMPADAQHITVLRVVIREDFSRTLAERLVADISKVLHELDTLPSKISKKMGIEGIAKNVKEKKMEKEILMEVIVGWRKFVKERKKMNGVC

SEQ ID NO: 6214 - protein, 194 aa, Arabidopsis thaliana
MTGTGQKLNIRRRVGEVNSLSFCCLSPTPTSLDNRCVNMIANLFHAPVGQDEAVISCGIVASSESAGLAFKMKWQHRRKAQGLPIDKPNIVTGVNVQVCWEKFARYFEVELKEVKLSEDYYVMDPAKAVEMVDENSICVAAILGSTFTGEFEYVKLLNDLLAEKNAKTAWETPIHVDAASGGFIASMGEEYQCQ

SEQ ID NO: 6215 - protein, 177 aa, Arabidopsis thaliana
MTGTGQKLNIRRRVGENRCVNMIANLFHAPVGQDEAVISCGIVASSESAGLAFKMKWQHRRKAQGLPIDKPNIVTGVNVQVCWEKFARYFEVELKEVKLSEDYYVMDPAKAVEMVDENSICVAAILGSTFTGEFEYVKLLNDLLAEKNAKTAWETPIHVDAASGGFIASMGEEYQCQ

SEQ ID NO: 6216 - protein, 499 aa, Glycine max
  unsure (1)..(499): unsure at all Xaa locations
MVFPKPSSESDLFLCSNFASHYARDSLPRFSMPENSMPKEAAYQNIHDELQLDAIPKLNLASFVTTSMEEECNKLIMESINKNYVDMDEYPATTDLHNRCVNMIARMFHAEIGENENATGAGTVGSSEAIMLAGLAFKKKWQNKRKAEGKPYDKPNLVTGSNVQVCWEKFARYFEVELREVEVREGYYVMDPAKAVELVDENTICVAAILGSTYNGEFEDVKLLNDLLLEKNKQTGWDTPIHVDAASGGFIAPFLYPELEWDFRLPLVKSINVSGHKYGLVYAGIGWVIWRTKDDLPEDLVFHINYLGADQPTFTLNFSKGSSQIIAQYYQLIRLGHEGYRSIMENCRDNAMVLKESLEKSGHFNILSKDNGVPVVAFSLKDRSQYDEYKISEMLRRHGWIVPAYPMPPAAQHINVLRVVIRAEFSRTLAERLVFDIYNVLHELEKLHPPKVTNFIKEENKALVETGVKKTALDAHRXNHCSRIKQASENYGCLTHYVN

SEQ ID NO: 6217 - protein, 504 aa, Glycine max
  unsure (1)..(504): unsure at all Xaa locations
MVLSKTASETDVSVHSTFASRYVRTSLPRFKMAEESIPKEAAYQIIHDELMLDGNPRLNLASFVTTWMEPECDKLIMAAINKNYVDMDEYPVTTELQNRCVNMIAHLFNAPLEESETAVGVGTVGSSEAIMLAGLAFKRRWQNRRKLEGKPYDNPNIVTGANVQVCWEKFARYFEVELKEVKLRDGYYVMDPEKAVEMVDENTICVAAILGSTLNGEFEDVKLLNDLLVEKNKETGWDTPIHVDAASGGFIAPFLYPELEWDFRLPLVKSINVSGHKYGLVYAGIGWVIWRSKEDLPEELIFHINYLGADQPTFTLNFSKGSSQVIAQYYQLIRLGYEGYKMVMENCNDNMAVLKEGLEKTGRFEIISKDIGVPLVAFTLKDHTHFNEFQISDMLRRYGWIVPAYTMPPDAQHVTVLRVVIREDFSRTLAERLVIDVTKVVHELDLLPARVIXHQHHNGYRRSRXEENDEKVLFAKKSEIETQREITKAWKKFVMDRKKMNGVC

SEQ ID NO: 6218 - protein, 504 aa, Glycine max
  unsure (1)..(504): unsure at all Xaa locations
MVLSKTASETDVSVHSTFASRYVRTSLPRFKMAEESIPKEAAYQIIHDELMLDGNPRLNLASFVTTWMEPECDKLIMAAINKNYVDMDEYPVTTELQNRCVNMIAHLFNAPLEESETAVGVGTVGSSEAIMLAGLAFKRRWQNRRKLEGKPYDNPNIVTGANVQVCWEKFARYFEVELKEVKLRDGYYVMDPEKAVEMVDENTICVAAILGSTLNGEFEDVKLLNDLLVEKNKETGWDTPIHVDAASGGFIAPFLYPELEWDFRLPLVKSINVSGHKYGLVYAGIGWVIWRSKEDLPEELIFHINYLGADQPTFTLNFSXGSSQVIAQYYQLIRLGYEGYKMVMENCNDNMAVLKEGLEKTGRFEIISKDIGVPLVAFTLKDHTHFNEFQISDMLRRYGWIVPAYTMPPDAQHVTVLRVVIREDFSRTLAERLVIDVTKVVHELDLLPARVIXHQHHNGYRRSRXEENDEKVLFAKKSEIETQREITKAWKKFVMDRKKMNGVC

SEQ ID NO: 6219 - protein, 500 aa, Glycine max
  unsure (1)..(500): unsure at all Xaa locations
MVLTSTATHPDEQDQSLNYTFASRYVREPIPKFKMPEKSIPKDAAYQIINDELMLDGAPRLNLASFVTTWMEPECDKLIMASLNKNYVDMDEYPVTTELQNRCVNIIANLFHAPISDDETAVGVGTVGSSEAIMLAGLAFKRKWQTKRKAEGKPYDKPNIVTGANVQVCWEKFARYFEVELKEVKLKEGYYVMDPAKAVEMVDENTICVAAILGSTMTGEFEDVKLLDELLTKKNNETGWDTPIHVDAASGGFIAPFLYPDLEWDFRLPLVKSINVSGHKYGLVYPGVGWVVWRSKDDLPDELVFHINYLGSDQPTFTLNFSKGSSQIIAQYYQLIRLGFEGYKNIMENCWENARVLKEGIERTGRFNIISKDIGVPLVAFSLKDSSQHTVFEIADHLRKFGWIVPAYTMPPDAQHIAVLRVVIREDFSRGLAERLAADIEKVAKLLDTLPSPLTTKAVHITAITSETGEKIKXXAAIETQKEIAFYWKRLVDGKRLGAC

SEQ ID NO: 6220 - protein, 505 aa, Glycine max
  unsure (1)..(505): unsure at all Xaa locations
MVLSKTTSESDVSVHSTFASRYVRTSLPRFKMPEESIPKEAAYQIINDELMLDGNPRLNLXASFVTTWMEPECDKLIMAAINKNYVDMDEYPVTTELQNRCVNMIAHLFNAPLEETEAAVGVGTVGSSEAIMLAGLAFKRKWQNRRKQEGKPFDKPNIVTGANVQVCWEKFARYFEVELKEVKLRDDYYVMDPEKAVELVDENTICVAAILGSTLNGEFEDVKRLNDLLIEKNKITGWDTPIHVDAASGGXFIAPFLYPELEWDFRLPLVKSINVSGHKYGLVYAGIGWVIWRSKEDLPEELIFHINYLGADQPTFTLNFSKGSSQVIAQYYQLIRLGFEGYRNVMENCRDNMLVLKEGLEKTGRFSIVSKDNGVPLVAFTLKDHTHFDEFQISDFLRRFGWIVPAYTMPPDAQHVTVLRVVIREDFSRTLAERLVADVEKVLHELDSLPARVISSTSVTVTAEENGKVVVAKKSAMETQREITAIWKKFVLERKKNNDKMNGVC

SEQ ID NO: 6221 - protein, 506 aa, Glycine max
  unsure (1)..(506): unsure at all Xaa locations
MVLSKTASESDVSVHSTFASRYVRTSLPRFKMAEESIPKEAAYQIINDELMLDGNPRLNLASFVTTWMEPECDKLIMAAINKNYVDMDEYPVTTELQNRCVNMIAHLFNAPLEETEAAVGVGTVGSSEAIMLAGLAFKRKWQNRRKQEGKPYDKPNIVTGANVQVCWEKFARYFEVELKXEVKLRDDYYVMDPEKAVELVDENTICVAAILGXSTLNGEFEDVKRLNDLLIEKNKITGWDTPIHVDAASGGFIAPFIYPELEWDFRLQLVKSINVSGHKYGLVYAGIGWVIWRSKQDLPEELIFHINYLGADQPTFTLNFSKGSSQVIAQYYQLIRLGFEGYRNVMENCRDNSLVLKEGLEKTGRFSIVSKDNGVPLVAFTLKDHTHFDEFQISDFLRRFGWIVPAYTMPPDAQHVTVLRVVIREDFSRTXLAERLVSDVEKVLHELDSLPARVISSTTVTLSAEENGKVVVAKKNPMETQREITAIWKKFVLERKKNNDKMNGVC

SEQ ID NO: 6222 - protein, 343 aa, Glycine max
  unsure (1)..(343): unsure at all Xaa locations
VEESIKQIYELVSIETRLISLFVMKMLXSRFKMPEKSIPKDAAFQIINDELMLDGAPRLNLASFVTTWMEPECDKLIMASLNKNYVDMDEYPVTTELQNRCVNIIANLFHAPISEEETAVGVGTVGSSEAIMLAGLAFKRKWQTKRKAEGKPYDKPNIVTGANVQVCWEKFARYFEVELKEVKLKEGYYVMDPAKAVEMVDENTICVAAILGSTMTGEFEDVKLLNELLTEKNKETGWDTPIHVDAASGGFIAPFLYPDLEWDFRLPLVKSINVSGHKYGLVYPGVGWVVWRSKDDLPDELVFHINYLGSDQPTFTLNFSKGSSQIIAQYYQLIRLGFEGYKX

SEQ ID NO: 6223 - protein, 253 aa, Glycine max
  unsure (1)..(253): unsure at all Xaa locations
MVLTSTATHPDEQDQSLNYTFASRYVREPIPKFKMPEKSIPKDAAYQIINDELMLDGAPRLNLASFVTTWMEPECDKLIMASLNKNYVDMDEYPVTTELQNRCVNIIANLFHAPISDDETAVGVGTVGSSEAIMLAGLAFKRKWQTKRKAEGKPYDKPNIVTGANVQVCWEKFARYFEVELKEVKLKEGYYVMDPAKAVEMVDENTICVAAILGSTMTGEFEDVKLLDELLTKKNXETGWDTPIHVDAARGGV

SEQ ID NO: 6224 - protein, 202 aa, Glycine max
  unsure (1)..(202): unsure at all Xaa locations
MVLTSTATHPDEKDQSLNSTFASRYVRDPIPKFKMPEKSIPKDAAFQIINDELMLDGAPRLNLASFVTTWMEPECDKLIMASLNKNYVDMDEYPVTTELQNRCVNIIANLFHAPISEEETAVGVGTVGSSEAIMLAGLAFKRKWQTKRKAEGKPYDKPNIVTGANVQVCWEKXFARYFEVELKEVKLKEGYYVMDPAKAVKX

SEQ ID NO: 6225 - protein, 147 aa, Glycine max
  unsure (1)..(147): unsure at all Xaa locations
WVCNFLTSRSITSVHSALEAQFLPPPILLTCSTKILFLLFTSSSEAIMLAGLAFKRKWQNRRKQEGKPFDKPNIVTGANVQVCWEKFARYFEVELKEVKLRDDYYVMDPEKAVELVDENTICVAAILGSTLNGEFEDVKRLNDLLIX

SEQ ID NO: 6226 - protein, 163 aa, Glycine max
  unsure (1)..(163): unsure at all Xaa locations
MVRSKTAYQTDVSDHSTFAYRYDRTYLARDKIAEESILEEAAYQIIHDQLMLDGNSRLNLAAFETTWMEPERDKVIVADIDKNDDHMDEDPVSTELQNRSXNMIPHLFNAPLXEXHTAIGGGTVGSSEAIMWDGLAFHRXWRNRKTLDGKPYDIPNIVTGANX

SEQ ID NO: 6227 - protein, 81 aa, Glycine max
  unsure (1)..(81): unsure at all Xaa locations
VKQLNDLLTEKNKDTGWDVPIHVDAAIGGFIAPFLYPELEWDFRLPLVKSINVSGHKYGLVYPGVGWVIWRSKDDLPEELX

SEQ ID NO: 6228 - protein, 125 aa, Glycine max
VVAFTLTNKFHKEFPHVKQKAVSNLLRAKQYIIPNYPLPPGEEKTEILRVVVRKSLSLTMIDRLVTDICGVTEMLMHKTDAVDLSAFQPGASPSIEKQHANKGLRKEHKHKAQRPSSDGVYRTVC

SEQ ID NO: 6229 - protein, 501 aa, Oryza sativa (japonica cultivar-group)
MVVSVAATDSDTAQPVQYSTFFASRYVRDPLPRFRMPEQSIPREAAYQIINDELMLDGNPRLNLASFVTTWMEPECDKLIMDSVNKNYVDMDEYPVTTELQNRCVNMIAHLFNAPIKEDETAIGVGTVGSSEAIMLAGLAFKRKWQNKRKEQGKPCDKPNIVTGANVQVCWEKFARYFEVELKEVKLSEGYYVMDPVKAVEMVDENTICVAAILGSTLTGEFEDVKLLNNLLTEKNKETGWDVPIHVDAASGGFIAPFLYPELEWDFRLPLVKSINVSGHKYGLVYPGVGWVIWRSKEDLPEELIFHINYLGTDQPTFTLNFSKGSSQIIAQYYQLIRLGFEGYKNIMQNCMENTAILREGIEATGRFEILSKEAGVPLVAFSLKDSGRYTVFDISEHLRRFGWIVPAYTMPANAEHVAVLRVVIREDFSRSLAERLVSDIVKILHELDAHSAQVLKISSAIAKQQSGDDGVVTKKSVLETEREIFAYWRDQVKKKQTGIC

SEQ ID NO: 6230 - protein, 513 aa, Oryza sativa (japonica cultivar-group)
MVLSHGVSGSDESVHSTFASRYVRTSLPRHARSPLSRAPLAPIDSVIDWEFRMPEQSIPKEAAYQIINDELMLDGNPRLNLASFVTTWMEPECDKLIQASVNKNYVDMDEYPVTTELQNRCVNMIAHLFNAPLGDSETAVGVGTVGSSEAIMLAGLAFKRRWQNKMKAAGKPCDKPNIVTGANVQVCWEKFARYFEVELKEVKLSDGYYVMDPAKAVDMVDENTICVAAILGSTLNGEFEDVKLLNDLLTKKNAETGWDTPIHVDAASGGFIAPFLYPELEWDFRLPLVKSINVSGHKYGLVYAGIGWCIWRSKEDLPEELIFHINYLGADQPTFTLNFSKGSSQVIAQYYQLIRLGFEGYKNIMENCQENAMVLKQGLEKTGRFNIVSKDNGVPLVAFSLKDSARHNEFEISDFLRRFGWIVPAYTMPPDAQHVTVLRVVIREDFSRTLAERLVLDVEKVLHELDALPARVVANGGDAAAASASEREMEKQREVISLWKRAVLAKKKTNGVC

SEQ ID NO: 6231 - protein, 492 aa, Oryza sativa (japonica cultivar-group)
MVLSKAVSESDMSVHSTFASRYVRASLPRYRMPENSIPKEAAYQIINDELMLDGNPRLNLASFVTTWMEPECDKLIMAAINKNYVDMDEYPVTTELQNRCVNMIAHLFHAPLGEDETAVGVGTVGSSEAIMLAGLAFKRRWQNKRKAEGKPFDKPNIITGANVQVCWEKFARYFEVELKEVKLRDGYYVMDPEKAVDMVNENTICVAAILGSTLNGEFEDVKLLNDLLDKKNKETGWETPIHVDAASGGFIAPFLYPELEWDFRLPWVKSINVSGHKYGLVYAGIGWCIWRNKEDLPEELIFHINYLGTDQPTFTLNFSKGSSQVIAQYYQLIRHGFEGYRNIMENCHENAMVLKEGLVKTGRFDIVSKDEGVPLVAFSLKDRSRHDEFEISDMLRRFGWIVPAYTMPPDAQHVTVLRVVIREEFSRTLAERLVLDIEKVMYQLDALPSRLMPPVPPAPLLVVAKKSELETQRSVTEAWKKFVLAKRTNGVC

SEQ ID NO: 6232 - protein, 484 aa, Oryza sativa (japonica cultivar-group)
MALSTAQTGESMHSSTFASRYVRTALPRFRMPEKSIPKDAAYQIINDELMLDGNPRLNLASFVTTWMEPECDKLMMAAINKNYVDMDEYPVTTELQNRCVNMIAHLFNAPIGDDETAVGVGTVGSSEAIMLAGLAFKRKWQNRMKAEGKPHDKPNIVTGANVQVCWEKFARYFEVELKEVKLTQGYYVMNPEKAVEMVDENTICVAAILGSTLNGEFEDVKMLNDLLTAKNAETGWNTPIHVDAASGGFIAPFIYPELEWDFRLPLVKSINVSGHKYGLVYAGVGWVIWRNKEDLPDELIFHINYLGADQPTFTLNFSKGSNQIIAQYYQLIRLGFEGYKDIMQNCRDNATVLREGIEKTGHFDVVSKDSGVPLVAFSLKDSSRYTVFEVAESLRRFGWIVPAYTMPADAEHVAVMRVVIREDFSRGLAERLITDLTKTVADMDAHAVKKAAAEPAKKTVREIEKEVTTYWRSFVARKKSSLVC

SEQ ID NO: 6233 - protein, 500 aa, Oryza sativa (japonica cultivar-group)
MVLTHVEAVEEGSEAAAAVFASRYVQDPVPRYELGERSISKDAAYQIVHDELLLDSSPRLNLASFVTTWMEPECDRLILEAINKNYADMDEYPVTTELQNRCVNIIARLFNAPVGDGEKAVGVGTVGSSEAIMLAGLAFKRRWQNRRKAAGKPHDKPNIVTGANVQVCWEKFARYFEVELKEVKLTEGCYVMDPVKAVDMVDENTICVAAILGSTLTGEFEDVRRLNDLLAAKNKRTGWDTPIHVDAASGGFIAPFIYPELEWDFRLPLVKSINVSGHKYGLVYAGVGWVIWRNKEDLPEELIFHINYLGADQPTFTLNFSKGSSQIIAQYYQFLRLGFEGYKSVMKNCMESARTLREGLEKTGRFTIISKEEGVPLVAFTFKDGAGAQAFRLSSGLRRYGWIVPAYTMPAALEHMTVLRVVVREDFGRPLAERFLSHVRMALDEMDLAARAPVPRVQLTIELGPARTAGEEASIRVVKSEAVPVRKSVPLVAGKTKGVC

SEQ ID NO: 6234 - protein, 500 aa, Oryza sativa (japonica cultivar-group)
MVLTHVEAVEEGSEAAAAVFASRYVQDPVPRYELGERSISKDAAYQIVHDELLLDSSPRLNLASFVTTWMEPECDRLILEAINKNYADMDEYPVTTELQNRCVNIIARLFNAPVGDGEKAVGVGTVGSSEAIMLAGLAFKRRWQNRRKAAGKPHDKPNIVTGANVQVCWEKFARYFEVELKEVKLTEGCYVMDPVKAVDMVDENTICVAAILGSTLTGEFEDVRRLNDLLAAKNKRTGWDTPIHVDAASGGFIAPFIYPELEWDFRLPLVKSINVSGHKYGLVYAGVGWVIWRNKEDLPEELIFHINYLGADQPTFTLNFSKGSSQIIAQYYQFLRLGFEGYKSVMKNCMESARTLREGLEKTGRFTIISKEEGVPLVAFTFKDGAGAQAFRLSSGLRRYGWIVPAYTMPAALEHMTVVRVVVREDFGRPLAERFLSHVRMALDEMDLAARAPVPRVQLTIELGPARTAGEEASIRVVKSEAVPVRKSVPLVAGKTKGVC

SEQ ID NO: 6235 - protein, 502 aa, Lycopersicon esculentum
MVLTTTSIRDSEESLHCTFASRYVQEPLPKFKMPKKSMPKEAAYQIVNDELMLDGNPRLNLASFVSTWMEPECDKLIMSSINKNYVDMDEYPVTTELQNRCVNMLAHLFHAPVGDDETAVGVGTVGSSEAIMLAGLAFKRKWQSKRKAEGKPFDKPNIVTGANVQVCWEKFARYFEVELKEVKLKEGYYVMDPAKAVEIVDENTICVAAILGSTLTGEFEDVKLLNELLTKKNKETGWETPIHVDAASGGFIAPFLWPDLEWDFRLPLVKSINVSGHKYGLVYAGVGWVIWRSKEDLPDELVFHINYLGSDQPTFTLNFSKGSYQIIAQYYQLIRLGFEGYKNVMKNCLSNAKVLTEGITKMGRFDIVSKDVGVPVVAFSLRDSSKYTVFEVSEHLRRFGWIVPAYTMPPDAEHIAVLRVVIREDFSHSLAERLVSDIEKILSELDTQPPRLPTKAVRVTAEEVRDDKGDGLHHFHMDTVETQKDIIKHWRKIAGKKTSGVC

SEQ ID NO: 6236 - protein, 496 aa, Nicotiana tabacum
MVLSKTASESDVSIHSTFASRYVRTSLPRFKMPENSIPKEAAYQIINDELMLDGNPRLNLASFVTTWMEPECNKLMMDSINKNYVDMDEYPVTTELQNRCVNMIAHLFNAPLGDGETAVGVGTVGSSEAIMLAGLAFKRKWQNKMKAQGKPCDKPNIVTGANVQVCWEKFARYFEVELKEVKLSDGYYVMDPEKAVEMVDENTICVAAILGSTLNGEFEDVKRLNDLLIEKNKETGWDTPIHVDAASGGFIAPFLYPELEWDFRLPLVKSINVSGHKYGLVYAGIGWAIWRNKEDLPDELIFHINYLGADQPTFTLNFSKGSSQVIAQYYQLIRLGFEGYKNVMENCQENARVLREGLEKSGRFNIISKEIGVPLVAFSLKDNSQHNEFEISETLRRFGWIIPAYTMPPNAQHVTVLRVVIREDFSRTLAERLVIDIEKVLHELDTLPARVNAKLAVAEANGSGVHKKTDREVQLEITTAWKKFVADKKKKTNGVC

SEQ ID NO: 6237 - protein, 496 aa, Nicotiana tabacum
MVLSKTASESDVSIHSTFASRYVRTSLPRFKMPENSIPKEAAYQIINDELMLDGNPRLNLASFVTTWMEPECNKLMMDSINKNYVDMGEYPVTTELQNRCVNMIAHLFNAPLGDGETAVGVGTVGSSEAIMLAGLAFKRKWQNKMKAQGKPCDKPNIVTGANVQVCWEKFARYFEVELKEVKLSDGYYVMDPEKAVEMVDENTICVAAILGSTLNGEFEDVKRLNDLLIEKNKETGWDTPIHVDAASGGFIAPFLYPELEWDFRLPLVKSINVSGHKYGLVYAGIGWAIWRNKEDLPDELIFHINYLGADQPTFTLNFSKGSSQVIAQYYQLIRLGFEGYKNVMENCQENARVLREGLEKSGRFNIISKEIGVPLVAFSLKDNSQHNEFEISETLRRFGWIIPAYTMPPNAQHVTVLRVVIREDFSRTLAERLVIDIEKVLHELDTLPARVNAKLAVAEANGSGVHKKTDREVQLEITAAWKKFVADKKKKTNGVC

SEQ ID NO: 6238 - protein, 496 aa, Nicotiana tabacum
MVLSKTASESDVSIHSTFASRYVRTSLPRFKMPENSIPKEAAYQIINDELMLDGNPRLNLASFVTTWMEPECNKLMMDSINKNYVDMDEYPVTTELQNRCVNMIAHLFNAPLGDGETAVGVGTVGSSEAIMLAGLAFKRKWQNKMKAQGKPCDKPNIVTGANVQVCWEKFARYFEVELKEVKLSDGYYVMDPEKAVEMVDENTICVAAILGSTLNGEFEDVKRLNDLLIEKNKETGWDTPIHVDAASGEFIAPFLYPELEWDFRLPLVKSINVSGHKYGLVYAGIGWAIWRNKEDLPDELIFHINYLGADQPTFTLNFSKGSSQVIAQYYQLIRLGFEGYKNVMENCQENARVLREGLEKSGRFNIISKEIGVPLVAFSLKDNSQHNEFEISETLRRFGWIIPAYTMPPNAQHVTVLRVVIREDFSRTLAERLVIDIEKVLHELDTLPARVNAKLAVAEANGSGVHKKTDREVQLEITTAWKKFVADKKKKTNGVC

SEQ ID NO: 6239 - protein, 496 aa, Nicotiana tabacum
MVLSKTASESDVSIHSTFASRYVRTSLPRFKMPENSIPKEAAYQIINDELMLDGNPRLNLASFVTTWMEPECNTLMMDSINKNYVDMDEYPVTTELQNRCVNMIAHLFNAPLGDGETAVGVGTVGSSEAIMLAGLAFKRKWQNKMKAQGKPFDKPNIVTGANVQVCWEKFARYFEVELKEVKLSDGYYVMDPEKAVEMVDENTICVAAILGSTLNGEFEDVKRLNDLLIEKNKETGWDTPIHVDAASGGFIAPFLYPELEWDFRLPLVKSINVSGHKYGLVYAGIGWAIWRNKEDLPDELIFHINYLGADQPTFTLNFSKGSSQVIAQYYQLIRLGFEGYKNVMENCQENARVLREGIEKSGRFNIISKEIGVPLVAFSLKDNSQHNEFEISETLRRFGWIVPAYTMPPNAQHVTVLRVVIREDFSRTLAERLVIDIEKVLHELDTLPARVNAKLAVAEANGSGVHKKTDREVQLEITTAWKKFVADKKKKTNGVC

SEQ ID NO: 6240 - protein, 496 aa, Nicotiana tabacum
MVLSKTASESDVSVHSTFASRYVRTSLPRFKMPENSIPKEAAYQIINDELMLDGNPRLNLASFVTTWMEPECNTLMMDSINKNYVDMDEYPVTTELQNRCVNMIAHLFNAPLGDGETAVGVGTVGSSEAIMLAGLAFKRKWQNKMKAQGKPFDKPNIVTGANVQVCWEKFARYFEVELKEVKLSDGYYVMDPEKAVEMVDENTICVAAILGSTLNGEFEDVKRLNDLLIEKNKETGWDTPIHVDAASGGFIAPFLYPELEWDFRLPLEKSINVSGHKYGLVYAGIGWAIWRNKEDLPDELIFHINYLGADQPTFTLNFSKGSSQVIAQYYQLIRLGFEGYKNVMENCQENARVLREGIEKSGRFNIISKEIGVPLVAFSLKDNSQHNEFEISETLRRFGWIVLAYTMPPNAQHVTVLRVVIREDFSRTLAERLVIDIEKVFHGVDTLPARVNAKLAVAEANGSGVHKKTDREVQLEITTAWLKFVADKKKKTNGVC

SEQ ID NO: 6241 - protein, 491 aa, Nicotiana tabacum
MVLSKTSSESDVSVHSTFASRYVRTSLPRFEMAENSIPKEAAFQIINDELMLDGNPRLNLASFVTTWMEPECDKLMMDSINKNYVDMDEYPVTTELQNRCVNMIARLFNAPLEEKETAVGVGTVGSSEAIMLAGLAFKRNWQNKRKAEGKPYNKPNIVTGANVQVCWEKFANYFEVELKEVKLREGYYVMDPVQAVEMVDENTICVAAILGSTLNGEFEDVKLLNDLLIEKNKQTGWNTPIHVDAASGGFIAPFLYPELEWDFRLPLVKSINVSGHKYGLVYAGIGWVIWRTKQDLPEELIFHINYLGADQPTFTLNFSKGSSQVIAQYYQLIRLGYEGYRNVMENCRENAIVLREGLEKTGRFNIVSKDEGVPLVAFSLKDNSRHNEFEVSETLRRFGWIVPAYTMPADAQHVTVLRVVIREDFSRTLAERLVLDIVKVLHELDTLPARLSAKLEEVKLVKNGKKFELEVQREVTNYWKKFVLARKAPVC

SEQ ID NO: 6242 - protein, 500 aa, Petunia x hybrida
MVLSKTVSQSDVSIHSTFASRYVRTSLPRFKMPDNSIPKEAAYQIINDELMLDGNPRLNLASFVTTWMEPECDKLMMDSINKNYVDMDEYPVTTELQNRCVNMIAHLFNAPLEDGETAVGVGTVGSSEAIMLAGLAFKRKWQNKMKAQGKPCDKPNIVTGANVQVCWEKFARYFEVELKEVKLSEGYYVMDPEKAVEMVDENTICVAAILGSTLNGEFEDVKRLNDLLVEKNKETGWDTPIHVDAASGGFIAPFIYPELEWDFRLPLVKSINVSGHKYGLVYAGIGWVVWRNKDDLPDELIFHINYLGADQPTFTLNFSKGSSQVIAQYYQLIRLGYEGYKNVMENCQENASVLREGLEKTGRFNIISKEIGVPLVAFSLKDNRQHNEFEISETLRRFGWIVPAYTMPPNAQHITVLRVVIREDFSRTLAERLVRDIEKVLHELDTLPARVNAKLAVAEEQAAANGSEVHKKTDSEVQLEMITAWKKFVEEKKKKTNRVC

SEQ ID NO: 6243 - protein, 494 aa, Oryza sativa
  unsure (1)..(494): unsure at all Xaa locations
MVLSHGVSGSDESVHSTFASRYVRTSLPRFRMPEQSIPKEAAYQIINDELMLDGNPRLNLASFVTTWMEPECDKLIQASVNKNYVDMDEYPVTTELQNRCVNMIAHLFNAPLGDSETAVGVGTVGSSEAIMLAGLAFKRRWQNKMKAAGKPCDKPNIVTGANVQVCWEKFARYFEVELKEVKLSDGYYVMDPAKAVDMVDENTICVAAILGSTLNGEFEDVKLLNDLLTKKNAETGWDTPIHVDAASGGFIAPFLYPELEWDFRLPLVKSINVSGHKYGLVYAGIGWCIWRSKEDLPEELIFHINYLGADQPTFTLNFSKGSSQVIAQYYQLIRLGFEGYKNIMENCQENAMVLKQGLEKTGRFNIVSKDNGVPLVAFSLKDSARHNEFEISDFLRRFGWIVPAYTMPPDAQHVTVLRVVIREDFSRTLAERLVLDVEKVLHELDALPARVVANGGDAAAASASXXREMEKQREVISLWKRAVLXXKKKTNGVC

SEQ ID NO: 6244 - protein, 494 aa, Oryza sativa; identical to SEQ ID NO: 6243
  unsure (1)..(494): unsure at all Xaa locations

SEQ ID NO: 6245 - protein, 501 aa, Oryza sativa; identical to SEQ ID NO: 6229

SEQ ID NO: 6246 - protein, 500 aa, Oryza sativa; identical to SEQ ID NO: 6234

SEQ ID NO: 6247 - protein, 488 aa, Oryza sativa
  unsure (1)..(488): unsure at all Xaa locations
EHMALSTAQTGESMHSSTFASRYVRTALPRFRMPEKSIPKDAAYQIINDELMLDGNPRLNLASFVTTWMEPECDKLMMAAINKNYVDMDXEYPVTTELQNRCVNMIAHLFNAPIGDDETAVGVGTVGSSEAIMLAGLAFKRKWQNRMKAEGKPHDKPNIVTGANVQVCWEKFARYFEVELKEVKLTQGYYVMNPEKAVEMVDENTICVAAILGSTLNGEFEDVKMLNDLLTAKNAETGWNTPIHVDAASGGFIAPFIYPELEWDFRLPLVKSINVSGHKYGLVYAGVGWVIWRNKEDLPDELIFHINYLGADQPTFTLNFSKGSNXQIIAQYYQLIRLGFEGYKDIMQNCRDNATVLREGIEKTGHFDVVSKDSGVPLVAFSLKDSSRYTVFEVAESLRRFGWIVPAYTMPADAEHVAVMRVVIREDFSRGLAERLITDLTKTVADMDAHAVKKAAAEPAKKTVREIEKEVTTYWRSFVARKKSSLVC

SEQ ID NO: 6248 - protein, 493 aa, Oryza sativa
  unsure (1)..(493): unsure at all Xaa locations
MVLSKAVSESDMSVHSTFASRYVRASLPRYRMPENSIPKEAAYQIINDELMLDGNPRLNLASFVTTWMEPECDKLIMAAINKNYVDMDEYPVTTELQNRCVNMIAHLFHAPLGEDETAVGVGTVGSSEAIMLAGLAFKRRWQNKRKAEGKPFDKPNIITGANVQVCWXKFARSFEVELKEVKLRDGYYVMDPEKAVDMVNENTICVAAILGSTLNGEFEDVKLLNDLLDKKNKETGWETPIHVDAASGGFIAPFLYPELEWDFRLPWVKSINVSGHKYGLVYAGIGWCIWRNKEDLPEELIFHINYLGTDQPTFTLNFSKGSRQVIAQYEQLIRHGFEGYRNIMENWHENAMVLKEGLVKTGRFDIVSKDEHEALVAFSLKDRSRHDEFEISDMLRRFGWIVPAYTMPPDAQHVTVLRVVIREEFSRTLAERLVLDIEKVMYQLDALPSRLMPPVPPAXXLLVVAKKSELETQRSVTEAWKKFVLAKRTNGVC

SEQ ID NO: 6249 - protein, 478 aa, Oryza sativa
  unsure (1)..(478): unsure at all Xaa locations
MVLSKAVSESDMSVHSTFASRYVRASLPRYRMPENSIPKEAAYQIINDELMLDGNPRLNLASFVTTWMEPECDKLIMAAINKNYVDMDEYPVTTELQNRCVNMIAHLFHAPLGEDETAVGVGTVGSSEAIMLAGLAFKRRWQNKRKAEGKPFDKPNIITGANVQEVKLRDGYYVMDPEKAVDMVNENTICVAAILGSTLNGEFEDVKLLNDLLDKKNKETGWETPIHVDAASGGFIAPFLYPELEWDFRLPWVKSINVSGHKYGLVYAGIGWCIWRNKEDLPEELIFHINYLGTDQPTFTLNFSKGSSQVIAQYYQLIRHGFEGYRNIMENCHENAMVLKEGLVKTGRFDIVSKDEGVPLVAFSLKDRSRHDEFEISDMLRRFGWIVPAYTMPPDAQHVTVLRVVIREEFSRTLAERLVLDIEKVMYQLDALPSRLMPPVPPAXXLLVVAKKSELETQRSVTEAWKKFVLAKRTNGVC

SEQ ID NO: 6250 - protein, 378 aa, Oryza sativa
  unsure (1)..(378): unsure at all Xaa locations
MIAHLFNAPLGDSETAVGVGTVGSSEAIMLAGLAFKRRWQNKMKAAGKPCDKPNIVTGANVQVCWEKFARYFEVELKEVKLSDGYYVMDPAKAVDMVDENTICVAAILGSTLNGEFEDVKLLNDLLTKKNAETGWDTPIHVDAASGGFIAPFLYPELEWDFRLPLVKSINVSGHKYGLVYAGIGWCIWRSKEDLPEELIFHINYLGADQPTFTLNFSKGSSQGYKNIMENCQENAMVLKQGLEKTGRFNIVSKDNGVPLVAFSLKDSARHNEFEISDFLRRFGWIVPAYTMPPDAQHVTVLRVVIREDFSRTLAERLVLDVEKVLHELDALPARVVANGGDAAAASASXXREMEKQREVISLWKRAVLXXKKKTNGVC

SEQ ID NO: 6251 - protein, 282 aa, Oryza sativa
GEFEDVKLLNNLLTEKNKETGWDVPIHVDAASGGFIAPFLYPELEWDFRLPLVKSINVSGHKYGLVYPGVGWVIWRSKEDLPEELIFHINYLGTDQPTFTLNFSKGSSQIIAQYYQLIRLGFEGYKNIMQNCMETPAILREGIEATGRFEILSKEAGVPLVAFSLKASGRYTVFDISEHLRRFGWIVPAYTMPANAEHVAILRVVIREDFSRSLAERLVSDIVKILHELDAHSAQVLKISSAIAKQQSGDDGAVTKKSVLETEREIFAYWRDQVKKKQTGIC

SEQ ID NO: 6252 - protein, 137 aa, Oryza sativa
MVLSHASSGRDDAVRCTFATRYACETLPRFRMPEQSIPREAAYQIINDELMLDGNPRLNLASFVTTWMEPECDKLIMDSVNKNYVDMDEYPVTTELQNRCVNMIAHLFNAPIKEDETAIGAGTVGSSEAIMLAGRPS

SEQ ID NO: 6253 - protein, 169 aa, Oryza sativa
  unsure (1)..(169): unsure at all Xaa locations
TKSSPTHPVELNEVKLIDGYYIMDPAKAXVDMVXDENTICIVAIPRSTLNGEYEDVKLLNDLLTKKNAETGWDTPIHVNAGSGWFIAPMLYPELKWDFRLTXLANSMIISGHKYGLVYAGIGWCIWTSKEDLSEELMFHMNYLGADQPTFTLNLWKGCSHVIAHDYQLX

SEQ ID NO: 6254 - protein, 116 aa, Oryza sativa
  unsure (1)..(116): unsure at all Xaa locations
RTLGRTRGRTRGGRTFNRRRQNKMNAACTPCDKPNIVGGANVQVCWEKFARYFEVELXEVKLSDGYYVMDPAKAADMVDENTICVAAILGSTLNGEFEDVKLLNDLLSKKNAETGX

SEQ ID NO: 6255 - protein, 491 aa, Triticum aestivum
APAAMVISHASSSAGEAVYSTFSSRYVREELPRYRMPEGSIPKEAAYQIISDELMLDGNPRLNLASFVTTWMEPECGKLMMDSVNKNYVDMDEYPVTTELQNRCVNMIAHLFNAPIGEDETAIGVSTVGSSEAIMLAGLAFKRKWANKMKEQGKPCDKPNIVTGANVQVCWEKFARYFEVELKEVKLTEGYYVMDPKKAVEMVDENTICVAAILGSTLTGEYEDVKLLNDLLVAKNKETGWDVPIHVDAASGGFIAPFLQPELEWDFRLPLVKSINVSGHKYGLVYPGVGWVIWRSKDDLPDELIFHINYLGTDQPTFTLNFSKGASQIIAQYYQLIRLGFEGYKHIMENCKLNAAVLKEGIDATGRFDVLSKADGVPLVAIRLKDSTNFSVFDISENLRRFGWIVPAYTMPADAEHVAVLRIVIREDFNRSLAQRLLADINKIVRELDAHAVHAIKLSNAAAAEGASKSTVDAVTEAFKGLAGNKKAGVC

SEQ ID NO: 6256 - protein, 492 aa, Triticum aestivum
  unsure (1)..(492): unsure at all Xaa locations
MVLSXASSDTDVSVHSTFASRYVRSSLPRYRMPENSIPKEAAYQIINDELMLDGNPRLNLAASGTTWMEPECDKLIMDSINKNYVDMDEYPVTTELQNRCVNMIAHLFNAPLGETETAVGVGTVGSSEAIMLAGLAFKRRWQNRRKAAGKPCDKPNIVTGANVQVCWEKFARYFEVELKEVKLSEGCYVMDPEKAVEMVDENTICVAAILGSTLNGEFEDVKMLNDLLVAKNEETGWDTPIHVDAASGGFIAPFLYPELEWDFRLPLVKSINVSGHKYGLVYAGIGWCIWRSKEDLPDELIFHINYLGADQPTFTLNFSKGSSQVIAQYYQLIRLGFEGYRNIMDNCQENAMVLKEGLERTGRFNIVSKDQGVPLVAFSLKDSSRHDEFEISEFLRRFGWIVPAYTMPPDAQHVTVLRVVIREDFSRTFAERLVIDIEKVLHELDALPSRSSGPALQHPSDTVSEKDLARQREVVSVWKRAVAARKKTQGVC

SEQ ID NO: 6257 - protein, 328 aa, Triticum aestivum
  unsure (1)..(328): unsure at all Xaa locations
MVVXVAATGSDTAEPLHSTTFASRYVRDQLPRYRMXXXSIXKEAAYQIISDELMLDGNPRLNLASFVTTWMEPECGKLMMDSVNKNYVDMDEYPVTTELQNRCVNMIAHLFNAPIGEDETAIGVSTVGSSEAIMLAGLAFKRKWANKMKEQGKPCDKPNIVTGANVQVCWEKFARYFEVELKEVKLTEGYYVMDPKKAVEMVDENTICVAAILGSTLTGEYEDVKLLNDLLVAKNKENRVELPIHVDAASGGFIAPFLQPELEWDFRLPLVKSINVSGHKYGFXVYPGVGWVIWRSKDDLPDXELIFHINYLGTDQPTFTLNFSKGLX

SEQ ID NO: 6258 - protein, 288 aa, Triticum aestivum
  unsure (1)..(288): unsure at all Xaa locations
XPAGYRYMEDEAEKLMAESFSKNFIDYEEYPQSADIQNRCVNMIGDLFHAPXXGSSVGTSTVGSSEAIMLGVLAMKRRWKNRRIAEGKSTEHPNIVMSSAVQVCWEKATRYFEIDEKLVYCTPDRFVMDPEQAVDLCDENTIGMCAILGTTYTGEYEDIKAINDLLVERNLDVPIHVDAASGGFVAPFVVPDLEWDFRCEKVVSINVSGHKYGLVYPGGGXVIWRSPEFXPQELVFNINYLGXDQSSFTLTFXKGASQVIGQYYQLIRLGKHGYRAIMSNLTRTXDYL

SEQ ID NO: 6259 - protein, 206 aa, Triticum aestivum
  unsure (1)..(206): unsure at all Xaa locations
MVLSHAASAGSSDESVHSTFASRYVRASLPRFRMPENSIPKEAAYQIINDELMLDGNPRLNLASFVTTWMEPECNKLMMDSVNKNYVDMDEYPVTTEFQNRCVNMIAHLFNAPIGEDETAVGVGTVGSSEAIMLAGLAFKRKWQNKMKAEGKPHDKPNIVTGANVQVCWEKFARYFEVELKEVKLREGYYVMDPAKAVELVDENTX

SEQ ID NO: 6260 - protein, 238 aa, Triticum aestivum
  unsure (1)..(238): unsure at all Xaa locations
MVISHASSSAGEAVYSTFSSRYVREELPRYRMPEGSIPKEAAYQIISDELMLDGNPRLNLASFATTWVEPEWGKHVMDSVNSNNRRMDYXTGAPSFGSSEAILLAGLAFKRKWANKMKEQGKPCDKPNIVTGANVQVCWEKFARYFEVELKEVKLTEGYYVMDPKKAIEMVDENTICVAAILGSTLTGEYEDVKLLNDLLVEKIKITGWNVPIHVDAXSGGFIAPFLQXELEWDFRLX

SEQ ID NO: 6261 - protein, 178 aa, Triticum aestivum
  unsure (1)..(178): unsure at all Xaa locations
MVFLSNAISNARIXXESHSKGELHHDAVETTIYGTRWASEDIPRFDLPEDEMPSNVAYRLIKDDLALDGNPALNLATFVTTYMEEEAEKLMAENLSKNFIDYEEYPQSVELCNRCVNMIARLYHAPMHSADEEALGCSTVGSSEAIILATLAMKRRWQNARKEKGLPTDKPNLIFGAX

SEQ ID NO: 6262 - protein, 147 aa, Triticum aestivum
  unsure (1)..(147): unsure at all Xaa locations
MALSRAQTNSGESLISSTFASRYVRTALPRFRIPEQSIPKDAAYQIINDELMLDGNPRLNLASFVTTWMEPECDKLIQNSVNKNYVDMDEYPVTTEFQNRCVNMIAHLFNAPIGEDETAVGVGTVGSSEAIMLAGLAFKRKWQNKMX

SEQ ID NO: 6263 - protein, 503 aa, Triticum aestivum
  unsure (1)..(503): unsure at all Xaa locations
SHTRAPHRLPTPSRTRVEPRRIGGDLAVTSREPAAAPGRPHATPPTRSVRVGRPRDRKPEDPPPNEAAYQSISDQPLLDGNPRRNQPASGTTWMDPECGKLMIDSVNQDYLDMHEYPVTTELQXSSEAIMLAGLAFKRKWANKMKEEGKPCDKPNIVTGANVQVCWEKFARYFEVELKEVKLTEGYYVMDHAKAVEMLDEDTIGVAGIMGSTLTVVCEDIKLXNDDVVLXNNKRGGMXQLHGDAASGPCQARLLQVERVWESGEAXGTSRHGVGGEEAVHAAPIGRGGWRRLHGLPXDRLLGWAFRRAVEKTASPTPGSDGACERLARFCQMNCPGLSAYXRPLLENYNLNAAELKEAIDAAGRFDELSKADGVPLVAVRLQDSTNFSVFDISENLRRFGWIVPAYTMPADAEHVAVLRIVIREDFNRSLAQRXPRRPQQDRARAGRARRPRHQAVQRRRRRGRLQEHRGRRHRGLQGPGREQEGRSLLMAVLCFNTSVYVVS

SEQ ID NO: 6264 - protein, 133 aa, Triticum aestivum
  unsure (1)..(133): unsure at all Xaa locations
MVISHSSSGPGESAYNTFSSRYARVELPRYRMPENSIPKETAYQMITDELMLDGNPRLDLASFVTTWMEPECDKLIMDSINKNYVDMDEYPVTTELQNRCVNMIAHLFNAPINEDEKAIGVSTVGSSEXIMLX

SEQ ID NO: 6265 - protein, 128 aa, Triticum aestivum
  unsure (1)..(128): unsure at all Xaa locations
MVLTHVQSDEXXAASAAVFASRYVQDPVPSYELGEKSISKDAAYQIIHDELLLDGSPRLNLASFVTTWMEPECDRLILEGMNKNYADMDEYPVTTELQNRCVNIIARLFNAPVGAGETAVGVGTVGSX

SEQ ID NO: 6266 - protein, 117 aa, Triticum aestivum
  unsure (1)..(117): unsure at all Xaa locations
MVLSHAASAGSSDDSVHSTFASRYVRASLPRFRMPENSIPKEAAYQIINDELMLDGNPRLNLASFVTTWMEPECNKLMMDSINKNYVDMDEYPVTTELQNRCVNMIAHLFNAPLGEX

SEQ ID NO: 6267 - protein, 493 aa, Zea mays
MVLSHGVGGSDESVHSTFASRYVRTSLPRYRMPEQSIPKEAAYQIINDELMLDGNPRLNLASFVTTWMEPECDKLIQASVNKNYVDMDEYPVTTELQNRCVNMIAHLFNAPLGDAETAVGVGTVGSSEAIMLAGLAFKRRWQNKMKAAGKPCDKPNIVTGANVQVCWEKFARYFEVELKEVKLSDGYYVMDPQKAVDMVDENTICVAAILGSTLNGEFEDVKLLNDLLTKKNAETGWDTPIHVDAASGGFIAPFLYPELEWDFRLPLVKSINVSGHKYGLVYAGIGWCIWRTKADLPEELIFHINYLGADQPTFTLNFSKGSSQVIAQYYQLIRLGFEGYKNIMENCQENATVLKQGLEKTGKFNIVSKDNGVPLVAFSLKGSSRHNEFEISDFLRRFGWIVPAYTMPPDAQPVTVLRVVIREDFSRTLAERLVLDIEKVLHELDALPARVPSGDLAALAAAESSEREMEKQRQVISLWKRAVLAKKKTNGVC

SEQ ID NO: 6268 - protein, 489 aa, Zea mays
MALSTTNTNAAESQLHCSTFASRYVRTALPRFKIPEQSIPKEAAYQIINDELMLDGNPRLNLASFVTTWMEPECDKLIQSSINKNYVDMDEYPVTTELQNRCVNMIAHLFNAPIGDDETAVGVGTVGSSEAIMLAGLAFKRKWQNKMKAAGKPYDKPNIVTGANVQVCWEKFARYFEVELKEVKLKEGYYVMDPEKAAEMVDENTICVAAILGSTLNGEFEDVKLLSDLLTAKNAETGWDTPIHVDAASGGFIAPFLYPELEWDFRLPLVKSINVSGHKYGLVYAGVGWVIWRSKEDLPDELIFHINYLGADQPTFTLNFSKGSSQIIAQYYQLIRLGFEGYKDVMQNCRDNAAVLREGINKMGYFDVVSKDSGVPLVAFSLKDSSKYTVFEVAESLRRFGWIVPAYTMPADAEHVAVMRVVIREDFSRGLAERLIADLGKTMADMDAHAGRKQAPEQPKKSVHDIEKEVTTFWRRLVANSKKKSSMVC

SEQ ID NO: 6269 - protein, 500 aa, Zea mays
  unsure (1)..(500): unsure at all Xaa locations
MVVSVAATGPGTDAEPVSSTFFASRYVRDPLPRYRMPERSIPREAAQQIISDELMLDGNPRLNLASFVTTWMEPECDKLIMDSINKNYVDMDEYPVTTELQNRCVNMIAHLFNAPIKEDETAIGVGTVGSSEAIMLAGLAFKRKWQNKRKEQGKPCDRPNIVTGANVQVCWEKFARYFEVELKEVKLSEGYYVMDPVKAVEMVDENTICVAAILGSTLTGEFEDVKQLNDLLTEKNKETGWDVPIHVDAASGGFIAPFLYPELEWDFRLPLVKSINVSGHKYGLVYPGVGWVIWRSKDDLPEELIFHINYLGTDQPTFTLNFSKGSCQIIAQYYQLIRLGFEGYRNIMENCQENAAILREGIAATGRFDVLSKDAGVPLVAFSLRDSSRFSVFDVSENLRRFGWIVPAYTMPADAEHVXAVLRVVVREDFSRSLAERLVSDVRKILRELDARATHAVRVATATAEQSGDGVVAKKSVLEIEREVAARWMNAVNKKKTGVC

SEQ ID NO: 6270 - protein, 494 aa, Zea mays
  unsure (1)..(494): unsure at all Xaa locations
MVLSHGVGGSDESVHSTFASRYVRTSLPRYRMPEQSIPKEAAYQIINDELMLDGNPRLNLASFVTTWMEPECDKLIQASVNKNYVDMDEYPVTTELQNRCVNMIAHLFNAPLGDAETAVGVGTVGSSEAIMLAGLAFKRRWQNKMKAAGKPCDKPNIVTGANVQVCWEKFARYFEVELKEVKLSDGYYVMDPQKAVDMVDENTICVAAILXGSTLNGEFEDVKLLNDLLTKKNAETGWDTPIHVDAASGGFIAPFLYPELEWDFRLPLVKSINVSGHKYGLVYAGIGWCIWRTKADLPEELIFHINYLGADQPTFTLNFSKGSSQVIAQYYQLIRLGFEGYKNIMENCQENATVLKQGLEKTGKFNIVSKDNGVPLVAFSLKDNSRHNEFEISDFLRRFGWIVPAYTMPPDAQHVTVLRVVIREDFSRTLAERLVLDIEKVLHELDALPARVPSGDLAALAAAESSEREMEKKRQVISLWKRAVLAKKKTNGVC

SEQ ID NO: 6271 - protein, 552 aa, Zea mays
WQLPFQPAARRPLVGQGTPRLPLLEYHYSISTSVPPPQTTTTTTENESQNSTAAAAMVLSHASSGRDDDAVASTFASRYVRERLPRYRMPERSIPREAAQQIISDELMLDGNPRLNLASFVTTWMEPECDKLIMDSINKNYVDMDEYPVTTELQNRCVNMIAHLFNAPIKEDETAIGVGTVGSSEAIMLAGLAFKRKWQNKRKEQGKPCDRPNIVTGANVQVCWEKFARYFEVELKEVKLSEGYYVMDPRQAVEMVDENTICVAAILGSTLTGEFEDVKQLNDLLTDKNKETGWDVPIHVDAASGGFIAPFLYPELEWDFRLPLVKSINVSGHKYGLVYPGVGWVIWRSKEDLPEELIFHINYLGTDQPTFTLNFSKGSSQIIAQYYQLIRLGFEGYRNIMENCQENAAILREGIAATGRFDVLSKDAGVPLVAFSLRDSSRFSVFDVSENLRRFGWIVPAYTMPADAEHVAVLRVVVREDFSRSLAERLVSDVRKILRELDARATHAVRVATATAEQSGDSVVAKKSVLEIEREVAARWRNAVNKKKTGVC

SEQ ID NO: 6272 - protein, 497 aa, Zea mays
MVLSHASSGRDDDDAVASTFASRYVRERLPRYRMPERSIPREAAQQIISDELMLDGNPRLNLASFVTTWMEPECDKLIMDSINKNYVDMDEYPVTTELQNRCVNMIAHLFNAPIKEDETAIGVGTVGSSEAIMLAGLAFKRKWQNKRKEQGKPCDRPNIVTGANVQVCWEKFARYFEVELKEVKLSEGYYVMDPVKAVEMVDENTICVAAILGSTLTGEFEDVKQLNDLLTEKNKETGWDVPIHVDAASGGFIAPFLYPELEWDFRLPLVKSINVSGHKYGLVYPGVGWVIWRSKDDLPEELIFHINYLGTDQPTFTLNFSKGSCQIIAQYYQLIRLGFEGYRNIMENCQENAAILREGIAATGRFDVLSKDAGVPLVAFSLRDSSRFSVFDVSENLRRFGWIVPAYTMPADAEHVAVLRVVVREDFSRSLAERLVSDVRKILRELDARATHAVRVATATAEQSGDGVVAKKSVLEIEREVAARWMNAVNKKKTGVC

SEQ ID NO: 6273 - protein, 499 aa, Zea mays
MVVSVAATGPGTDAEPVSSTFFASRYVRDPLPRYRMPERSIPREAAQQIISDELMLDGNPRLNLASFVTTWMEPECDKLIMDSINKNYVDMDEYPVTTELQNRCVNMIAHLFNAPIKEDETAIGVGTVGSSEAIMLAGLAFKRKWQNKRKEQGKPCDRPNIVTGANVQVCWEKFARYFEVELKEVKLSEGYYVMDPVKAVEMVDENTICVAAILGSTLTGEFEDVKQLNDLLTEKNKETGWDVPIHVDAASGGFIAPFLYPELEWDFRLPLVKSINVSGHKYGLVYPGVGWVIWRSKDDLPEELIFHINYLGTDQPTFTLNFSKGSCQIIAQYYQLIRLGFEGYRNIMENCQENAAILREGIAATGRFDVLSKDAGVPLVAFSLRDSSRFSVFDVSENLRRFGWIVPAYTMPADAEHVAVLRVVVREDFSRSLAERLVSDVRKILRELDARATHAVRVATATAEQSGDSVVAKKSVLEIEREVAARWRNAVNKKKTGVC

SEQ ID NO: 6274 - protein, 499 aa, Zea mays
MVVSVAATGPGTDAEPVSSTFFASRYVRDPLPRYRMPERSIPREAAQQIISDELMLDGNPRLNLASFVTTWMEPECDKLIMDSINKNYVDMDEYPVTTELQNRCVNMIAHLFNAPIKEDETAIGVGTVGSSEAIMLAGLAFKRKWQNKRKEQGKPCDRPNIVTGANVQVCWEKFARYFEVELKEVKLSEGYYVMDPVKAVEMVDENTICVAAILGSTLTGEFEDVKQLNDLLTEKNKETGWDVPIHVDAASGGFIAPFLYPELEWDFRLPLVKSINVSGHKYGLVYPGVGWVIWRSKDDLPEELIFHINYLGTDQPTFTLNFSKGSCQIIAQYYQLIRLGFEGYRNIMENCQENAAILREGIAATGRFDVLSKDAGVPLVAFSLRDSSRFSVFDVSENLRRFGWIVPAYTMPADAEHVAVLRVVVREDFSRSLAERLVSDVRKILRELDARATHAVRVSTATAEQSGDGVVAKKSVLEIEREVAARWMNAVNKKKTGVC

SEQ ID NO: 6275 - protein, 552 aa, Zea mays
WQLPFQPAARRPLVGQGTPRLPLLEYHYSISTSVPPPQTTTTTTENESQNSTAAAAMVLSHASSGRDDDAVASTFASRYVRERLPRYRMPERSIPREAAQQIISDELMLDGNPRLNLASFVTTWMEPECDKLIMDSINKNYVDMDEYPVTTELQNRCVNMIAHLFNAPIKEDETAIGVGTVGSSEAIMLAGLAFKRKWQNKRKEQGKPCDRPNIVTGANVQVCWEKFARYFEVELKEVKLSEGYYVMDPVKAVEMVDENTICVAAILGSTLTGEFEDVKQLNDLLTDKNKETGWDVPIHVDAASGGFIAPFLYPELEWDFRLPLVKSINVSGHKYGLVYPGVGWVIWRSKEDLPEELIFHINYLGTDQPTFTLNFSKGSSQIIAQYYQLIRLGFEGYRNIMQNCQDNAAILREGIAATGRFGVLSKDAGVPLVAFSLRDSSRFSVFDVSENLRRFGWIVPAYTMPADAEHVAVLRVVVREDFSRSLAERLVSDVRKILRELDARATHAVRVATATAEQSGDGVVAKKSVLEIEREVAARWMNAVNKKKTGVC

SEQ ID NO: 6276 - protein, 499 aa, Zea mays
MVVSVAATGPGTDAEPVSSTFFASRYVRDPLPRYRMPERSIPREAAQQIISDELMLDGNPRLNLASFVTTWMEPECDKLIMDSINKNYVDMDEYPVTTELQNRCVNMIAHLFNAPIKEDDTAIGVGTVGSSEAIMLAGLAFKRKWQNKRKEQGKPCDRPNIVTGANVQVCWEKFARYFEVELKEVKLSEGYYVMDPVKAVEMVDENTICVAAILGSTLTGEFEDVKQLNDLLTEKNKETGWDVPIHVDAASGGFIAPFLYPELEWDFRLPLVKSINVSGHKYGLVYPGVGWVIWRSKDDLPEELIFHINYLGTDQPTFTLNFSKGSCQIIAQYYQLIRLGFEGYRNIMENCQENAAILREGIAATGRFDVLSKDAGVPLVAFSLRDSSRFSVFDVSENLRRFGWIVPAYTMPADAEHVAVLRVVVREDFSRSLAERLVSDVRKILRELDARATHAVRVATATAEQSGDGVVAKKSVLEIEREVAARWMNAVNKKKTGVC

SEQ ID NO: 6277 - protein, 491 aa, Zea mays
  unsure (1)..(491): unsure at all Xaa locations
MVLSKAVSESDMSVHSTFASRYVRSSLPRYRMPENSIPKEAAYQIINDELMLDGNPRLNLASFVTTWMEPECDKLIMAAINKNYVDMDEYPVTTELQNRCVNMIAHLFNAPLGESETAVGVGTVGSSEAIMLAGLAFKRRWQNKRRAEGKPFDKPNIVTGANVQVCWEKFARYFEVELREVKLRDGYYVMDPEKAVEMVDENTICVAAILGSTLNGEFEDVKLLNDLLQAKNRETRWETPIHVDAASGGFIAPFLYPDLEWDFRLPLVKSINVSGHKYGLVYAGIGWCIWRSKEDLPEELIFHINYLGADQPTFTLNFSKGSSQVIAQYYQLIRHGFEGYRNIMENCHENAMVLKEGLEKTGRFDIVSKDEGVPLVAFSLKDRSRHDEFEISDMLRRFGWIVPAYTMPPDAQHVTVLRVVIREEFSRTLAERLVLDIEKVMYQLDALPSRLXXPPPPAAPLLRKKTELETQRSVTEAWKKFVLAKKTNGVC

SEQ ID NO: 6278 - protein, 494 aa, Zea mays
  unsure (1)..(494): unsure at all Xaa locations
MVLSHAASAGSSDESVHSTFASRYVRASLPRFRMPENSIPKEAAYQIINDELMLDGNPRLNLASFVTTWMEPECNKLMMDSINKNYVDMDEYPVTTELQNRCVNMIAHLFNAPLGETETAVGVGTVGSSEAIMLAGLAFKRRWQNKMKAAGKPCDKPNIVTGANVQVCWEKFARYFEVELKEVKLSEGYYVMDPEKAVEMVDEXNTICVAAILGSTLTGEFEDVRRLNDLLAANNRRTGWDTPIHVDAASGGFIAPFLYPDLEWDFRLPLVKSINVSGHKYGLVYAGVGWVVWRSKEDLPDELIFHINYLGADQPTFTLNFSKGSSQIIAQYYQLIRLGFEGYKDVMQNCRDNAAVLREGINKMGYFDVVSKDSGVPLVAFSLKDSSKYTVFEVAESLRRFGWIVPAYTMPADAEHVAVMRVVIREDFSRGLAERLIADLGKTMADMDXARRQEAGAGAAQEVGARHREGENSKKRIIKDKVXAMTFLLVPLVX

SEQ ID NO: 6279 - protein, 520 aa, Zea mays
MVLSHASSGRDDDDAVASTFASRYVRERLPRYRMPERSIPREAAQQIISDELMLDGNPRLNLASFVTTWMEPECDKLIMDSINKNYVDMDEYPVTTELQNRCVNMIAHLFNAPIKEDETAIGVGTVGSSEAIMLAGLAFKRKWQNKRKEQGKPCDRPNIVTGANVQVCWEKFARYFEVELKEVKLSEGYYVMDPVKAVEMVDENTICVAAILGSTLTGEFEDVKQLNDLLTEKNKETGWDVPIHVDAASGGFIAPFLYPELEWDFRLPLVKSINVSGHKYGLVYPGVGWVIWRSKDDLPEELIFHINYLGTDQPTFTLNFSKGIFGSFLSGSSVVSLGAAGYRNIMENCQENAAILREGIAATGRFDVLSKDAGVPLVAFSLRDSSRFSVFDVSENLRRFGWIVPAYTMPADAEHVAVLRVVVREDFSRSLAERLVSDVRKILRELDARATHAVRVATATAEQSGDGVVAKKSVLEIEREVAARWMNAVNKKKTGLMYLDENIIITSVGIIVTTDTKKEK

SEQ ID NO: 6280 - protein, 504 aa, Zea mays
  unsure (1)..(504): unsure at all Xaa locations
MVLTHVHDLDEASAASAVVFASRYVQDPLPRYELGEKSVSKDAAYQIIHDELLLDSSPRLNLASFVTTWMEPECDKLILEGINKNYADMDEYPVTTELQNRCVNIIARLFHAPVGASEKAVGVGTVGSSEAIMLXAGLAFKRRWQNRRRAAGQPCDRPNIVTGANVQVCWEKFARYFEVELKEVRLREGCYVMDPDEAVRMVDDNTICVAAILGSTLTGEFEDVRRLNDLLAANNRRTGWDTPIHVDAASGGFIAPFLYPDLEWDFRLPLVKSINVSGHKYGLVYAGVGWVVWRSKEDLPDELIFHINYLGADQPTFTLNFSKGSSQIIAQYYQFLRLGFEGYRNVMENCMESARTLREGLERTGRFTIISKEQGVPLVAFTFKEDETPLAFKLSAELRRFGWIVPAYTMPANLEHMAVLRVVVREDFGRPLAERFLSHVRMALEELDHAAKGGPVPRMRLTIELGPPARGSGEEASARVVNREAVVPVHRSVSLAGGKTKGVC

SEQ ID NO: 6281 - protein, 498 aa, Zea mays
  unsure (1)..(498): unsure at all Xaa locations
MVLSHGVGGSDESVHSTFASRYVRTSLPRYRMPEQSIPKEAAYQIINDELMLDGNPRLNLASFVTTWMEPECDKLIQASVNRNYVDMDEYPVTTELQNRCVNMIAHLFNAPXLGDAETAVGVGTVGSSEAIMLAGLAFKRRWQNKMKAAXAKPCDKPNIVTGANVQVCXWEKFARYFEVELKEVKLSDGYYVMDPQKAVXDMVDENTICVAAILXGSTLNGEFEDVKLLNDLLTKKNAETGWDTPIHVDAASGGVIAPFLYPELEWDFRLPLVKSINVSGHKYGLVYAGIGWCIWRTKADLPEELIFHINYLGADQPTFTLNFSKGSSQVIAQYYQLIRLGFEGYKNIMENCQENAMVLKQGLEKTGKFNIVSKDNGVPLVAFSLKDSSRHNEFEISDFLRRFGWIVPAYTMPPDAQHVTVLRVVIREDFSRTLAERLVLDIEKVLHELDALPARVPSGDLAALAAAESSEREMEKQRQVISLWKRAVLAKKKTNGVC

SEQ ID NO: 6282 - protein, 484 aa, Zea mays
MVVSVAATGPGTDAEPVSSTFFASRYVRDPLPRYRMPERSIPREAAQQIISDELMLDGNPRLNLASFVTTWMEPECDKLIMDSINKNYVDMDEYPVTTELQNRCVNMIAHLFNAPIKEDETAIGVGTVGSSEAIMLAGLAFKRKWQNKRKEQGKPCDRPNIVTGANVQVCWEKFARYFEVELKEVKLSEGYYVMDPVKAVEMVDENTICVAAILGSTLTGEFEDVKQLNDLLTEKNKETGWDVPIHVDAASGGFIAPFLYPELEWDFRLPLVKSINVSGHKYGLVYPGVGWVIWRSKDDLPEELIFHINYLGTDQPTFTLNFSKGFEGYRNIMENCQENAAILREGIAATGRFDVLSKDAGVPLVAFSLRDSSRFSVFDVSENLRRFGWIVPAYTMPADAEHVAVLRVVVREDFSRSLAERLVSDVRKILRELDARATHAVRVATATAEQSGDGVVAKKSVLEIEREVAARWMNAVNKKKTGVC

SEQ ID NO: 6283 - protein, 578 aa, Zea mays
  unsure (1)..(578): unsure at all Xaa locations
STTTPLVPVYHPHKPPPPPPKTNPRTVPQRQPWWLCARGAPAGTDDDAVASTFASRYVRERLPRYRMPERSIPREAAQQIISDELMLDGNPLXLNLASXFVTTWXWRPEXADKLIMDSINKNYVDMDEYPVTTELQNRCVNMIAHLFNAPIKEDETAIGVGTVGSSEAIMLAGLAFKRKWQNKRKEQGKPCDRPNIVTGANVQVCWXEKFARYFEVELKEVKLSEGYYVMDPRXKAVEMVDENTICVAAILGSTLTXGEVRDVKQLNDLLQRKNRKTGWXDVPIHVDAXASGGFIAPFLYPELEWDFRLPLVKSINVSGHKYGLVYPGVGWVIWRSKEDLPEELIFHINYLGTDQPTFTLNFSKGSSQIIAQYYQLIRLGFEGYRNIMQNCQDNARVLREGIAATGRFGVLGRRRGCPLVAFSLRDSSRFSVFDVSENLRRFGWIVPAYTMPXPTAEHVAVLRVVVREDFSRSLAERLVSDVRKILRELDARPHAVRVATATAEQSGDGVVAKKSVLEIEREVAARWMNAVNKKKTGGLLMRRGSETGRFRHGSFVYMSRACLCLCRALGCVGPVPRM

SEQ ID NO: 6284 - protein, 331 aa, Zea mays
MVLSHGVGGSDESVHSTFASRYVRTSLPRYRMPEQSIPKEAAYQIINDELMLDGNPRLNLASFVTTWMEPECDKLIQASVNKNYVDMDEYPVTTELQNRCVNMIAHLFNAPLGDAETAVGVGTVGSSEAIMLAGLAFKRRWQNKMKAAGKPCDKPNIVTGANVQVCWEKFARYFEVELKEVKLSDGYYVMDPQKAVDMVDENTICVAAILGSTLNGEFEDVKLLNDLLTKKNAETGWDTPIHVDAASGGFIAPFLYPELEWDFRLPLVKSINVSGHKYGLVYAGIGWCIWRTKADLPEELIFHINYLGADQPHFTLNFSKGSSQVIAQYYQ

SEQ ID NO: 6285 - protein, 352 aa, Zea mays
  unsure (1)..(352): unsure at all Xaa locations
MVVSVAATGPGTDAEPVSSTFFASRYVRDPLPRYRMPERSIPREAAQQIISDELMLDGNPRLNLASFVTTWMEPECDKLIMDSINKNYVDMDEYPVTTELQNRCVNMIAHLFNAPIKEDETAIGVGTVGSSEAIMLAGLAFKRKWQNKRKEQGKPCDRPNIVTGANVQVCWEKFARYFEVELKEVKLSEGYYVMDPVKAVEMVDENTICVAAILGSTLTGEFEDVKQLNDLLTDKNKETGWDVPIHVDAASGGFIAPFLYPELEWDFRLPLVKSINVSGHKYGLVYPGVGWVIWRSKEDLPEELIFHINYLGTDQPTFTLNFSKGIFGSFLSGSSVVSLGXFSWCMDGIESA

SEQ ID NO: 6286 - protein, 283 aa, Zea mays
MVLSHGVGGSDESVHSTFASRYVRTSLPRYRMPEQSIPKEAAYQIINDELMLDGNPRLNLASFVTTWMEPECDKLIQASVNKNYVDMDEYPVTTELQNRCVNMIAHLFNAPLGDAETAVGVGTVGSSEAIMLAGLAFKRRWQNKMKAAGKPCDKPNIVTGANVQVCWEKFARYFEVELKEVKLSDGYYVMDPQKAVDMVDENTICVAAILGSTLNGEFEDVKLLNDLLTKKNAETGWDTPIHVDAASGGFIAPFLYPELEWDFRLPLVKSINVSGHKYGLVYA

SEQ ID NO: 6287 - protein, 248 aa, Zea mays
  unsure (1)..(248): unsure at all Xaa locations
IGTSSRRDAPPEDYGSTSTLNPLTMAGLARHFKIPQDGAPADVVHQLLKDELDLDGRPSLNLASFVGTYMEREGEQLMIENISKNLSDADEYPAMMDMHARCVSIIAHMWGVQKGEKAIGSATTGSSEAIHLGGLAMKRRWQEKRIAEGKDTSKPNIIMGANAQVAXLEKFARYFEVEARILPVSEDSSYRLDPKLVKENIDETLFXSFXVILGSHYTGHYEPGEEISEILDEFEKXDWSXEIPIHVX

SEQ ID NO: 6288 - protein, 393 aa, Zea mays
VDPRVRSAIAPCLSYARGTGSAPSASCCLIVGLAFKRKWQNKRKEQGKPCDRPNIVTGANVQVCWEKFARYFEVELKEVKLSEGYYVMDPVKAVEMVDENTICVAAILGSTLTGEFEDVKQLNDLLTDKNKETGWDVPIHVDAASGGFIAPFLYPELEWDFRLPLVKSINVSGHKYGLVYPGVGWVIWRSKEDLPEELIFHINYLGTDQPTFTLNFSKGSSQIIAQYYQLIRLGFEGYRNIMQNCQDNAAILREGIAATGRFGVLSKDAGVPLVAFSLRDSSRFSVFDVSENLRRFGWIVPAYTMPADAEHVAVLRVVVREDFSRSLAERLVSDVRKILRELDARATHAVRVATATAEQSGDGVVAKKSVLEIEREVAARWMNAVNKKKTGVC

SEQ ID NO: 6289 - protein, 262 aa, Zea mays
  unsure (1)..(262): unsure at all Xaa locations
XFGTRPRTVPQRQPWCSRTRAPAGTAQQIISDELMLDGNPRLNLASFVTTWMEPECDKLIMDSINKNYVDMDEYPVTTELQNRCVNMIAHLFNAPIKEDETAIGVGTVGSSEAIMLAGLAFKRKWQNKRKEQGKPCDRPNIVTGANVQVCWEKFARYFEVELKEVKLSEGYYVMDPVKAVEMVDENTICVAAILGSTLTGEFEDVKQLNDLLTEKNXETGWDVPIHVDAASGGFIAPFLYPELEWDFXLPLVKSINVSGHKX

SEQ ID NO: 6290 - protein, 214 aa, Zea mays
  unsure (1)..(214): unsure at all Xaa locations
MVLSHAASAGSSDDSVRSTFASRYVRASLPRFRMPENSIPKEAAYQIINDELMLDGNPRLNLASFVTTWMEPECNKLMMDSINKNYVDMDEYPVTTELQNRCVNMIAHLFNAPLGETETAVGVGTVGSSEAIMLAGLAFKRRWQNKMKAAGKPCDKPNIVTGANXVQVCXWEKFARYFEVELKEMKLSEGYYVMDPEEGVEMVDENTICVAAIL

SEQ ID NO: 6291 - protein, 182 aa, Zea mays
  unsure (1)..(182): unsure at all Xaa locations
MVVTVAATGSDTAEPLHSTTFASRYVRDQLPRYRMPEGSIPKEAAYQIISDELMLDGNPRLNLASFVTTWMEPECGKLMMDSVNKNYVDMDEYPVTTELQNRCVNMIAHLFNAPIGEDETAIGVSTVGSSEAIMLAGLAFKRKWANKMKEQGKPCDKPNIVTGANVQVCWEKFARYFEVELX

SEQ ID NO: 6292 - protein, 193 aa, Zea mays
  unsure (1)..(193): unsure at all Xaa locations
MVLSHAASAGSSDDSVHSTFASRYVRASLPRFRMPENSIPKEAAYQIINDELMLDGNPRLNLASFVTTWMEPECNKLMMDSINKNYVDMDEYPVTTELQNRCVNMIAHLFNAPLGETETAVGVGTVRSSEAIMLAGLAFKRRWQNKMKAAGKPCDKPNIVTGANVQVXCWEKFARYFEVELKEVKLSEGYYVX

SEQ ID NO: 6293 - protein, 207 aa, Zea mays
  unsure (1)..(207): unsure at all Xaa locations
MVVSVAATGPGTDAEPVSSTFFASRYVRDPLPRYRMPERSIPREAAQQIISDELMLDGNPRLNLASFVTTWMEPECDKLIMDSINKNYVDMDEYPVTTELQNRCVNMIAHLFNAPIKEDETAIGVGTVGSSEAIMLAGLAFKRKWQNKRKEQGKPCDRPNIVTGANVQXIQEPQIMDVNVGFKKKKKKKKKKKKKKKKKKKTKKKKX

SEQ ID NO: 6294 - protein, 254 aa, Zea mays
  unsure (1)..(254): unsure at all Xaa locations
RTGWEQSIHVDAASGGFIAPFLYPELEWDFRLPLVKSINVSGXKYGLVYAGIGWCIWRTKEDLPGELIFHINYLXADQPTFTLNFSKGSSQIIAQYYQLIRLGFEGYKDVMQNCRDNAAVLREGINKMGYFDVVSKDSGVPLVAFSLKDSSKYTGFEVAESLRRFGWIVPAYTMPADAEHVAVMRVVIREDFSRGLAERLIADLGKTMADMDAHAGRKQAPEQPKKSVHDIEKEVTTFWRRLVANSKKKSSMVC

SEQ ID NO: 6295 - protein, 139 aa, Zea mays
  unsure (1)..(139): unsure at all Xaa locations
EGVQQIIRTELMLDANPRLNLGSLVPRWMEPKCDKLIMDSTTKNXVDMAEYPVPPEPQNPWVNIKAPLFNAPIKEDETAIGVGTVGSSEAIMLAGLAFKRKWQNKRKEQGKPCPPPNMVPGANVQXIQDPQIMDVNVGF

SEQ ID NO: 6296 - protein, 514 aa, Aspergillus oryzae
MVHLAQVHRNADLDSTIKRVDSIQLENTDEDGFYSSVYGTRFATEQLPQTEMPEREMPREVAYRMIKDELSLDGNPMLNLASFVTTYMEDEAEKLMTESFSKNFIDYEEYPQSAEIQNRCVNMIARLFNAPVHSEDEHPMGTSTIGSSEAIMLGTLAMKRRWQNKRKAEGKDYSRPNIVMNSAVQVCWEKAARYFDVEERYVYCTEDRYVIDPQQAVDLVDENTIGICAILGTTYTGEYEDVKAINDLLIERNIDVPIHVDAASGGFVAPFINPKLEWDFRLPKVVSINVSGHKYGLVYPGVGWVVWRSPEYLPKDLIFNINYLGAEQASFTLNFSKGASQVIGQYYQMIRLGKRGYRSIMTNITVTADFLAQELEKMGFIIMSQRRGHGLPLVAFRLPAEREGQFDEFALAHQLRERGWIVPAYTMAPNSNNLKLMRVVVREDFTKSRCDALLSDIKLGLKTLGDMDKAMLDKYTQHVRTHATHSHKSKHNHPHYKGETHSLQGKHGKTHGVC

SEQ ID NO: 6297 - protein, 604 aa, Neurospora crassa
MSLSRHVDPEEIIHHLKDIKLQEKGSGSQRQNHLTPYNSSYASQEDIPKYKIPENGTPGDTVYAMLRDELDLDGRPNLNMASFVNTYIEKDAQKLFVENLGKNLSDNDEYPAMISFSDRCVSILAHLWGVQKGEKAIGTATVGSSEAVHLGGLAMKRRWQEKRRAEGKDAYKPNIIMGANAQVALEKFARYFDVEARILPVSAQSNYCLDPALVKENLDENTIGVFVILGSTYTGHYEPVEEIHKILDDFESQTGIDIPIHVDAASGGFVAPFTYAKTGGHKWNFELPRVKSINVSGHKYGLVTPGVGWIVWRDESFLPKHLIFELHYLGGTEYSYTLNFSRPGAQVIVQYYNLIHLGFQGYRAVVENCLSNARLLSKALEATGWYTCVSDIHRPPQKQAGSVKSGSSGYDGENDQSCCSESQNDDQKAESEESKTHASSSSLSSSKDTPETDRNREETSADYTPGLPVVSFRFTDEFQQEYPHVKQETVSLLMRARQWIIPNYALPPNEDQTEILRVVIRESFSFDLIDRLVTDLVSVTETLMENDEVDLSLLQQHQGGRRRPLTKDEKRIEKEEREREERKGEERGEEKGKRMGEGIHRSVC

SEQ ID NO: 6298 - protein, 520 aa, Neurospora crassa
MVHLTIIPKEDEIRDGLDIPLTGALKAVHLQLANDEDRFTTSVYGSKFAAADLPRHEMPDEEMPKEVAYRMIKDELSLDGNPLLNLASFVTTYMEEEAEKLMTESLPKNFIDYEEYPQTADIQNRCVSMIGRLFNAPVKDAEASSAVGTSSVGSSEAIMLGVLAMKKRWKNKRIAEGKPADKPNLIMSSAVQVCWEKATRYFEVEEKFVYCTPDRYVIDPKETVDLVDENTIGICCILGTTYTGEYEDVKAVNDLLVERGLDTPIHVDAASGGFVAPFVVPDLEWDFRLKNVVSINVSGHKYGLVYPGVGWVVWRSAEYLPQELVFNINYLGADQASFTLNFSKGASQVIGQYYQLIRLGKHGYRAIMSNLTRTADYLAESLAALGFIIMSQKSGQGLPLVAFRLKEDPDRTYDEFALAHQLRVRGWIVPAYTMAPKTEGLKMLRIVVREDFSRNRCDGLISDIRSCQGILEQMDKETVKKQQEFIHKHHVVSGKASHNHPKYHEKHSLQGKTGKTHSIC

SEQ ID NO: 6299 - protein, 520 aa, Neurospora crassa
MVHLTIIPKEDEIRDGLDIPLTGALKAVHLQLANDEDRFTTSVYGSKFAAADLPRHEMPDEEMPKEVAYRMIKDELSLDGNPLLNLASFVTTYMEEEAEKLMTESLPKNFIDYEEYPQTADIQNRCVSMIGRLFNAPVKDAEASSAVGTSSVGSSEAIMLGVLAMKKRWKNKRIAEGKPADKPNLIMSSAVQVCWEKATRYFEVEEKFVYCTPDRYVIDPKETVDLVDENTIGICCILGTTYTGEYEDVKAVNDLLVERGLDTPIHVDAASGGFVAPFVVPDLEWDFRLKNVVSINVSGHKYGLVYPGVGWVVWRSAEYLPQELVFNINYLGADQASFTLNFSKGASQVIGQYYQLIRLGKHGYRAIMSNLTRTADYLAESLAALGFIIMSQKSGQGLPLVAFRLKEDPDRTYDEFALAHQLRVRGWIVPAYTMAPKTEGLKMLRIVVREDFSRNRCDGLISDIRSCQGILEQMDKETVKKQQEFIHKHHVVSGKASHNHPKYHILWSESNSSRNQATPE

SEQ ID NO: 6300 - protein, 328 aa, Escherichia coli
MDKKQVTDLRSELLDSRFGAKSISTIAESKRFPLHEMRDDVAFQIINDELYLDGNARQNLATFCQTWDDENVHKLMDLSINKNWIDKEEYPQSAAIDLRCVNMVADLWHAPAPKNGQAVGTNTIGSSEACMLGGMAMKWRWRKRMEAAGKPTDKPNLVCGPVQICWHKFARYWDVELREIPMRPGQLFMDPKRMIEACDENTIGVVPTFGVTYTGNYEFPQPLHDALDKFQADTGIDIDMHIDAASGGFLAPFVAPDIVWDFRLPRVKSISASGHKFGLAPLGCGWVIWRDEEALPQELVFNVDYLGGQIGTFAINFSAGGSGNCTVL

SEQ ID NO: 6301 - protein, 361 aa, Escherichia coli
DLWHAPAPKNGQAVGTNTIGSSEACMLGGMAMKWRWRKRMEAAGKPTDKPNLVCGPVQICWHKFARYWDVELREIPMRPGQLFMDPKRMIEACDENTIGVVPTFGVTYTGNYEFPQPLHDALDKFQADTGIDIDMHIDAASGGFLAPFVAPDIVWDFRLPRVKSISASGHKFGLAPLGCGWVIWRDEEALPQELVFNVDYLGGQIGTFAINFSRPAGQVIAQYYEFLRLGREGYTKVQNASYQVAAYLADEIAKLGPYEFICTGRPDEGIPAVCFKLKDGEDPGYTLYDLSERLRLRGWQVPAFTLGGEATDIVVMRIMCRRGFEMDFAELLLEDYKASLKYLSDHPKLQGIAQQNSFKHT

SEQ ID NO: 6302 - protein, 284 aa, Escherichia coli
AGKPTDKPNLVCGPVQISWHKFARYWDVELREIPMRPGQLFMDPKRMIEACDENTIGVVPNFGVTYTGNYEFPQPLHDALDKFQADTGIDIDMHIDAASGGFLAPFVAPDIVWDFRLPRVKSISASGHKFGLAPLGCGWVIWRDEEAVPQELVFNVDYLGGQIGTFAINFSRPAGQVIAQYYEFLRLGREGYTKVQNASYQVAAYLADEIAKLGPYEFICTGRPDEGIPAVCFKLKDGEDPGYTLYDLSERLRLRGWQVPAFTLGGEATDIVVMRIMCRRGFEM

SEQ ID NO: 6303 - protein, 161 aa, Escherichia coli
MKNKSGNSYYREAVDIHSSLELSFILHKYHLRVDEKKSRNVFSAIRDELILDGDSRQNLATFCQTWIDDEIRELLNLSIDRNMIYKDEYPQMAEPEGRCVRMLSDSWSFPDSRHTLGCSTIGSSEAAMLGRLALKWQWCKKREVQGKSTEPDLRSCANMLA

SEQ ID NO: 6304 - protein, 542 aa, Caenorhabditis elegans
MDFALEQYHSAKDLLIFELRKFNPIVLVSSTIVATYVLTNLRHMHLDEMGIRKRLSTWFFTTVKRVPFIRKMIDKQLNEVKDELEKSLRIVDRSTEYFTTIPSHSVGRTEVLRLAAIYDDLEGPAFLEGRVSGAVFNREDDKDEREMYEEVFGKFAWTNPLWPKLFPGVRIMEAEVVRMCCNMMNGDSETCGTMSTGGSISILLACLAHRNRLLKRGEKYTEMIVPSSVHAAFFKAAECFRIKVRKIPVDPVTFKVDLVKMKAAINKRTCMLVGSAPNFPFGTVDDIEAIGQLGLEYDIPVHVDACLGGFLLPFLEEDEIRYDFRVPGVSSISADSHKYGLAPKGSSVVLYRNKELLHNQYFCDADWQGGIYASATMEGSRAGHNIALCWAAMLYHAQEGYKANARKIVDTTRKIRNGLSNIKGIKLQGPSDVCIVSWTTNDGVELYRFHNFMKEKHWQLNGLQFPAGVHIMVTMNHTHPGLAEAFVADCRAAVEFVKSHKPSESDKTSEAAIYGLAQSIPDRSLVHEFAHSYIDAVYALTE

SEQ ID NO: 6305 - protein, 606 aa, Caenorhabditis elegans
MGVAFDSSDRDLSFRIALEYFDDLRILFNAKCSGLEPWQIVSYAISLCFLIAYIKRMTRSNEPPLVQIRKSIFSFLRSLPWVRRKLEADLAKAQAEIEDEVHQSDHMREFYKFLPERCMDTEEILADGRRYAMMGERRYMQHYDPQTREEDMKLSAKLFDLFAHTDPHRSDAFPGVRKMEAEILKMTCAMFHGGKDSCGVVAGGGTEALMLACLAYRNRSRARGEWRAEIVAPSTAHPALDKAAAFFDMTIKRIQVSETDDRANVGAMKRAIGPRTCMIIASAPNHITGTVDPIEKLAKLAQRYHIPLHVDCTLGGFVLPFMEYADYSVPAFDFRLPGVTSISADLHRYGQCPGRLSVLMYREPAFLRHQFFTNSEWPGGCYATPTMSGGRDGGAVATAWAMMLRKGRDGYINAAQRIIEATRQLAYRLQGLDGVSLRGSADLCVVAFTTSEVNVYNLVDVMVQKGWHVDPLLSPAAARVPISLSMCEEGVLDHFLEDLEMAICNLKSMEPAEKLGTTASFYQMLQKVNDKTLVDELSLIRLAAHYSIPPPAERRSLRTLSVEGRKLSMLGATGDMGKKLEELRRGFQKEKEAKQEALKNENSEEK

SEQ ID NO: 6306 - protein, 552 aa, Caenorhabditis elegans
MDSVKHTTEIIVDLTKMHYHMINDRLSRYDPVVLVLAAFGGTLVYTKVVHLYRKSEDPILKRMGAYVFSLLRKLPAVRDKIEKELAAEKPKLIESIHKDDKDKQFISTLPIAPLSQDSIMELAKKYEDYNTFNIDGGRVSGAVYTDRHAEHINLLGKIYEKYAFSNPLHPDVFPGARKMEAELIRMVLNLYNGPEDSSGSVTSGGTESIIMACFSYRNRAHSLGIEHPVILACKTAHAAFDKAAHLCGMRLRHVPVDSDNRVDLKEMERLIDSNVCMLVGSAPNFPSGTIDPIPEIAKLGKKYGIPVHVDACLGGFMIPFMNDAGYLIPVFDFRNPGVTSISCDTHKYGCTPKGSSIVMYRSKELHHFQYFSVADWCGGIYATPTIAGSRAGANTAVAWATLLSFGRDEYVRRCAQIVKHTRMLAEKIEKIKWIKPYGKSDVSLVAFSGNGVNIYEVSDKMMKLGWNLNTLQNPAAIHICLTINQANEEVVNAFAVDLEKICEELAAKGEQKADSGMAAMYGMAAQVPKSVVDEVIALYIDATYSAPPSTSN

SEQ ID NO: 6307 - protein, 182 aa, Trichoderma atroviride
  unsure (1)..(182): unsure at all Xaa locations
QRQAEGKPTDKPNIIMSSAVQVCWEKAARYFEVEEKYVYCTPDRYTIDPQQAVDLXDENTIGIAAILGTTYTGHYEDVKGINDLLEEKGLDVSIHVDAASGGFVAPFVLPDLEWDFRLPRVVSINASGHKYGLVYPGVGWVVWRSHEYLPQDLIFNINYLGAEQSSFTLNFSKGASQVIGQY

SEQ ID NO: 6308 - protein, 464 aa, Edwardsiella tarda
  unsure (1)..(464): unsure at all Xaa locations
MKKGTDTRGGYLDSRFGSEAIRTAAEAHHFPQGEMREDIAFQVINDELFLDGNARQNLATFCQTWDDDYVHRLMDISINKNWIDKEEYPQSAAIDLRCVNMVADLWHAPRPADGQAVGTNTIGSSEACMLGGMAMKWRWRAKRLAQGKSVDKPNMVCGPVQVCWHKFARYWDVELREIPMAPGKLXMDPERMIAACDENTIGVVPTFGVTYTGNYEMPDVLHKALDDLQARTGLDIDMHVDAASGGFLAPFCAPDIVWDFRLPRVKSISASGHKFGLAPLGCGWVVWRDAASLPDDLIFKVDYLGGQVGTFAINFSRPAGRVIAQYYEFLRLGREGYTKVHTASYQVAQFLAAEIAKLGPYEFICSGDPQQGIPAVCFRIPAGKALGYSLYDLSERLRLRGWQVPAFALNGEMSDVVVMRIMCRRGFEMDFAQLLMEDFRAALAYLKAHPAVANVAHQNSFKHS

SEQ ID NO: 6309 - protein, 355 aa, Halobacterium sp. NRC-1
MTRGEARRPPQEFDRVLSSMCTTPHPAAREAAQAFLATNPGDPETYPAVAERERDAVALLGEIVGLSSPHGYIAAGGTEANLQAVRAARNRADADAVNVVAPASAHFSFQKAADVLGVELRLAPTDGDHRADVAAVADLVDGDTAVVVGVAGTTEYGRVDPIPALADIAAGVDANLHVDAAWGGFVLPFTDHDWSFADAPVNTMAIDPHKMGQAPVPAGGFLARDPETLDALAIETPYLESDTQPTLGGTRSGAGVAGALASLRALWPDGYREQYERTQGNAEYLAAELAARGYDVVDPELPLVAADMPDAEFQALREEGWRISRTASDALRVVCMPHVTREMLAAFLDDVDALA

SEQ ID NO: 6310 - protein, 545 aa, Drosophila melanogaster
MRPFSGSDCLKPVTEGINRAFGAKEPWQVATITATTVLGGVWLWTVICQDENLYIRGKRQFFKFAKKIPAVRRQVETELAKAKNDFETEIKKSNAHLTYSETLPEKGLSKEEILRLVDEHLKTGHYNWRDGRVSGAVYGYKPDLVELVTEVYGKASYTNPLHADLFPGVCKMEAEVVRMACNLFHGNSASCGTMTTGGTESIVMAMKAYRDFAREYKGITRPNIVVPKTVHAAFDKGGQYFNIHVRSVDVDPETYEVDIKKFKRAINRNTILLVGSAPNFPYGTIDDIEAIAALGVKYDIPVHVDACLGSFVVALVRNAGYKLRPFDFEVKGVTSISADTHKYGFAPKGSSVILYSDKKYKDHQFTVTTDWPGGVYGSPTVNGSRAGGIIAACWATMMSFGYDGYLEATKRIVDTARYIERGVRDIDGIFIFGKPATSVIALGSNVFDIFRLSDSLCKLGWNLNALQFPSGIHLCVTDMHTQPGVADKFIADVRSCTAEIMKDPGQPVVGKMALYGMAQSIPDRSVIGEVTRLFLHSMYYTPSQK

SEQ ID NO: 6311 - protein, 479 aa, Prochlorococcus marinus str. MIT 9313
MALHRSNPRSNDLEEHAIGETVDALVSPLPRTTFPQEYRPALTTFNLLKEELLLDGNSKQNLATFCQTYESQQVAELMALAVDKNLIDKDEYPQTAEIERRCVSMMADLWHAPGEAVGCSTIGSSEAAMLGGLAAKWRWREHRKAAGQSIDRPNMVCGSVQICWTKFARYWDVELREVEMTSGELCMSPERMLEQVDENTIVVVPTLGVTYHGLYEDVQAVSQALDELQQRKGLDIPIHVDAASGGFLAPFCAPDLAPWDFRLPRVKSINSSGHKFGLAPLGVGWVLWRESRDLPEGLVFHVSYLGGDMPTFQINFSRPAGQVISQYYDFVRLGRDGYQAIHGASYANAQYVAQELKKLGPFELINDGNPAGGIPTVVWTLRADQELGFNLYDLSDRLRLRGWQVPAYPFTGELAHQAFQRILVKRDFSREMADLLLTDIRNAITHFESHPVKISLNANEAASTNHLGRSMVECRDAHG

SEQ ID NO: 6312 - protein, 460 aa, Mycobacterium tuberculosis H37Rv
MSRSHPSVPAHSIAPAYTGRMFTAPVPALRMPDESMDPEAAYRFIHDELMLDGSSRLNLATFVTTWMDPEAEKLMAETFDKNMIDKDEYPATAAIEARCVSMVADLFHAEGLRDHDPTSATGVSTIGSSEAVMLGGLALKWRWRQRVGSWKGRMPNLVMGSNVQVVWEKFCRYFDVEPRYLPMERGRYVITPEQVLAAVDENTIGVVAILGTTYTGELEPIAEICAALDKLAAGGGVDVPVHVDAASGGFVVPFLHPDLVWDFRLPRVVSINVSGHKYGLTYPGVGFVVWRGPEHLPEDLVFRVNYLGGDMPTFTLNFSRPGNQVVGQYYNFLRLGRDGYTKVMQALSHTARWLGDQLREVDHCEVISDGSAIPVVSFRLAGDRGYTEFDVSHELRTFGWQVPAYTMPDNATDVAVLRIVVREGLSADLARALHDDAVTALAALDKVKPGGHFDAQHFAH

SEQ ID NO: 6313 - protein, 466 aa, Escherichia coli K12
MDQKLLTDFRSELLDSRFGAKAISTIAESKRFPLHEMRDDVAFQIINDELYLDGNARQNLATFCQTWDDENVHKLMDLSINKNWIDKEEYPQSAAIDLRCVNMVADLWHAPAPKNGQAVGTNTIGSSEACMLGGMAMKWRWRKRMEAAGKPTDKPNLVCGPVQICWHKFARYWDVELREIPMRPGQLFMDPKRMIEACDENTIGVVPTFGVTYTGNYEFPQPLHDALDKFQADTGIDIDMHIDAASGGFLAPFVAPDIVWDFRLPRVKSISASGHKFGLAPLGCGWVIWRDEEALPQELVFNVDYLGGQIGTFAINFSRPAGQVIAQYYEFLRLGREGYTKVQNASYQVAAYLADEIAKLGPYEFICTGRPDEGIPAVCFKLKDGEDPGYTLYDLSERLRLRGWQVPAFTLGGEATDIVVMRIMCRRGFEMDFAELLLEDYKASLKYLSDHPKLQGIAQQNSFKHT

SEQ ID NO: 6314 - protein, 568 aa, Homo sapiens
MPSTDLLMLKAFEPYLEILEVYSTKAKNYVNGHCTKYEPWQLIAWSVVWTLLIVWGYEFVFQPESLWSRFKKKCFKLTRKMPIIGRKIQDKLNKTKDDISKNMSFLKVDKEYVKALPSQGLSSSAVLEKLKEYSSMDAFWQEGRASGTVYSGEEKLTELLVKAYGDFAWSNPLHPDIFPGLRKIEAEIVRIACSLFNGGPDSCGCVTSGGTESILMACKAYRDLAFEKGIKTPEIVAPQSAHAAFNKAASYFGMKIVRVPLTKMMEVDVRAMRRAISRNTAMLVCSTPQFPHGVIDPVPEVAKLAVKYKIPLHVDACLGGFLIVFMEKAGYPLEHPFDFRVKGVTSISADTHKYGYAPKGSSLVLYSDKKYRNYQFFVDTDWQGGIYASPTIAGSRPGGISAAAWAALMHFGENGYVEATKQIIKTARFLKSELENIKGIFVFGNPQLSVIALGSRDFDIYRLSNLMTAKGWNLNQLQFPPSIHFCITLLHARKRVAIQFLKDIRESVTQIMKNPKAKTTGMGAIYGMAQTTVDRNMVAELSSVFLDSLYSTDTVTQGSQMNGSPKPH

SEQ ID NO: 6315 - protein, 568 aa, Homo sapiens
MPSTDLLMLKAFEPYLEILEVYSTKAKNYVNGHCTKYEPWQLIAWSVVWTLLIVWGYEFVFQPESLWSRFKKKCFKLTRKMPIIGRKIQDKLNKTKDDISKNMSFLKVDKEYVKALPSQGLSSSAVLEKLKEYSSMDAFWQEGRASGTVYSGEEKLTELLVKAYGDFAWSNPLHPDIFPGLRKIEAEIVRIACSLFNGGPDSCGCVTSGGTESILMACKAYRDLAFEKGIKTPEIVAPQSAHAAFNKAASYFGMKIVRVPLTKMMEVDVRAMRRAISRNTAMLVCSTPQFPHGVIDPVPEVAKLAVKYKIPLHVDACLGGFLIVFMEKAGYPLEHPFDFRVKGVTSISADTHKYGYAPKGSSLVLYSDKKYRNYQFFVDTDWQGGIYASPTIAGSRPGGISAACWAALMHFGENGYVEATKQIIKTARFLKSELENIKGIFVFGNPQLSVIALGSRDFDIYRLSNLMTAKGWNLNQLQFPPSIHFCITLLHARKRVAIQFLKDIRESVTQIMKNPKAKTTGMGAIYGMAQTTVDRNMVAELSSVFLDSLYSTDTVTQGSQMNGSPKPH

SEQ ID NO: 6316 - protein, 580 aa, Homo sapiens
KRGARRGGWKRKMPSTDLLMLKAFEPYLEILEVYSTKAKNYVNGHCTKYEPWQLIAWSVVWTLLIVWGYEFVFQPESLWSRFKKKCFKLTRKMPIIGRKIQDKLNKTKDDISKNMSFLKVDKEYVKALPSQGLSSSAVLEKLKEYSSMDAFWQEGRASGTVYSGEEKLTELLVKAYGDFAWSNPLHPDIFPGLRKIEAEIVRIACSLFNGGPDSCGCVTSGGTESILMACKAYRDLAFEKGIKTPEIVAPQSAHAAFNKAASYFGMKIVRVPLTKMMEVDVRAMRRAISRNTAMLVCSTPQFPHGVIDPVPEVAKLAVKYKIPLHVDACLGGFLIVFMEKAGYPLEHPFDFRVKGVTSISADTHKYGYAPKGSSLVLYSDKKYRNYQFFVDTDWQGGIYASPTIAGSRPGGISAACWAALMHFGENGYVEATKQIIKTARFLKSELENIKGIFVFGNPQLSVIALGSRDFDIYRLSNLMTAKGWNLNQLQFPPSIHFCITLLHARKRVAIQFLKDIRESVTQIMKNPKAKTTGMGAIYGMAQTTVDRNMVAELSSVFLDSLYSTDTVTQGSQMNGSPKPH

SEQ ID NO: 6317 - protein, 459 aa, Ferroplasma acidarmanus
MVSRKMNPERKIYGTYSNRDFNNPVPEFEFPEEGMASRAAYEMIHEELKLDGIPELNLATFVTTYMEPEAKNLYMENAHKNFIDSFEYPQIKKEETRIVNILSRLYNAPEGKDFTGTSTIGSSESIMLALLAHKWNWKSKMEALKKDASKPNIVFGADTHVVWDKFAKYFDVEARVVPLDAKTRVVDPDKLIENVDENTIAVGAVLGTTFTGAFDDVKRINSLLEELKSKKGLDIPIHVDAASAGFITPFIEPELEWDFRLSHVKSINVSGHKFGLVYPGLGWLLFKDKADLPDDLVFYVNYLGDDMPTYTLNFSKSAANIAPQYYNIIRLGKSGYRNIAENIMKNAKYLADKISEFPELEVVSRAEHIPVVTFRQKTSSSYTLFDLSAAIRSYGWIVPAYSLPDNANDTVLMRVVVREGFSRDLADIFLENLKQSMEKLSGKGIEKSKISSRRGHAVS

SEQ ID NO: 6318 - protein, 155 aa, Chlamydomonas sp. W80
GSPGLQALLEEAENERMHLLTFLEMRQPSWMFRAAVLLAQGAYFNMFFISYLISPKFCHAVVGYLEEEAVKTYTHLLHDIDAGHVWKDKPAPKTGIAYWKLSPDATMRDLILAVRADEASHSLVNHTLSEIPSDAPNPFIEPAKADAFSKAENKL

SEQ ID NO: 6319 - protein, 230 aa, Nostoc sp. PCC 7120
MIRLLVGILVFVINTVYRDRPYPRFYVLETVARVPYFSYLSVLHLYETLGWWRKADWLKVHFAESWNELHHLLIMESLGGAGFWGDRFLAKTAALIYYWIIIAVYFVSPHSAYNFMEQVEQHAYSSYDKFLTTHEAELKTQPAPEVAKTYYRDGDLYMFDEFQTAHSPSERRPNIDNLYDVFVAIRDDEMEHVKTMVACQQTNAKYSLKSPHNPEAKTVVLTNAQMNTQV

SEQ ID NO: 6320 - protein, 377 aa, Magnaporthe grisea
MLVHQVNTKLCSAKQFTHLAKVVTPALSYQASSVYSANLPRLAASPRLFSTTSSAQLRDFFPVKETEHIRQTPPTWPHHGLTEKEMVDVVPGHRKPRTLGDKFAWSLVRISRWGMDKVSGLSSEQQQINKGSPTTSIVAAKPLTEAQWLSRFIFLESIAAVPGMVAGMLRHLHSLRRLKRDNGWIETLLEEAYNERMHLLTFLKMCEPGWLMKILIIGAQGVYFNAMFVAYLISPKICHRFVGYLEEEAVHTYTRSIEELERGDLPKWSDPKFQVPEIAVSYWGMPEGHRTMRDLLLYIRADEANHRGVHHTLGNLNQVEDPNPFVSDYKGDKPRPVAASRPEGFEREEVIGKEVIGKEVIEKDVIGKEVLGKQVSV

SEQ ID NO: 6321 - protein, 351 aa, Emericella nidulans
MSTTGPIRVAAIPKHYLQFTVRTYTRSMASAGLRYSNPPLVKKCYDQPTGKRFISSTPQSQIKDYFPPPDAPKIVEVKTAWAHPVYSEEEMRAVTVGHREAKNWSDWVALGSVRLLRWGMDLVTGYKHPAPGQEDIKKFQMTEKEWLRRFVFLESVAGVPGMVGGMLRHLRSLRRMKRDNGWIETLLEEAYNERMHLLTFLKMAEPGWFMRLMVLGAQGVFFNGFFLSYLISPRTCHRFVGYLEEEAVLTYTRAIKDLESGRLPHWEKLEAPEIAVKYWKMPEGNRTMKDLLLYVRADEAKHREVNHTLGNLKQAVDVNPFAVEWKDPSKPHPGKGIKHLKTTGWEREEVV

SEQ ID NO: 6322 - protein, 354 aa, Emericella nidulans
MNSMSTTGPIRGGAIPKHYLQFTVRTYTRSMASAGLRYSNPPLVKKCYDQPTGKRFISSTPQSQIKDYFPPPDAPKIVEVKTAWAHPVYSEEEMRAVTVGHREAKNWSDWVALGSVRLLRWGMDLVTGYKHPAPGQEDIKKFQMTEKEWLRRFVFLESVAGVPGMVGGMLRHLRSLRRMKRDNGWIETLLEEAYNERLFLLTFLKMAGPGWFMRLMVLGAQGVFFNGFFLSYLISPRTCHRFVGYLEEEAVLTYTRAIKDLESGRLPHWEKLEAPEIAVKYWKMPEGNRTMKDLLLYVRADEAKHREVNHTLGNLKQAVDVNPFAVEWKDPSKPHPGKGIKHLKTTGWEREEVV

SEQ ID NO: 6323 - protein, 401 aa, Cryptococcus neoformans var. grubii
MSAIMLRSGNVARSTILAGGPLIGGPMTFRSAVSSTRTFSLFTKARIQSDDMKRASLSLQPSVREAEKSQGPVVGSEGREVEGPHYQDQVSHNVLSDASTTGAWTMLNPIYTEKELNTVQVVGRAPVTFGDKAAHRTVKFLRKCFDLLTGYTPYEVPASVLAQKPIPIAELRSKGKLLSDQKWLFRIILLESIAGVPGMVGGTLRHLRSMRLLKRDGGWIHSLLEEAENERMHLLTFMTIAQPGIFTRALVLAAQGVFYNAFFLTYLISPRIAHRFVGALEEEAVRTYTHCISDMEAGLIPEWKDMPAPAIAIDYWRLPASSSLLDVIRAVRADEATHRFVNHSLANLDQKRDFNPFALSEASPEERGSKWGYTREESAKFALEQQRKLMAASEKSSGLVE

SEQ ID NO: 6324 - protein, 362 aa, Gelasinospora sp. S23
MNTPKVNILYSPGQAAQLSRTLISTCHTRPFLLGGLRVATSLHPTQTNLSSSPPRGFTTTSVVRLKDFFPAKETAYIRQTPPAWPHHGWTEEEMISVVPEHRKPETVGDWLAWKLVRICRWGTDIATGIRPEQQVDKNHPTTATSADKPLTEAQWLVRFIFLESIAGVPGMVAGMLRHLHSLRRLKRDNGWIETLLEESYNERMHLLTFMKMCEPGLLMKTLILGAQGVFFNAMFLSYLVSPKITHRFVGYLEEEAVHTYTRCIREIEEGHLPKWSDERFEIPEMAVRYWRMPEGKRTMKDLIYYIRADEAVHRGVNHTLSNLDQKEDPNPFVNDYKEGEGGRRPVNPALKPTGFERAEVIR

SEQ ID NO: 6325 - protein, 318 aa, Mangifera indica
MTVMRGLLNGGRYGNRYIWTAISLRHPEVMEGNGLESAVMQWRRMLSNAGGAEAQVKEQKEEKKDAMVSNYWGISRPKITREDGSEWPWNCFMPWETYRSDLSIDLKKHHVPRTFMDKFAYRTVKILRVPTDIFFQRRYGCRAMMLETVAAVPGMVGGMLLHLKSLRKLEQSGGWIKALLEEAENERMHLMTMVELVQPKWYERLLVLAVQGVFFNSFFVLYVLSPKLAHRIVGYLEEEAIHSYTEYLKDIDSGAIKNIPAPAIAIDYWRLPKDATLKDVITVVRADEAHHRDVNHFASDVQVQGKELRDAPAPVGYH

SEQ ID NO: 6326 - protein, 274 aa, Mangifera indica
MLSNAGGAEAQVKEQKEEKKDAMVSNYWGISRPKITREDGSEWPWNCFMPWETYRSDLSIDLKKHHVPRTFMDKFAYRTVKILRVPTDIFFQRRYGCRAMMLETVAAVPGMVGGMLLHLKSLRKLEQSGGWIKALLEEAENERMHLMTMVELVQPKWYERLLVLAVQGVFFNSFFVLYVLSPKLAHRIVGYLEEEAIHSYTEYLKDIDSGAIKNIPAPAIAIDYWRLPKDATLKDVITVVRADEAHHRDVNHFASDVQVQGKELRDAPAPVGYH

SEQ ID NO: 6327 - protein, 144 aa, Mangifera indica
LETVAAVPGMVGGMLLHLKSLRKLEQSGGWIKALLEEAENERMHLMTMVELVQPKWYERLLVLAVQGVFFNSFFVLYVLSPKLAHRIVGYLEEEAIHSYTEYLKDIDSGAIKNIPAPAIAIDYWRLPKDATLKDVITVVRADEA

SEQ ID NO: 6328 - protein, 144 aa, Mangifera indica
LETVAAVPGTVGGMLLHCKSLRKFEHSGGWIKVLTEEAENERMHLMTFMEVAKPRWYERALILAVQGVFFNVYMLGYLISPKFAHRVVGYLEEEAILSYTEFLKELDKGNIENVPAPAIAIDYWRLPPESTLRDVVIVVRADEC

SEQ ID NO: 6329 - protein, 78 aa, Mangifera indica
MVGGMLLHCKSLRKFEHSGGWIKALLEEAENERMHLMTFMEVAQPRWYERALVFTVQGVFFNAYFLGYLISPKFAHRM

SEQ ID NO: 6330 - protein, 78 aa, Mangifera indica
GGGGMLLHFKSLRKFEHRGGWIKALLEEAENERTHLMIFVEVAKPRWYERALILRVQGVFLNAYSLGYLISPKFAHRI

SEQ ID NO: 6331 - protein, 339 aa, Chlamydomonas reinhardtii
MASASRLLGSIASVPPQHGGAGFQAVRGFATGAVSTPAASSPGHKPAATHAPPTRLDLKPGAGSFAAGAVAPHPGINPARMAADSASAAAGASGDAALAESYMAHPAYSDEYVESVRPTHVTPQKLHQHVGLRTIQVFRYLFDKATGYTPTGSMTEAQWLRRMIFLETVAGCPGMVAGMLRHLKSLRSMSRDRGWIHTLLEEAENERMHLITFLQLRQPGPAFRAMVILAQGVFFNAYFIAYLLSPRTCHAFVGFLEEEAVKTYTHALVEIDAGRLWKDTPAPPVAVQYWGLKPGANMRDLILAVRADEACHAHVNHTLSQLNPSTDANPFATGASQLP

SEQ ID NO: 6332 - protein, 360 aa, Chlamydomonas reinhardtii
MLQTAPMLPGLGPHLVPQLGALASASRLLGSIASVPPQHGGAGFQAVRGFATGAVSTPAASSPGHKPAATHAPPTRLDLKPGAGSFAAGAVAPHPGINPARMAADSASAAAGASGDAALAESYMAHPAYSDEYVESVRPTHVTPQKLHQHVGLRTIQVFRYLFDKATGYTPTGSMTEAQWLRRMIFLETVAGCPGMVAGMLRHLKSLRSMSRDRGWIHTLLEEAENERMHLITFLQLRQPGPAFRAMVILAQGVFFNAYFIAYLLSPRTCHAFVGFLEEEAVKTYTHALVEIDAGRLWKDTPAPPVAVQYWGLKPGANMRDLILAVRADEACHAHVNHTLSQLNPSTDANPFATGASQLP

SEQ ID NO: 6333 - protein, 347 aa, Chlamydomonas reinhardtii
MTSLPALVPFAALPALVPFAALASTGRLLGSMSGLVCGAQRRLPAHTAFARSHGTATGHAGIVGGAGLSHVKDAAQAFGANQSSSSPSFATSGVAPHPGMKAPSPPTDDEVEACWRPVYDTAYLEKVKPFHITPERLYQRIGFRAIMAARWTFDKLTGYGPNMTEAKWLQRMIFLETIAGVPGMVAGVLRHLKSLRSMKRDHGWIHTLLQEAENERMHLLTFFELRKPGPLFRASIIVAQGVFWNLYFIGYLVSPRTCHAAVGFLEEEAVKTYTHALQEIDAGRLWKGKVAPPIACEYWGLKPGASMRDLILAVRADEACHAHVNHTLSGLPATAPNPFAYGASQLP

SEQ ID NO: 6334 - protein, 358 aa, Blumeria graminis
MYLSRLPPRSIPCRSINQISRVVARSSKSRLEFVGSYQNSLTTNQTRCLRPFSSTSRSQLRDYFPEADHEHIKKTEAAWPHPNYPKEQMLTNISYAHRTPKDFSDRIALYLVRFLRFSTDLATGYKHDPVTITENGEKVLKKPYRMSERKWLIRMVFLESVAGVPGMVAGMLRHLHSLRRLKRDNGWIETLLEEAYNERMHLLTFLKMAKPGWFMKFMIIGAQGVFFNSMFLSYLISPRTCHRFVAYLEEEAVLTYSTAIQDIEAGLLPKWTSPEFRIPDLAVQYWKIPEGNRTMRDLLLYIRADEAKHREVNHTLGNLDQNEDPNPFVSEYRDKAAPHPSKGIEHIRPTGWERNEII

SEQ ID NO: 6335 - protein, 354 aa, Arabidopsis thaliana
MMITRGGAKAAKSLLVAAGPRLFSTVRTVSSHEALSASHILKPGVTSAWIWTRAPTIGGMRFASTITLGEKTPMKEEDANQKKTENESTGGDAAGGNNKGDKGIASYWGVEPNKITKEDGSEWKWNCFRPWETYKADITIDLKKHHVPTTFLDRIAYWTVKSLRWPTDLFFQRRYGCRAMMLETVAAVPGMVGGMLLHCKSLRRFEQSGGWIKALLEEAENERMHLMTFMEVAKPKWYERALVITVQGVFFNAYFLGYLISPKFAHRMVGYLEEEAIHSYTEFLKELDKGNIENVPAPAIAIDYWRLPADATLRDVVMVVRADEAHHRDVNHFASDIHYQGRELKEAPAPIGYH

SEQ ID NO: 6336 - protein, 305 aa, Arabidopsis thaliana
MDTRAPTIGGMRFASTITLGEKTPMKEEDANQKKTENESTGGDAAGGNNKGDKGIASYWGVEPNKITKEDGSEWKWNCFRPWETYKADITIDLKKHHVPTTFLDRIAYWTVKSLRWPTDLFFQRRYGCRAMMLETVAAVPGMVGGMLLHCKSLRRFEQSGGWIKALLEEAENERMHLMTFMEVAKPKWYERALVITVQGVFFNAYFLGYLISPKFAHRMVGYLEEEAIHSYTEFLKELDKGNIENVPAPAIAIDYWRLPADATLRDVVMVVRADEAHHRDVNHFASDIHYQGRELKEAPAPIGYH

SEQ ID NO: 6337 - protein, 353 aa, Arabidopsis thaliana
MMITRVEPRAQIAVSGGWTTFVLDGPYVSSHEALSRSHILKPGVTSAWIWTRAPTIGGMRFASTITLGEKTPMKEEDANQKKTENESTGGDAAGGNNKGDKGIASYWGVEPNKITKEDGSEWKWNCFRPWETYKADITIDLKKHHVPTTFLDRIAYWTVKSLRWPTDLFFQRRYGCRAMMLETVAAVPGMVGGMLLHCKSLRRFEQSGGWIKALLEEAENERMHLMTFMEVAKPKWYERALVITVQGVFFNAYFLGYLISPKFAHRMVGYLEEEAIHSYTEFLKELDKGNIENVPAPAIAIDYWRLPADATLRDVVMVVRADEAHHRDVNHFASDIHYQGRELKEAPAPIGYH

SEQ ID NO: 6338 - protein, 325 aa, Arabidopsis thaliana
MMMSRRYGAKLMETAVTHSHLLNPRVPLVTENIRVPAMGVVRVFSKMTFEKKKTTEEKGSSGGKADQGNKGEQLIVSYWGVKPMKITKEDGTEWKWSCFRPWETYKSDLTIDLKKHHVPSTLPDKLAYWTVKSLRWPTDLFFQRRYGCRAMMLETVAAVPGMVGGMLVHCKSLRRFEQSGGWIKALLEEAENERMHLMTFMEVAKPNWYERALVIAVQGIFFNAYFLGYLISPKFAHRMVGYLEEEAIHSYTEFLKELDNGNIENVPAPAIAIDYWRLEADATLRDVVMVVRADEAHHRDVNHYASDIHYQGRELKEAPAPIGYH

SEQ ID NO: 6339 - protein, 287 aa, Arabidopsis thaliana
LGEKTPMKEEDANQKKTENESTGGDAAGGNNKGDKGIASYWGVEPNKITKEDGSEWKWNCFRPWETYKADITIDLKKHHVPTTFLDRIAYWTVKSLRWPTDLFFQRRYGCRAMMLETVAAVPGMVGGMLLHCKSLRRFEQSGGWIKALLEEAENERMHLMTFMEVAKPKWYERALVITVQGVFFNAYFLGYLISPKFAHRMVGYLEEEAIHSYTEFLKELDKGNIENVPAPAIAIDYWRLPADATLRDVVMVVRADEAHHRDVNHFASDIHYQGRELKEAPAPIGYH

SEQ ID NO: 6340 - protein, 329 aa, Arabidopsis thaliana
MITTLLRRSLLDASKQATSINGILFHQLAPAKYFRVPAVGGLRDFSKMTFEKKKTSEEEEGSGDGVKVNDQGNKGEQLIVSYWGVKPMKITKEDGTEWKWSCFRPWETYKADLTIDLKKHHVPSTLPDKIAYWMVKSLRWPTDLFFQRRYGCRAIMLETVAAVPGMVGGMLMHFKSLRRFEQSGGWIKALLEEAENERMHLMTFMEVAKPKWYERALVISVQGVFFNAYLIGYIISPKFAHRMVGYLEEEAIHSYTEFLKELDNGNIENVPAPAIAVDYWRLEADATLRDVVMVVRADEAHHRDVNHYASDIHYQGHELKEAPAPIGYH

SEQ ID NO: 6341 - protein, 318 aa, Arabidopsis thaliana
MSYRSIYRTLRPVLSSSVQSSGLGIGGFRGHLISHLPNVRLLSSDTSSPVSGNNQPENPIRTADGKVISTYWGIPPTKITKPDGSAWKWNCFQPWDSYKPDVSIDVTKHHKPSNFTDKFAYWTVQTLKIPVQLFFQRKHMCHAMLLETVAAVPGMVGGMLLHLKSLRRFEHSGGWIKALLEEAENERMHLMTFIELSQPKWYERAIVFTVQGVFFNAYFLAYVISPKLAHRITGYLEEEAVNSYTEFLKDIDAGKFENSPAPAIAIDYWRLPKDATLRDVVYVIRADEAHHRDINHYASDIQFKGHELKEAPAPIGYH

SEQ ID NO: 6342 - protein, 318 aa, Arabidopsis thaliana
MSYRSIYRTLRPVLSSSVQSSGLGIGGFRGHLISHLPNVRLLSSDTSSPVSGNNQPENPIRTADGKVISTYWGIPPTKITKPDGSAWKWNCFQPWDSYKPDVSIDVTKHHKPSNFTDKFAYWTVQTLKIPVQLFFQRKHMCHAMLLETVAAVPGMVGWMLLHLKSLRRFEHSGGWIKALLEEAENERMHLMTFIELSQPKWYERAIVFTVQGVFFNAYFLAYVISPKLAHRITGYLEEEAVNSYTEFLKDIDAGKFENSPAPAIAIDYWRLPKDATLRDVVYVIRADEAHHRDINHYASDIQFKGHELKEAPAPIGYH

SEQ ID NO: 6343 - protein, 317 aa, Arabidopsis thaliana
MSYRSIYRTLRPVLSSSVQSSGLGIGGFRGHLISHLPNVRLLSSDTSSPVSGNNQPENPIRTADGKVISTYWGIPPTKITKPDGSAWKWNCFQPWDSYKPDVSIDVTKHHKPSNFTDKFAYWTVQTLKIPVQLFFQRKHMCHAMLLETVAVPGMVGGMLLHLKSLRRFEHSGGWIKALLEEAENERMHLMTFIELSQPKWYERAIVFTVQGVFFNAYFLAYVISPKLAHRITGYLEEEAVNSYTEFLKDIDAGKFENSPAPAIAMDYWRFPKDATLRDVVYVIRAEEAPPRDINHYASDIQFKGHELKEAPAPIGYH

SEQ ID NO: 6344 - protein, 282 aa, Arabidopsis thaliana
MGMSSASAMEKKDENLTVKKGQNGGGSVAVPSYWGIETAKMKITRKDGSDWPWNCFMPWETYQANLSIDLKKHHVPKNIADKVAYRIVKLLRIPTDIFFQRRYGCRAMMLETVAAVPGMVGGMLLHLKSIRKFEHSGGWIKALLEEAENERMHLMTMMELVKPKWYERLLVMLVQGIFFNSFFVCYVISPRLAHRVVGYLEEEAIHSYTEFLKDIDNGKIENVAAPAIAIDYWRLPKDATLKDVVTVIRADEAHHRDVNHFASDIRNQGKELREAAAPIGYH

SEQ ID NO: 6345 - protein, 353 aa, Arabidopsis thaliana
MSQLITKAALRVLLVCGRGNCNMFVSSVSSTSVMKSPYEITAPMRIHDWCGGFGDFKIGSKHVQGNFNLRWMGMSSASAMEKKDENLTVKKGQNGGGSVAVPSYWGIETAKMKITRKDGSDWPWNCFMPWETYQANLSIDLKKHHVPKNIADKVAYRIVKLLRIPTDIFFQRRYGCRAMMLETVAAVPGMVGGMLLHLKSIRKFEHSGGWIKALLEEAENERMHLMTMMELVKPKWYERLLVMLVQGIFFNSFFVCYVISPRLAHRVVGYLEEEAIHSYTEFLKDIDNGKIENVAAPAIAIDYWRLPKDATLKDVVTVIRADEAHHRDVNHFASDIRNQGKELREAAAPIGYH

SEQ ID NO: 6346 - protein, 287 aa, Arabidopsis thaliana
MSYRSIYRTLRPVLSSSVQSSGLGIGGFRGHLISHLPNVRLLSSDTSSPVSGNNQPENPIRTADGKVISTYWGIPPTKITKPDGSAWKWNCFQPWDSYKPDVSIDRKHMCHAMLLETVAAVPGMVGGMLLHLKSLRRFEHSGGWIKALLEEAENERMHLMTFIELSQPKWYERAIVFTVQGVFFNAYFLAYVISPKLAHRITGYLEEEAVNSYTEFLKDIDAGKFENSPAPAIAIDYWRLPKDATLRDVVYVIRADEAHHRDINHYASDIQFKGHELKEAPAPIGYH

SEQ ID NO: 6347 - protein, 358 aa, Monilinia fructicola
  unsure (1)..(358): unsure at all Xaa locations
MYVARLSTRPLSNPSTAQLSKAAAFFAQSYALPSTKCTAHVPSRRPFTSGAKIQVKGRDLFPEPXHGQIKRTEPAWPHPPYSVEQMRSKVYFAHRKPRDFSDRVALGMVRFLRWCTDFATGYKHNVEAPKTASDSNAVTATKPYQMSERKWLIRYVFLESVAGVPGMVAGMLRHLRSLRGLKRDNGWIETLLEEAYNERMHLLTFLKMYEPGLFMRTMILGAQGVFFNSFFLCYLFSPKTCHRFVGYLEEEAVLTYTLSIQDLENGHLPKWADPNFKAPDLAIEYWGMPEGHRSMRDLLYYIRADEAKHREVNHTLGNLKQDEDPNPFVSVYGKEVADKPGKGIESLRPLGWEREEVI

SEQ ID NO: 6348 - protein, 333 aa, Glycine max
MKLTALNSTVRRALLNGRNQNGNRLGSAALMPYAAAETRLLCAGGANGWFFYWKRTMVSPAEAKVPEKEKEKEKAKAEKSVVESSYWGISRPKVVREDGTEWPWNCFMPWESYRSNVSIDLTKHHVPKNVLDKVAYRTVKLLRIPTDLFFKRRYGCRAMMLETVAAVPGMVGGMLLHLRSLRKFQQSGGWIKALLEEAENERMHLMTMVELVKPKWYERLLVLAVQGVFFNAFFVLYILSPKVAHRIVGYLEEEAIHSYTEYLKDLESGAIENVPAPAIAIDYWRLPKDARLKDVITVIRADEAHHRDVNHFASDIHFQGKELREAPAPIGYH

SEQ ID NO: 6349 - protein, 333 aa, Glycine max; identical to SEQ ID NO: 6348

SEQ ID NO: 6350 - protein, 321 aa, Glycine max
MMMMMSRSGANRVANTAMFVAKGLSGEVGGLRALYGGGVRSESTLALSEKEKIEKKVGLSSAGGNKEEKVIVSYWGIQPSKITKKDGTEWKWNCFSPWGTYKADLSIDLEKHMPPTTFLDKMAFWTVKVLRYPTDVFFQRRYGCRAMMLETVAAVPGMVAGMLLHCKSLRRFEHSGGWFKALLEEAENERMHLMTFMEVAKPKWYERALVITVQGVFFNAYFLGYLLSPKFAHRMFGYLEEEAIHSYTEFLKELDKGNIENVPAPAIAIDYWQLPPGSTLRDVVMVVRADEAHHRDVNHFASDIHYQGRELREAAAPIGYH

SEQ ID NO: 6351 - protein, 321 aa, Glycine max; identical to SEQ ID NO: 6350

SEQ ID NO: 6352 - protein, 321 aa, Glycine max
MMMMMSRSGGNRVANTAMFVAKGLSGEVGGLRALYGGGVRSESTLALSEKEKIEKKVGLSSAGGNKEEKVIVSYWGIQPSKITKKDGTEWKWNCFRAWGTYKADLSIDLEKHMPPTTFLDKMAFWTVKVLRYPTDVFFQRRYGCRAMMLETVAAVPGMVAGMQLHCKSLRRFEHSGGWFKALLEEAENERMHLMTFMEVAKPKWYERALVITVQGVFFNAYFLGYLLSPKFAHRMVGYLEEEAIHSYTEFLKELDKGNIENVPAPAIAIDYWQLPPGSTLRDVVMVVRADEAHHRDVNHFASDIHYQGRELREAAAPIGYH

SEQ ID NO: 6353 - protein, 321 aa, Glycine max; identical to SEQ ID NO: 6352

SEQ ID NO: 6354 - protein, 321 aa, Glycine max
MMMMMSRSGANRVANTAMFVAKGLSGEVGGLRALYGGGVRSESTLALSEKEKIEKKVGLSSAGGNKEEKVIVSYWGIQPSKITKKDGTEWKWNCFSPWGTYKADLSIDLEKHMPPTTFLDKMAFWTVKVLRYPTDVFFQRRYGCRAMMLETVAAVPGMVAGMLLHCKSLRRFEHSGGWFKALLEEAENERMHLMTFMEVAWPKWYERALVITVQGVFFNAYFLGYLLSPKFAHRMFGYLEEEAIHSYTEFLKELDKGNIENVPAPAIAIDYWQLPPGSTLRDVVMVVRADEAHHRDVNHFASDIHYQGRELREAAAPIGYH

SEQ ID NO: 6355 - protein, 326 aa, Glycine max
MKNVLVRSAARALLGGGGRSYYRQLSTAAIVEQRHQHGGGAFGSFHLRRMSTLPEVKDQHSEEKKNEVNGTSNAVVTSYWGITRPKVRREDGTEWPWNCFMPWDSYHSDVSIDVTKHHTPKSLTDKVAFRAVKFLRVLSDIYFKERYGCHAMMLETIAAVPGMVGGMLLHLKSLRKFQHSGGWIKALLEEAENERMHLMTMVELVKPSWHERLLIFTAQGVFFNAFFVFYLLSPKAAHRFVGYLEEEAVISYTQHLNAIESGKVENVPAPAIAIDYWRLPKDATLKDVVTVIRADEAHHRDVNHFASDIHHQGKELKEAPAPIGYH

SEQ ID NO: 6356 - protein, 326 aa, Glycine max; identical to SEQ ID NO: 6355

SEQ ID NO: 6357 - protein, 152 aa, Glycine max
  unsure (1)..(152): unsure at all Xaa locations
XKFQHSGGWIKALXEESKNDRMHLMAMVELVKPSWPERLLIFPAQGVFFNALFVYGLLSPKAAHRFVGHLQEQSVISYTQHLNAIESGKVENALAPAMVMDSGRLPKDATVQDGVTVIRPDEAHHRDVNPCAFNIHQQGKGLKEAPAPIGYH

SEQ ID NO: 6358 - protein, 114 aa, Glycine max
  unsure (1)..(114): unsure at all Xaa locations
LLIFTAQGVVFDAFFVWDLLWPKSAHRFVGHPEEEAGISYTQHLNAIESGKVENVRAPAIAIDGWRLPKDATLKEEVTVICGGEAHHRDVNHFACDIHHQGKELKEAPAPIGYX

SEQ ID NO: 6359 - protein, 111 aa, Glycine max
  unsure (1)..(111): unsure at all Xaa locations
XIXAGQAVFVMAYAXLFYVLSXPRTAHRFVGYLEEEAVWTYTHRLHDMQQPGSLYNWNTEKAPETAVNYWSLNPNSTVRDMIVTIRADEMMHREVSHRFANLYEESKEFPL

SEQ ID NO: 6360 - protein, 160 aa, Glycine max
  unsure (1)..(160): unsure at all Xaa locations
XLSKLQHSGGWFKALFXPSXSHWMHMMKMVELVKPIWRDRLLIFTGQCVFFWAVLLFYLLCPEXAYXAAVGHGXGAAVCSGGPHLNACEXCGKVGGVAALASGIQDCRLPKGAPVKVVGPVFCGSQAHPRVVNHGAFDILHLGKXLKGLPAPCXINSPVL

SEQ ID NO: 6361 - protein, 40 aa, Glycine max
MTFMEVAKPKWYERALVITVQGVFFNAYFLGYLLSPKFAH

SEQ ID NO: 6362 - protein, 329 aa, Vigna unguiculata
MKFIALSCTVRRALLNGRNCNGLGSTAVMAYAAPETRFLCAGAANGGLFYWRRSMASQAEAKLPEKDKEKAEAEKSVVESSYWGISRPRIMREDGTEWPWNCFMPWETYHSNLSIDLTKHHVPKNFLDKVAYRTVKLLRIPTDLFFQRRYGCRAMMLETVAAVPGMVGGMLLHLRSLRKFQQSGGWIKALMEEAENERMHLMTMVELVKPKWYERLLVIAVQGVFFNAFFVLYILSPKVAHRIVGYLEEEAIHSYTEYLKDIESGAIENVPAPAIAIDYWRLPKDAKLKDVITVIRADEAHHRDVNHFASDIHFQGKELREAPAPIGYH

SEQ ID NO: 6363 - protein, 326 aa, Vigna unguiculata
MKHTLVRSAARALLGGGRSYYRHAPTAAIVEPTRQHGGGAFGSFYLRRMSTLPDIKDHNSEEKKNEVKDDNTNAVISSYWGISRPKVRREDGTEWPWNCFMPWDTYHSDVSIDVTKHHTPKSLTDKVAFRSVKFLRVLSDLYFKERYGCHAMMLETIAAVPGMVGGMLLHLKSLRKFQHSGGWIKALLEEAENERMHLMTMVELVQPKWHERLLIFTAQGVFFNAFFVFYLLSPKAAHRFVGYLEEEAVISYTQHLEAIESGKVENVPAPAIAIDYWRLPKDATLKDVVTVIRADEAHHRDVNHFASDIHHQGKELRDAPAPIGYH

SEQ ID NO: 6364 - protein, 335 aa, Oryza sativa (japonica cultivar-group)
MSSRMAGATLLRHLGPRLFAAEPVYSGLAASARGVMPAAARIFPARMASTSSAGADVKEGAAEKLPEPAATAAAAATDPQNKKAVVSYWGIQPPKLVKEDGTEWKWLSFRPWDTYTSDTSIDVTKHHEPKGLPDKLAYWTVRSLAVPRDLFFQRRHASHALLLETVAGVPGMVGGMLLHLRSLRRFEQSGGWIRALLEEAENERMHLMTFLEVMQPRWWERALVLAAQGVFFNAYFVGYLVSPKFAHRFVGYLEEEAVSSYTEYLKDLEAGKIENTPAPAIAIDYWRLPADATLKDVVTVIRADEAHHRDLNHFASDIQQQGMKLKDTPAPIGYH

SEQ ID NO: 6365 - protein, 361 aa, Botryotinia fuckeliana
MTTMYVSRVSTRPLSAQSAAQLSKAVAFFAQSYRLSSNACTAPTPSRRAFTSASKIQVKGRDLFPEPEHGQIKRTEPAWPHPPYTAEQMRSKVYFAHRKPRDFSDRVALGMVRFLRWCTDFATGYKHNVEAPKKASDSNALTATKPYQMSERKWLIRYVFLESVAGVPGMVAGMLRHLRSLRGLKRDNGWIETLLEEAYNERMHLLTFLKMYEPGIFMRTMILGAQGVFFNSFFLCYLFSPRTCHRFVGYLEEEAVLTYTLSIQDLENGHLPKWADPDFKAPDLAVEYWGMPEGNRSMRDLLYYIRADEAKHREVNHTLGNLKQDEDPNPFVSEYGKERGEKPGKGIESLKPVGWERDEVI

SEQ ID NO: 6366 - protein, 353 aa, Catharanthus roseus
MMSRGATRISRSLICQISPRYFSSAAVRGHEPSLGILTSGGTTTFLHGNPGNGSERTALTWIKLPMMRARSASTVATVDQKDKDEKREDKNGVADGENGNKAVVSYWGVEAPKLTKEDGTVWRWTCFRPWETYKPDTDIELKKHHVPVTLLDKVAFFTVKALRWPTDLFFQRRYGCRAMMLETVAAVPGMVGGMLLHCKSLRRFEHSGGWIKALLEEAENERMHLMTFMEVSKPRWYERALVFAVQGVFFNAYFLTYLASPKLAHRIVGYLEEEAIHSYSEFLNELDKGNIENVPAPAIAIDYWQMPPDSTLRDVVMVVRADEAHHRDVNHYASDIHYKGLELKEAAAPLDYH

SEQ ID NO: 6367 - protein, 353 aa, Catharanthus roseus
MMSRGATRISRSLICQISPRYFSSAAVRGHEPSLGILTSGGTTTFLHGNPGNGSERTALTWIKLPMMRARSASTVATVDQKDKDEKREDKNGVADGENGNKAVVSYWGVEAPKLTKEDGTVWRWTCFRPWETYKPDTDIELKKHHVPVTLLDKVAFFTVKALRWPTDLFFQRRYGCRAMMLETVAAVPGMVGGMLLHCKSLRRFEHSGGWIKALLEEAENERMHLMTFMEVSKPRWYERALVFAVQGVFFNAYFLTYLASPKLAHRIVGYLEEEAIHSYSEFLNELDKGNIENVPAPAIAIDYWQMPPDSTLRDVVMVVRADEALHRDVNHYASDIHYKGLELKEAAAPLDYH

SEQ ID NO: 6368 - protein, 318 aa, Lycopersicon esculentum
MNRNAAMKISGLLMRQLRGEFLPRGGMVQIRHWSNMNTSSKTKEEQKTHNQPSHTDATNAAGDKAKKIVSYWGVDPPKISKEDGTPWKWNSFRPWETYSADISIDVEKHHMPTNFMDKFAYWTVQSLKYPTYLFFQRRHMCHAMLLETVAAVPGMVGGMLLHCKSLRRFEHSGGWIKALLEEAENERMHLMTFIELSNPKWYERALVFAVQGVFVNAYFIAYLASPKLAHRIVGYLEEEAVNSYTEFLIDIEKGLFENSPAPAIAIDYWRLPADATLKDVVTVIRADEAHHRDLNHFASDIQCQGHELKGYPAPIGYH

SEQ ID NO: 6369 - protein, 358 aa, Lycopersicon esculentum
MMTRGATRMTRVVMGHMGPRYFSTTVLRNNPGTGVVGGVAAGLLHGLPANPSEKVAVTWVRHFSAMGSRSASTAALNDKQQEKESSDKKVENTATATAAVNGGVGKSVVSYWGVPPSKATKPDGTEWKWNCFRPWETYEADMSIDLTKHHAPVTFLDKFAYWTVKILRFPTDVFFQRRYGCRAMMLETVAAVPGMVGGMLLHCKSLRRFEQSGGWIKALLEEAENERMHLMTFMEVAKPNVYERALVFAVQGVFFNAYFAAYLISPKLAHRIVGYLEEEAVHSYTEFLKELDNGNIENVPAPAIAIDYWRLPKDATLRDVVLVVRADEAHHRDVNHYASDIHYQGQQLKDSPAPLGYH

SEQ ID NO: 6370 - protein, 353 aa, Nicotiana tabacum
MMTRGATRMTRTVLGHMGPRYFSTAIFRNDAGTGVMSGAAVFMHGVPANPSEKAVVTWVRHFPVMGSRSAMSMALNDKQHDKKAENGSAAATGGGDGGDEKSVVSYWGVQPSKVTKEDGTEWKWNCFRPWETYKADLSIDLTKHHAPTTFLDKFAYWTVKSLRYPTDIFFQRRYGCRAMMLETVAAVPGMVGGMLLHCKSLRRFEQSGGWIKTLLDEAENERMHLMTFMEVAKPNWYERALVFAVQGVFFNAYFVTYLLSPKLAHRIVGYLEEEAIHSYTEFLKELDKGNIENVPAPAIAIDYCRLPKDSTLLDVVLVVRADEAHHRDVNHFASDIHYQGQQLKDSPAPIGYH

SEQ ID NO: 6371 - protein, 297 aa, Nicotiana tabacum
MWVRHFPVMGPRSASTVALNDKQHDKKVENGGAAASGGGDGGDEKSVVSYWGVPPSKVTKEDGTEWKWNCFRPWETYKADLSIDLTKHHAPTTFLDKFAYWTVKALRYPTDIFFQRRYGCRAMMLETVAAVPGMVGGMLLHCKSLRRFEQSGGWIKALLEEAENERMHLMTFMEVAKPNWYERALVFAVQGVFINAYFVTYLLSPKLAHRIVGYLEEEAIHSYTEFLKELDKGNIENVPAPAIAIDYWRLPKDSTLRDVVLVVRADEAHHRDVNHFAPDIHYQGQQLKDSPAPIGYH

SEQ ID NO: 6372 - protein, 297 aa, Nicotiana tabacum
  unsure (1)..(297): unsure at all Xaa locations
MWVRHFPVMGPRSASTVALNDKQHDKKVENGGAAASGGGDGGDEKSVVSYWGVPPSKVTKEDGTEWKWNCFRPWETYKADLSIDLTKHHAPTTFLDKFAYWTVKALRYPTDIFFQRRYGCRAMMLETVAAVPGMVGGMLLHCKSLRRFEQSGGWIKALLEEAENERMHLMTFMEVAKPNWYERALVFAVQGVFINAYFVTYLLSPKLAXRIVGYLEEEAIHSYTEFLKELDKGNIENVPAPAIAIDYWRLPKDSTLRDVVLVVRADEAHHRDVNHFAPDIHYQGQQLKDSPAPIGYH

SEQ ID NO: 6373 - protein, 344 aa, Solanum tuberosum
MMSSRFAGTALRQLGPVLFASAPGARAAAEPAYALLAGAPAAAPTRAAVWLVRFPLSRAASTMSAPAAPEGETAAKGDVDVTKKAEGDTEQKAVVSYWGVPPSRVTKEDGSPWRWACFRPWEAYESDMSIDLKKHHAPTTFLDKMAFWTVKSLRWPTDIFFQRRYGCRAMMLETVAAVPGMVGGLLLHLKSLRRFEHSGGWIKALLEEAENERMHLMTFMEVSQPRWYERALVLAVQGVFFNAYFLGYLLSPKFAHRVVGYLEEEAIHSYTEFLKEIDKGTIDNVPAPAIALDYWRLPPGSTLRDVVMVVRADEAHHRDVNHFASDVHYQGHQLKEAPAPLGYH

SEQ ID NO: 6374 - protein, 349 aa, Sauromatum guttatum
MMSSRLVGTALCRQLSHVPVPQYLPALRPTADTASSLLHGCSAAAPAQRAGLWPPSWFSPPRHASTLSAPAQDGGKEKAAGTAGKVPPGEDGGAEKEAVVSYWAVPPSKVSKEDGSEWRWTCFRPWETYQADLSIDLHKHHVPTTILDKLALRTVKALRWPTDIFFQRRYACRAMMLETVAAVPGMVGGVLLHLKSLRRFEHSGGWIRALLEEAENERMHLMTFMEVAQPRWYERALVLAVQGVFFNAYFLGYLLSPKFAHRVVGYLEEEAIHSYTEFLKDIDSGAIQDCPAPAIALDYWRLPQGSTLRDVVTVVRADEAHHRDVNHFASDVHYQDLELKTTPAPLGYH

SEQ ID NO: 6375 - protein, 349 aa, Sauromatum guttatum
MISSRLAGTALCRQLSHVPVPQYLPALRPTADTASSLLHRCSAAAPAQRAGLWPPSWFSPPRHASTLSARAQDGGKEKAAGTAGKVPPGEDGGAEKEAVVSYWAVPPSKVSKEDGSEWRWTCFRPWETYQADLSIDLHKHHVPTTILDKLALRTVKALRWPTDIFFQRRYACRAMMLETVAAVPGMVGGVLLHLKSLRRFEHSGGWIRALLEEAENERMHLMTFMEVAQPRWYERALVLAVQGVFFNAYFLGYLLSPKFAHRVVGYLEEEAIHSYTEFLKDIDNGAIQDCPAPAIALDYWRLPQGSTLRDVVTVVRADEAHHRDVNHFASDVHYQDLELKTTPAPLGYH

SEQ ID NO: 6376 - protein, 337 aa, Dictyostelium discoideum
MFKYVTVLNKNNNLNKLLLNSISKGNTLNSNNGLASTSISINSSIRSFSSFSSSKVMLDKRSEKPQNPLYHRNSTLYSFTPRDVLIKIEKDFVMPPSYEAKSLSDNFAKFSVLFLRKFSNLFFKEKFLHYAIVLETVAAVPGLVAGMFLHLKTLRNMQSNNWIKILMDEMENERMHLLSFMELTKPTLLERGMVAVTQAIYWNLFLVFYVLSPKTAHRFTGYLEEQAVVTYTHMLEDIDSGKVPNYKAPQIAIEYWGLPEDATLRDLILVIRQDESDHRLVNHEISNKIVLNNNEPIILENHFHKPTIINPVGEEEIKEHSQEGIRIEKKINPTSEL

SEQ ID NO: 6377 - protein, 325 aa, Zea mays
MAGAALLRHLGPRLFAAEPVTGLAARGVMPAAARILPARMSSTAAEAAKEAAAPQQRQKPEAAAAAPEGQDKKAVVSYWGIEPRKLVKEDGTEWRWFCFRPWDTYRADTSIDMKKHHEPKALPDKLAYWLVKSLVVPKQLFFQRRHASHALLLETVAAVPGMVGGMLLHLRSLRRFEHSGGWIRALLEEAENERMHLMTFLEVAQPKWWERALVLAAQGVYFNAYFVAYLASPKFAHRFVGYLEEEAVHSYTEYLKDLEAGIIDNTPAPAIAIDYWRLPADARLKDVVAVVRADEAHHRDVNHFASDIHYQGMKLRDTPAPLGYH

SEQ ID NO: 6378 - protein, 333 aa, Zea mays
  unsure (1)..(333): unsure at all Xaa locations
MSSRMAGAALLRHLGPRLFAAGPAVSGLTARGGMPAAARLLPARMASTAAEAARXXDAGANKRHGGTEKHEEEAAGGQSKKAVVSYWGIDTPKLVKEDGTEWKWTSFRPWDAYTSDTSIDIGKHHAPTTLPDKAAYLIVKSLRVPMDLFFQRRHASHALLLETVAAVPGMVGGMLLHLRSLRRFEHSGGWIRALLEEAENERMHLMTFLEVTQPRWWERALVLTAQGVFFNAYFVGYLLSPKFAHRVVGYLEEEAVHSYTEYLKDLEAGIIDNTPAPAIAIDYWRLPADAKLKDVVTVVRADEAHHRDVNHFASDIHYQGMKLKDTPAPLSYH

SEQ ID NO: 6379 - protein, 332 aa, Zea mays
MSSRMAGAALLRHLGPRLFAAGPAVSGLTARGGMPAAARLLPARMASTAAEAAREDAGANKQHGGTEKHEEEAAGGQSKKAVVSYWGIDTPKLVKEDGTEWKWTSFRPWDAYTSDTSIDIGKHHAPTTLPDKAAYLIVKSLRVPMDLFFQRRHASHALLLETVAAVPGMVGGMLLHLRSLRRFEHSGGWIRALLEEAENERMHLMTFLEVTQPRWWERALVLTAQGVFFNAYFLGYLLSPKFAHRVVGYLEEEAVHSYTEYLKDLEAGIIDNTPAPAIAIDYWRLPADAKLKDVVTVVRADEAHHRDVNHFASDIHYQGMKLKDTPAPLSYH

SEQ ID NO: 6380 - protein, 333 aa, Zea mays
  unsure (1)..(333): unsure at all Xaa locations
MSSRMAGAALLRHLGPRLFAAGPAVSGLTARGGMSAATRLLPARMASTAAEAARXXDAGANKRHGGTEKHEEEAAGGQSKKAVVSYWGIDTPKLVKEDGTEWKWTSFRPWDAYTSDTSIDIGKHHAPTTLPDKAAYLIVKSLRVPMDLFFQRRHASHALLLETVAAVPGMVGGMLLHLRSLRRFEHSGGWIRALLEEAENERMHLMTFLEVTQPRWWERALVLTAQGVFFNAYFVGYLLSPKFAHRVVGYLEEEAVHSYTEYLKDLEAGIIDNTPAPAIAIDYWRLPADAKLKDVVTVVRADEAHHRDVNHFASDIHYQGMKLKDTPAPLSYH

SEQ ID NO: 6381 - protein, 351 aa, Populus tremula x Populus tremuloides
MMMASRGEGVKLASSMMLFSRSFSTAISRGIIAKEAVTAKAVECHGDVVRKNIGEFWVRGSVFGVRHGSTMSFGEKDQQKVEMKQTQSVAEGGDKEEKKEIASYWGVPPSRVTKEDGAEWKWNCFRPWETYSADLSIDLKKHHVPATFLDKMAYWMVKALRFPTDLFFQRRYGCRAMMLETVAAVPGMVGGMLLHCKSLRRFEHSGGWIKTLLDEAENERMHLMTFMEVAKPRWYERALVITVQGVFLNAYFLGYIISPKFAHRMVGYLEEEAIHSYTEFLKELDKGNIENVPAPAIAVDYWRLPPDATLRDVVLVVRADEAHHRDVNHFASDIHYQGRELKEAPAPIGYH

SEQ ID NO: 6382 - protein, 294 aa, Populus tremula x Populus tremuloides
MSSTRFASYGVRGWSASAPPVIPGEEEKPKAAANSFTTEDGKAIVSYWGVSPPKITKEDGTAWKWNCFRPWESYKPDISIDVKKHHKPGTTMDKFAYWTVQVLKYPTYLFFQRRHMCHAMLLETVAAVPGMVGGMLLHFKSLRRFEQSGGWIKALLEEAENERMHLMTFVEIAKPQWYERALVFAVQGVFFNAYFLAYLASPKLAHRIVGYLEEEAVNSYSEFLEDLDNCSFENVPAPAIAIDYWRLPPNSTLRDVVFVIRADEAHHRDLNHYASDIQCQGQELRYTPAPIGYH

SEQ ID NO: 6383 - protein, 229 aa, Novosphingobium aromaticivorans
MIPPFIDLSVHHKPGGLSDRIAFGFTKALRWCADTFFAERYGHRAVVLETVAAVPGMVGATINHLACLRRMCDDKGWIKTLMDEAENERMHLMTFIEISKPTLFERAVIMGVQWVFYLFFFGLYLVSPKTAHRVVGYFEEEAVISYTHYLAEIDQGRSANVPAPAIAKRYWGLPDNAMLRDVVLVVRADEAHHRDVNHGFANELAGLPVAEPAACPPHHALEPNWKKAA

SEQ ID NO: 6384 - protein, 357 aa, Pichia stipitis
MLSVQTTRAAKLQLGQLPLIAYTARSGRLHHQFYSTVAEKTANPTPNTSDKTNIFDIRTKVYDETDIRKHDDNQFITHPLFPHPTFSQEDCLKVGYEHRPPRTFGDKMAFRGIELVRGSFDFVTGYKKPKTQADIDSGFKGTRYEMTEGKWLTRCIFLESIAGVPGAVASFIRHLHSLRLLKRDKAWIETLLDEAFNERMHLLTFIKIGKPSWFTRTIIYVGQGVFCNLFFLFYLANPKYCHRFVGYLEEEAVSTYTHFVHELQSGKLPKFENIKIPTIAWQYWPELTENSSMLDLILRIRADEAKHREVNHTLANLDQRKDRNPFGLAIPDLKEPQPESGLKVTKPHGWEKEELKL

SEQ ID NO: 6385 - protein, 342 aa, Pichia anomala
MIKTYQYRSILNSRNVGIRFLKTLSPSPHSKDPNSKSIFDIGTKLIVNPPPQMADNQYVTHPLFPHPKYSDEDCEAVHFVHREPKTIGDKIADRGVKFCRASFDFVTGYKKPKDVNGMLKSWEGTRYEMTEEKWLTRCIFLESVAGVPGMVAAFIRHLHSLRLLKRDKAWIETLLDEAYNERMHLLTFIKIGNPSWFTRFIIYMGQGVFANLFFLVYLIKPRYCHRFVGYLEEEAVSTYTHLIKDIDSKRLPKFDDVNLPEISWLYWTDLNEKSTFRDLIQRIRADESKHREVNHTLANLEQKKDRNPFALKVEDVPKEQQPDEYSLKTPHPEGWNREQMRL

SEQ ID NO: 6386 - protein, 353 aa, Yarrowia lipolytica
MTVRDWANRGQTYVNARAPNLLGRFRSTDDEDENNPSTELATDTTSAYGSTAASVVTMANSKPDDVSLYATSSHHHEYFTGSAWIHPVYTKEQMDALEVNHRKTETFSDRVALRAILLMRIIFDLCTGYKHPKEGEAHLPKFRMTTRQWLDRFLFLESIAGVPGMVAGMIRHLHSLRALRRDRAWIESLVEEAYNERMHLLTFLKLQKPSVQMRTGLLIGQIIFYNLFFISYLISPATCHRFVGYLEEEAVITYTRCLEDIDAGRLPELASMEVPDIARTYWHMEDDCTMRDLIQYVRADEAKHCEVNHTFGNLHQTSDRNPFALVIDNGRPQPSKDLTTFRSVGWRRDEIAN

SEQ ID NO: 6387 - protein, 361 aa, Venturia inaequalis
MTLMFTSRTAVYCSNLTTQRSAVTILRTLSGTASNGIKSRSALTAYQQNPSLRTRNFHSTSVVQAKDFFPEPDTPHIKKTKTAWPHPIYTVEQMNQVAVAHRDTRNWSDKVALIAVKLLRWGLDTVSGYKHGKAQALHAQDPQEAQKRYGMTGKQYLVRNVFLESVAGVPGMVAGMLRHLHSMRRMKRDHGWIETLLEESYNERMHLLIFLKLYEPGWFMRLAVLGAQGVFFNAMFLSYLISPRTCHRFVGYLEEEAVVTYTRELADLEAGKLPEWETLAAPDIAVDYYNLPEGHRTMKDLLLHVRADEAKHREVNHTLGNLDQNSDPNPYASKYDNPNVPHPRKDIKYLKPSGWEREEVM

SEQ ID NO: 6388 - protein, 358 aa, Venturia inaequalis
  unsure (1)..(358): unsure at all Xaa locations
MYTSRTAVYCSNLTTQRSAVTILRTXSGTASNGIKSRSALTAYQQNPSLRTRNFHSTSVVQAKDFFPEPDTPHIXKTKTAWPHPIYTVEQMNQVAVAHRDTRNWSDKVALIAVKLLRWGLDTVSGYKHGKAQALHAQDPQEAQKRYGMTGKQYLVRNVFLXSVAGVPGMVAGMLRHLHSMRRMKRDHGWXETLLEESYNERMHLLIFLKLYEPGWFMRLAVLGAQGVFFNAMFLSYLISPRTCHRFVGYLEEEAVVTYTRELADLEAGKLPEWETLAAPDIAVDYYNLPEGHRTMKDLLLHVRADEAKHREVNHTLGNLDQNSDPNPYASKYDNPDVPHPRKDIKYLKPSGWEREEVM

SEQ ID NO: 6389 - protein, 356 aa, Ajellomyces capsulatus
MYPTSGCARVLMACPAPAMLRGPLLRPSTTAIRGLRGSPLLYHYAATSNSNMRYFSSTSRRWIKEFFAPPKETDHIVESVTTWKHPVFTEKQMKEIAIAHREAKNWSDWVALGTVRFLRWATDLATGYRHAAPGKQGVEVPEQFQMTERKWVIRFIFLETVAGVPGMVGGMLRHLRSLRRMKRDNGWIETLLEEAYNERMHLLSFLKLAQPGWFMRLMVLGAQGVFFNGFFISYLISPRTCHRFVGYLEEEAVMTYTHAIKDLESGKLPNWANQPAPDIAVAYWQMPEGKRTILDLLYYIRADEAKHREVNHTLANLKQGVDPNPYAAKYDNPEAPHPTKSAEIVKPTGWERDEVI

SEQ ID NO: 6390 - protein, 351 aa, Aspergillus niger
MNSLTATAPIRAAIPKSYMHIATRNYSGVIAMSGLRCSGSLVANRHQTAGKRFISTTPKSQIKEFFPPPTAPHVKEVETAWVHPVYTEEQMKQVAIAHRDAKNWADWVALGTVRMLRWGMDLVTGYRHPPPGREHEARFKMTEQKWLTRFIFLESVAGVPGMVGGMLRHLRSLRRMKRDNGWIETLLEEAYNERMHLLTFLKLAEPGWFMRLMVLGAQGVFFNGFFLSYLMSPRICHRFVGYLEEEAVITYTRAIKEIEAGSLPAWEKTEAPEIAVQYWKMPEGQRSMKDLLLYVRADEAKHREVNHTLGNLNQAIDPNPYAAKYKDPTKAHPNKGIADLKPTGWEREEVI

SEQ ID NO: 6391 - protein, 149 aa, Aspergillus fumigatus
VAGVPGMVGGMLRHLRSLRRMKRDNGWIETLLEEAYNERMHLLTFLKLAEPGWFMRLMVLGAQGVFFNGFFLSYLISPRTCHRFVGYLEEEAVITYTRAIKDIETGKLPDWEKLDAPEIAVQYWNMPEGQRKMRDLLLYVRADEAKHRE

SEQ ID NO: 6392 - protein, 375 aa, Neurospora crassa
MAHRLPDCSKLRLFNKGVSVGSSFFTPAPLVGYAALRHPRAISTSNTSKKPAVAIPTGPVSPLVPATHVGTSSASTSEVRDGNAFATLPLTWPHDGWKENVLLNVVPSHREPRTFGDWVAWKIVRTCRFWMDLVTGMRPEQQVDSKNPTTALAASKPLTERQWLVRFIFLESIAGVPGMVAGGLRHLQSIRRFQPDQGWIKSLLEESYNERMHLLTFLEMYKPGWFMRLVVLGAQGVFYNAMFISYLLSPKICHRFVGYLEEEAVHTYTRCLLELDHGCLKRWSDPNFRIPDIAVRYWNMPEGHRTMKDLILYVRADEASHRGVNHTFGNLDQVTDPNPFMECPGGGVVKAFPKHLSVTRPAGLEREEVVSKETH

SEQ ID NO: 6393 - protein, 362 aa, Neurospora crassa
MNTPKVNILHAPGQAAQLSRALISTCHTRPLLLAGSRVATSLHPTQTNLSSPSPRNFSTTSVTRLKDFFPAKETAYIRQTPPAWPHHGWTEEEMTSVVPEHRKPETVGDWLAWKLVRICRWATDIATGIRPEQQVDKHHPTTATSADKPLTEAQWLVRFIFLESIAGVPGMVAGMLRHLHSLRRLKRDNGWIETLLEESYNERMHLLTFMKMCEPGLLMKTLILGAQGVFFNAMFLSYLISPKITHRFVGYLEEEAVHTYTRCIREIEEGHLPKWSDEKFEIPEMAVRYWRMPEGKRTMKDLIHYIRADEAVHRGVNHTLSNLDQKEDPNPFVSDYKEGEGGRRPVNPALKPTGFERAEVIG

SEQ ID NO: 6394 - protein, 362 aa, Neurospora crassa
MNTPKVNILHAPGQAAQLSRALISTCHTRPLLLAGSRVATSLHPTQTNLSSPSPRNLSTTSVTRLKDFFPAKETAYIRQTPPAWPHHGWTEEEMTSVVPEHRKPETVGDWLAWKLVRICRWATDIATGIRPEQQVDKHHPTTATSADKPLTEAQWLVRFIFLESIAGVPGMVAGMLRHLHSLRRLKRDNGWIETLLEESYNERMHLLTFMKMCEPGLLMKTLILGAQGVFFNAMFLSYLISPKITHRFVGYLEEEAVHTYTRCIREIEEGHLPKWSDEKFEIPEMAVRYWRMPEGKRTMKDLIHYIRADEAVHRGVNHTLSNLDQKEDPNPFVSDYKEGEGGRRPVNPALKPTGFERAEVIG

SEQ ID NO: 6395 - protein, 363 aa, Podospora anserina
MISSKTSNRICLCSPQQTARITGIVVSSRPAYLTGLGYPVSLRLSSAVSQSSSQHTRSFSSTRAAHLKDFFPVKETAYIRKTPPAWPHHGYTEEEMLAVVPQHRKPGSLSDWLAWKLVRLCRWGTDIATGIKPEQQVDKSNPTTAVAAQKPLTEAQWLVRFIFLESIAGVPGMVAGMLRHLESLRRLKRDNGWIETLLEESYNERMHLLTFMKMCEPGWFMKTMILGAQGVFFNAMFLSYLISPRITHRFVGYLEEEAVHTYTRCIREIEQGDLPKWSDPNFQIPDLAVTYWKMPEGKRTMRDLILYIRADEAVHRGVNHTLSNLNHKEDPNPFVSDYKCDADHQRPNPALKPTGFERSEVIG

SEQ ID NO: 6396 - protein, 146 aa, Podospora anserina
GVPGMVAGMLRHLRSLRKMKRDNGWIETLLEEAFNERMHLLTFLKLAEPGWFMRVMVIGAQGVFFNGFFLSYLISPRICHRFVGYLEEEAVITYTRAIEELEAGNLPEWKDLDAPEIAVKYWQMPEGQRKMKDLLLFIRADEAKHR

SEQ ID NO: 6397 - protein, 365 aa, Candida albicans
MLTASLYKQLPVLTTTATSTYSFIRLSSTLATPPHSTTTTSPSSPAFHQPNHPQQFANPNTSVFDVSTRIYTQEGIDNNNDTKFLTKAPYPHPVFPQDECENVTVTHRETKTLGDKISFRSIQFMRQCFDLVTGYAVPKTNNPDEFKGTRWEMTEGKWLTRCIFLESVAGVPGSVAGFLRHLHSLRMLRRDKAWIETLLDEAYNERMHLLTFIKIGKPSWFTRSIIYVGQGVFTNVFFLLYLLNPRYCHRFVGYLEEEAVRTYSHLLDELAVPGKLPAFETMKIPEVAVQYWPELTPKSSFKDLILRIRADEAKHREVNHTFANLEQKTDRNPFALKIEGLNKPQPNHGINVMRPTGWEKQDLQL

SEQ ID NO: 6398 - protein, 379 aa, Candida albicans
MIGLSTYRNLPTLLTTTTVISTALRSKQLLRFTTTTSTKSRSSTSTAATTVGNSNPKSPIDEDNLEKPGTIPTKHKPFNIQTEVYNKAGIEANDDDKFLTKPTYRHEDFTEAGVYRVHVTHRPPRTIGDKISCYGTLFFRKCFDLVTGYAVPDPDKPDQYKGTRWEMTEEKWMTRCIFLESIAGVPGSVAGFVRHLHSLRMLTRDKAWIETLHDEAYNERMHLLTFIKIGKPSWFTRSIIYIGQGVFTNIFFLVYLMNPRYCHRFVGYLEEEAVRTYTHLIDELDDPNKLPDFQKLPIPNIAVQYWPELTPESSFKDLILRIRADEAKHREINHTFANLEQWQDRNPFALKIKDSDKPQPNYNLDVTRPQGWERKDLYL

SEQ ID NO: 6399 - protein, 329 aa, Trypanosoma brucei brucei
MFRNHASRITAAAAPWVLRTACRQKSDAKTPVWGHTQLNRLSFLETVPVVPLRVSDESSEDRPTWSLPDIENVAITHKKPNGLVDTLAYRSVRTCRWLFDTFSLYRFGSITESKVISRCLFLETVAGVPGMVGGMLRHLSSLRYMTRDKGWINTLLVEAENERMHLMTFIELRQPGLPLRVSIIITQAIMYLFLLVAYVISPRFVHRFVGYLEEEAVITYTGVMRAIDEGRLRPTKNDVPEVARVYWNLSKNATFRDLINVIRADEAEHRVVNHTFADMHEKRLQNSVNPFVVLKKNPEEMYSNQPSGKTRTDFGSEGAKTASNVNKHV

SEQ ID NO: 6400 - protein, 345 aa, Trypanosoma brucei brucei
MFRNHASRITAAAAPWVLRTACRQKSDAKTPVWGHTQLNRLSFLETVPVVPLRVSDESSEDRPTWSLPDIENVAITHKKPNGLVDTLAYRSVRTCRWLFDTFSLYRFGSITESKVISRCLFLETVAGVPGMVGGMLRHLSSLRYMTRDKGWINTLLVEAENERMHLMTFIELRQPGLPLRVSIIITQAIMYLFLLVAYVISPRFVHRFVGYLEEEAVITYTGVMRAIDEGSCPYQKCMFPKWLACTGTSAKMPHSATSSTCIRADEAEHRVVNHTFVTCTKNACKTVSTPSLYLKKNPEEMYSNQPSGKTRTDFASEGAKTASNVNKQRVRAGITFDGVPPFRVI

SEQ ID NO: 6401 - protein, 156 aa, Crocus sativus
NCNTTHYRANWVPGPPLEEAENERMHLMTFMEVSQPRWYERALVMTVQGSLLQCLLPRKPHLPKVCFIGVVGYLEEEAIHSYTEFLKELDKGSIENVPAPAIAIDYWRLSKSATLRDVVMVVRADEAHHRDVNHFASDIHCQGHELRVHPAPVGYH

SEQ ID NO: 6402 - protein, 345 aa, Oryza sativa (japonica cultivar-group)
MGSRAAGSVLLRHLCPRVSSSTSAAAHAHAQRPPLAGAGGGGVALWARLLSTSAAAAKEETAASKENTGSTAAAKAEATKAAKEGPASATASPVASSYWGIEASKLASKDGVEWKWSCFRPWETYSPDTTIDLKKHHEPKVLLDKVAYWTVKALRVPTDIFFQRRYGCRAMMLETVAAVPGMVGGMLLHLRSLRRFEHSGGWIRALLEEAENERMHLMTFMEVAKPRWYERALVLAVQGVFFNAYFLGYLLSPKLAHRVVGYLEEEAIHSYTEYLKDIEAGKIENVPAPPIAIDYWRLPAGATLKDVVVVVRADEAHHRDVNHFASDVHFQGMDLKDIPAPLDYH

SEQ ID NO: 6403 - protein, 332 aa, Oryza sativa (japonica cultivar-group)
MSSRMAGSAILRHVGGVRLFTASATSPAAAAAAAARPFLAGGEAVPGVWGLRLMSTSSVASTEAAAKAEAKKADAEKEVVVNSYWGIEQSKKLVREDGTEWKWSCFRPWETYTADTSIDLTKHHVPKTLLDKIAYWTVKSLRFPTDIFFQRRYGCRAMMLETVAAVPGMVGGMLLHLRSLRRFEQSGGWIRTLLEEAENERMHLMTFMEVANPKWYERALVITVQGVFFNAYFLGYLLSPKFAHRVVGYLEEEAIHSYTEFLKDLEAGKIDNVPAPAIAIDYWRLPANATLKDVVTVVRADEAHHRDVNHFASDIHYQGMELKQTPAPIGYH

SEQ ID NO: 6404 - protein, 335 aa, Oryza sativa; identical to SEQ ID NO: 6364

SEQ ID NO: 6405 - protein, 335 aa, Oryza sativa; identical to SEQ ID NO: 6364

SEQ ID NO: 6406 - protein, 335 aa, Oryza sativa; identical to SEQ ID NO: 6364

SEQ ID NO: 6407 - protein, 326 aa, Oryza sativa
  unsure (1)..(326): unsure at all Xaa locations
SVLLRHLCPRVSSSTSAAAHAHAQRPPLAGAGGGGVALWARLLSTSAAAAKEETAASKENTGSTAAAXXATASPVASSYWGIEASKLASKDGVEWKWSCFRPWETYSPDTTIDLKKHHEPKVLLDKVAYWTVKALRVPTDIFFQRRYGCRAMMLETVAAVPGMVGGMLLHLRSLRRFEHSGGWIRALLEEAENERMHLMTFMEVAKPRWYERALVLAVQGVFFNAYFLGYLLSPKLAHRVVGYLEEEAIHSYTEYLKDIEAGKIENVPAPPIAIDYWRLPAGATLKDVVVVVRADEAHHRDVNHFASDVHFQGMDLKDIPAPLDYH

SEQ ID NO: 6408 - protein, 345 aa, Oryza sativa; identical to SEQ ID NO: 6402

SEQ ID NO: 6409 - protein, 332 aa, Oryza sativa; identical to SEQ ID NO: 6403

SEQ ID NO: 6410 - protein, 362 aa, Oryza sativa
  unsure (1)..(362): unsure at all Xaa locations
NISFRTIASRIHFRGKNIKDFEILARXQVIDRSINGPASVAAAGRSPVAGLPKALPRPAISSLWMVGAAAPPRRFAGTAAVGGVDVXRADGDATAGEKEESEKEAASYWGVAPRRLVKEDGTPWDTYEADVAIDLTKHHNPATLGDKVARWTVKSLRWPVDLFFQRKYGCPAMMLETVAAAAGNVAGAVLHLRSLRRFQHSGGWIRALLEEAENERMHLMTFMEVSQPRWYERALVVAVQGAFFNAYLASYLLSPRFAHRIVGYLEEEAVHSYTEFLRDLDAGKIDDVPAPAIAIDYWRLPADATLRDVVMVVRADEAHHRDVNHYASXTLPSLPHLVLDDASCLAISKQNKKEKKFERILL

SEQ ID NO: 6411 - protein, 345 aa, Oryza sativa
  unsure (1)..(345): unsure at all Xaa locations
SIDRSMALVQSARRAAGPAAXACXFSTASVAAAGRSPVAGLPKALPRPAISSLWMVGAASAXAALPARRRLGGVRRDRADGDATAGEKEESEKEAASYWGVAPRRLVKEDGTVWKWSCFRPWDTYEADVAIDLTKHHNPATLGDKVARWTVKSLRWPVDLFFQRKYGCPAMMLETVAAAAGNVAGAVLHLRSLRRFQHSGGWIRALLEEAENERMHLMTFMEVSQPRWYERALVVAVQGAFFNAYLASYLLSPRFAHRIVGYLEEEAVHSYTEFLRDLDAGKIDDVPAPAIAIDYWRLPADATLREVVMVVRTDEAHHRDVNHYASDIHYQGHALREVAAPLGYH

SEQ ID NO: 6412 - protein, 158 aa, Oryza sativa
MKALGPFEVSGGWIRALLEEAENERMHLMTFMEVAKPRWYERTLVLAVQRVFFNAYFLGYLLSPKLAHRVVGYFPTELIRSGSYTEYLKDIEAGKIENVPAPPIAIDYWRLPAGATLKDVVVVVRADEAHHRDVNHFASDVHFQRMDLKDTPAPLDYH

SEQ ID NO: 6413 - protein, 210 aa, Oryza sativa
  unsure (1)..(210): unsure at all Xaa locations
MSSRMAGSAILRHVGGVRLFTASARPFLAGGEAVPGVWGLRLMSTSSVASTEAAAKAEAKKADAEKEVVVNSYWGIEQSKKLVREDGTEWKWSCFRPWETYTADTSIDLTKHHVPKTLLDKIAYWTVKSLRFPXDIFFXRRYGCRAMMLETVAGVPGMVGGMLLHLRSLRRFXQSGGWIRPLLEEAENERMHLMTFMEGANPKWYERALX

SEQ ID NO: 6414 - protein, 105 aa, Oryza sativa
  unsure (1)..(105): unsure at all Xaa locations
XXFPSRXXRTMMLETVAAVPATXGMVGGXMLLHLCSLRDIKHSDGWIRVLLEEAENERMHLMAFMAVPKRRWYERLIKNSLFPLFFPSLFKAHQASAHLNFPFLC

SEQ ID NO: 6415 - protein, 102 aa, Oryza sativa
  unsure (1)..(102): unsure at all Xaa locations
MMLETVAAVPATXGMVGGXMLLHLCSLRDIKHSDGWIRVLLEEAENERMHLMAFMAVPKRRWPTRHQPILIFLFFAAKESNYCTNKIQPKRKNQNIQLEIVX

SEQ ID NO: 6416 - protein, 329 aa, Triticum aestivum
  unsure (1)..(329): unsure at all Xaa locations
MSSRMAGSVLLRRAGAGAGRLFATTASPAARTALGGGEGAWVRMMSTSAASQVKDEAAKGVKAEAAKGDGEKKEVAISSYWGIEQSKKLVREDGXTEWKWSCFRPWETYTADTSIDLTKHHVPNTMLDKIAYYTVKSLRFPTDIFFQRRYGCRAMMLETVAAVPGMVGGMLLHLRSLRRFEQSGGWIRALLEEAENERMHLMTFMEVAQPRWYERALVIAVQGVFFNAYFFGYLISPKFAHRVVGYLEEEAVHSYTEFLKDLDDGKIDNVPAPAIAIDYWRLPANATLKDVVTVVRADEAHHRDVNHFASDVYYQGMQLKATPAPIGYH

SEQ ID NO: 6417 - protein, 293 aa, Triticum aestivum
CPPPRPRRSRTRRPRRSRRRRPKASQGGGRPRATGRRRRWRISSYWGIEQSKKLVREDGTEWKWSCFRPWETYTADTSIDPTKHHVPNTMLDKIAYYTVKSLRFPTDIFFQRRYGCRAMMLETVAAVPGMVGGMLLHLRSLRRFEQSGGWIRALLEEAENERMHLMTFMEVAQPRWYERALVIAVQGVFFNAYFFGYLISPKFAHRVVGYLEEEAVHSYTEFLKDLDDGKIDNVPAPAIAIDYWRLPANATLKDVVTVVRADEAHHRDVNHFASDVYYQGMQLKATPAPIGYH

SEQ ID NO: 6418 - protein, 274 aa, Triticum aestivum
RRPKASQGGGRPRATGRRRRWRISSYWGIEQSKKLVREDGTEWKWSCFRPWETYTADTSIDPTKHHVPNTMLDKIAYYTVKSLRFPTDIFFQRRYGCRAMMLETVAAVPGMVGGMLLHLRSLRRFEQSGGWIRALLEEAENERMHLMTFMEVAQPRWYERALVIAVQGVFFNAYFFGYLISPKFAHRVVGYLEEEAVHSYTEFLKDLDDGKIDNVPAPAIAIDYWRLPANATLKDVVTVVRADEAHHRDVNHFASDVYYQGMQLKATPAPIGYH

SEQ ID NO: 6419 - protein, 328 aa, Triticum aestivum
MSSRMAGSVLLRRAGAGAGRLFATTASPAARTALGGGGGAWVRMMSTSAASQVKDEAAKGVKAEAAKGDGEKKEVAISSYWGIDQSKKLVREDGTEWKWSCFRPWETYTADTSIDLTKHHVPNTMLDKIAYYTVKSLRFPTDIFFQRRYGCRAMMLETVAAVPGMVGGMLLHLRSLRRFEQSGGWIRALLEEAENERMHLMTFMEVAQPRWYERALVIAVQGVFFNAYFFGYLISPKFAHRVVGYLEEEAVHSYTEFLKDLDDGKIDNVPAPAIAIDYWRLPANATLKDVVTVVRADEAHHRDVNHFASDVYYQGMQLKATPAPIGYH

SEQ ID NO: 6420 - protein, 347 aa, Triticum aestivum
MSSRVAGSVLLRHLGPRVFGPTTPAAQRPLLAGGEGGAVAVAMWARPLSTSAAEAAREEATASKDNVASTAAATAEAMQAAKAGAVQAAKEGKSPAASSYWGIVPAKLVNKDGAEWKWSCFRPWEAYTSDTTIDLSKHHKPKVLLDKIAYWTVKSLRVPTDIFFQRRYGCRAMMLETVAAVPGMVDGMLLHLRSLRRFEQSGGWIRALLEEAENERMHLMTFMEVANPKWYERALVLAVQGVFFNAYFLGYIVSPKFAHRVVGYLEEEAIHSYTEFLRDLEAGRIENVPAPRIAIDYWRLPADARLKDVVTVVRADEAHHRDVNHFAADIHFQGLELNKTPAPLGYH

SEQ ID NO: 6421 - protein, 347 aa, Triticum aestivum; identical to SEQ ID NO: 6420

SEQ ID NO: 6422 - protein, 191 aa, Triticum aestivum
RAGSDLFFPRRHASHALLLETVAAVPPMVGGVLLHLRSLRRFEHSGGWIRALMEEAENERMHLMTFMEVTQPLWWERALVLATQGVFFNAYFVGYLVSPKFAHRFVGYLEEEAVHSYTEYLKDLEAGLIENTPAPAIAIDYWRLPADARLKDVVTAVRADEAHHRDANHYASDIHYQGMTLNQTPAPLGYH

SEQ ID NO: 6423 - protein, 191 aa, Triticum aestivum
RAGSDLFFQRRHASHALLLETVAAVPPMVGGVLLHLRSLRRFEHSGGWIRALMEEAENERMHLMTFMEVTQPLWWERALVLATQGVFFNAYFVGYLISPKFAHRFVGYLEEEAVHSYTEYLKDLEAGLIENTPAPAIAIDYWRLPADARLKDVVIAVRPDEAHHRDANHYASDIHYQGMTLNQTPAPLGYH

SEQ ID NO: 6424 - protein, 131 aa, Triticum aestivum
  unsure (1)..(131): unsure at all Xaa locations
XRPGLVMEVTQPLWWERALVLATQGVFFNAYFVGYLISPKFAHRFVGYLEEEAVHSYTEYLKDLEAGLIENTPAPAIAIDYWRLPADARLKDVVIAVRADEAHHRDANHYASDIHYQGMTLNQTPAPLGYH

SEQ ID NO: 6425 - protein, 245 aa, Triticum aestivum
  unsure (1)..(245): unsure at all Xaa locations
MSSRMAGATLLRHLGPRLFAAAEPASGLAASARGIMPAAARIFPARMASTEAAGPRAKQEEATEKPQGATTPEQNKKAVVSYWGIEPRKLVKDDGTEWPWFSFRPWDTYRPDTSIDVAKHHEPRAVADKVAYLIVRTLRKGSDLFFQRRHASHALLLETVAAVPPMVGGVLLHLRSLRRFEHSGGWIRALMEEGENERMHLMTFREVTHPLGWERALVLATHGVFFNAYFVGYLISPKXAHRFVX

SEQ ID NO: 6426 - protein, 277 aa, Triticum aestivum
  unsure (1)..(277): unsure at all Xaa locations
RPGRASVSYQINTNSKQKSFPSPPTKTDFPFDPLTSFSIGLVVQQSTANSSRMAGATLLRHLGPRLFAAAEPASGLAASARGIMPAAARIFPARMASTEAAAPHAKQXXDDAASPQAAATPEQQNKKPVVSYWGIEPRKLVKDDGTEWPWFCFRPWDTYRPDTSIDVTKHHLPKALADKVAYFVVRSLRVPRDLFFQRRHASHALLLETVAAVPPMVGGVLLHLRSLRRFEHSGGWIRALMEEGENERMHLMTFMEVTQPXRWWERALVLAAQGVFF

SEQ ID NO: 6427 - protein, 123 aa, Triticum aestivum
  unsure (1)..(123): unsure at all Xaa locations
XSQPRWWERALVLVVQGVCFNAYFLGCLISPKLAHRCPWYPEEEAVESYTEYLKDLRASLIENTTGPVIGVDYWRLLDDARLKDVVTAVRADEAHHRDANHYASDIHYQGMTLNQTPAPFGYY

SEQ ID NO: 6428 - protein, 208 aa, Triticum aestivum
  unsure (1)..(208): unsure at all Xaa locations
MSSRMAGATLLRHLGPRLFAAAEPASGLAASARGIMPAAARIFPARMASTEAAAPHAKQEDDAGTPQAAATXXEQQSKKAVVSYWGIEPRKLVKEDGTEWPWFCFRPWDTYRPDTSIDVTKHHEPKALADKVAYFVVRSLRVPRDLFFXQRRHASHAXLLLETVAAVPPMVGDVLLHLRSLRRFQHSGGWNRALMEEAENESMHLMTX

SEQ ID NO: 6429 - protein, 344 aa, Zea mays
  unsure (1)..(344): unsure at all Xaa locations
MSTRTAGSALLRHLGPRVFGPIFSPAVAPPRPLPLAGGGGGGALVWVRLLSTSAAEAKEEVAASKGNSGSTAAAKAEAAEAAKEGDGKXXDKVVSSYWGVAPSKLMNKDGAEWRWSCFRPWEAYKPDTTIDLNRHHEPKVLIDKIAYWTVKLLRVPTDIFFQRRYGCRAMMLETVAAVPGMVGGMLLHLRSLRRFEHSGGWIRTLLEEAENERMHLMTFMEVAKPKWYERALVLAVQGVFFNAYFLGYLISPKFAHRVVGYLEEEAIHSYTEYLKDLEAGKIENVPAPAIAIDYWQLPADATLKDVVVVVRSDEAHHRDVNHFASDIHFQGMQLKETPAPIEYH

SEQ ID NO: 6430 - protein, 326 aa, Zea mays
MMSSRAGSILLRHAGSRLFTAAAISPAAASRPLLAGGNGVPAVMLRLMSTSSPAAPTEAKDEAAKASKVEKAVVINSYWGIEQNNKLARDDGTEWKWTCFRPWETYTADTSIDLTRHHEPKTLMDKVAYWTVKSLRFPTDIFFQRRYGCRAMMLETVAAVPGMVGGMLLHLRSLRRFEQSGGWIRALLEEAENERMHLMTFMEVAKPRWYERALVITVQGVFFNAYFLGYLLSPKFAHRVVGYLEEEAIHSYTEYLKDLEAGKIENVPAPAIAIDYWRLPANATLKDVVTVVRADEAHHRDVNHFASDIHCQGMQLKQSPAPIGYH

SEQ ID NO: 6431 - protein, 329 aa, Zea mays
MMSSRAGSILLRHAGSRLFTAAAISPAAASRPLLAGGNGVPAVMLRLMSTSSPAAPTEAKDEAAKASKVGGDKKAVVINSYWGIEQNNKLARDDGTEWKWTCFRPWETYTADTSIDLTRHHEPKTLMDKVAYWTVKSLRFPTDIFFQRRYGCRAMMLETVAAVPGMVGGMLLHLRSLRRFEQSGGWIRALLEEAENERMHLMTFMEVAKPRWYERALVITVQGVFFNAYFLGYLLSPKFAHRVVGYLEEEAIHSYTEYLKDLEAGKIENVPAPAIAIDYWRLPANATLKDVVTVVRADEAHHRDVNHFASDIHCQGMQLKQSPAPIGYH

SEQ ID NO: 6432 - protein, 329 aa, Zea mays; identical to SEQ ID NO: 6431

SEQ ID NO: 6433 - protein, 346 aa, Zea mays
  unsure (1)..(346): unsure at all Xaa locations
MSTRAAGSALLRHLGPRVFGPVFSPAVAPPRPLPLAGGGGGGALVWVRVRLLSTSAAEAKEEVAASKGNSGSTAAAKAEAVEAAKEGDGKXXDKVVSSYWGVAPSKLMNKDGAEWRWSCFRPWEAYKPDTTIDLNRHHEPKVLLDKIAYWTVKLLRVPTDIFFQRRYGCRAMMLETVAAVPGMVGGMLLHLRSLRRFEHSGGWIRALLEEAENERMHLMTFMEVAKPKWYERALVLAVQGVFFNAYFLGYLISPKFAHRVVGYLEEEAIHSYTEYLKDLEAGKIENVPAPAIAIDYWQLPADATLKDVVVVVRSDEAHHRDVNHFASDIHFQGMQLKETPAPIEYH

SEQ ID NO: 6434 - protein, 347 aa, Zea mays
MSTRAAGSALLRHLGPRVFGPVFSPAVAPPRPLLALAGGGERGGALVWVRVRLLSTSAAEAKEEVAASKGNSGSTAAAKAEAVEAAKEGDGKRDKVVSSYWGVAPSKLMNKDGAEWRWSCFRPWEAYKPDTTIDLNRHHEPKVLLDKIAYWTVKLLRVPTDIFFQRRYGCRAMMLETVAAVPGMVGGMLLHLRSLRRFEHSGGWIRALLEEAENERMHLMTFMEVAKPKWYERALVLAVQGVFFNAYFLGYLISPKFAHRVVGYLEEEAIHSYTEYLKDLEAGKIENVPAPAIAIDYWQLPADATLKDVVVVVRSDEAHHRDVNHFASDIHFQGMQLKETPAPIEYH

SEQ ID NO: 6435 - protein, 221 aa, Zea mays
  unsure (1)..(221): unsure at all Xaa locations
IFPGTPVSRLEXXRGRVTLLKNWIFPEYYFANMTSXLSQRRYGCRAMMLETVAAVPGMVGGMLLHLRSLRRFEHSGGWIRALLEEAENERMHLMTFMEVAKPKWYERALVLAVQGVFFNAYFLGYLISPKFAHRVVGYLEEEAIHSYTEYLKDLEAGKIENIPAPAIAIDYWQLPADATLKDVVVVVRSDEAHHRDVNHFASDIHFQGMQLKETPAPIEYH

SEQ ID NO: 6436 - protein, 149 aa, Zea mays
AMMLETVAAVPGMVGGMLLHLRSLRRFEQSGGWIRALLEEAENERMHLMTFMEVAKPRWYERALVITVQGVFFNAYFLGYLLSPKFAHRVVGYLEEEAIHSYTEYLKDLEAGKIEKRPAPAIAIDYWRLPANATLKDVVTVVRADEAHH

SEQ ID NO: 6437 - protein, 254 aa, Zea mays
  unsure (1)..(254): unsure at all Xaa locations
APVRRRATAVLHLHCPRSAATPHANQESGAEKPESASTPEQSKRAVVSYWGIEPRKLVKDDGTEWPWFCFRPWDTYRPDTSIDVTKHHEPKALADKVAYFVVRSLRVPRDLFFQRRHASHALLLETVAAVPPMVGGVLLHLRSLRRFEHSGGWIRALMEEAENERMHLMTFMEVTQPLWYERALVIAVQGVFFNAYFFGYLISPKFAHRVVXYXLEEEAVHSYTEFLKDLDDGKIDXVPASXIAIDYWRLPANA

SEQ ID NO: 6438 - protein, 254 aa, Zea mays
  unsure (1)..(254): unsure at all Xaa locations
MSTRAAGSALLRHLGPRVFGPVFSPAVAPPRPLPLAGGGGGGALVWVRVRLLSTSAAEAKEEVAASKGNSGSTAAAKAEAVEAAKEGDGKXXDKVVSSYWGVAPSKLMNKDGAEWRWSCFRPWEAYKPDTTIDLNRHHEPKVLLDKIAYWTVKLLRVPTDIFFQRRYGCRAMMLETVAAVPGMVGGMLLHLRSLRRFEHSGGWIRTLLEEAENERMHLMTFMEVAKPKWYERALVLAVQGVFFNGYFLGXLISP

SEQ ID NO: 6439 - protein, 94 aa, Zea mays
  unsure (1)..(94): unsure at all Xaa locations
XPKFAHRVVGYLEEEAVHSYTEYLKDLEAGIIDNTPAPAIAIDYWRLPADAKLKDVVTVVRADEAHHRDVNHFASDIHYQGMKLKDTPAPLSYH

SEQ ID NO: 6440 - protein, 96 aa, Zea mays
  unsure (1)..(96): unsure at all Xaa locations
FLKVAEPKWYQRALVLAVQGVFPKADCLGYLISPKFAHRVVGDLEEEAIPSYTEYPKDLQAGKIENVPAPAIAIDLVGSPEKTLYPTVTSKFFFSX

SEQ ID NO: 6441 - protein, 525 aa, Mus musculus
MDLAVGPGAAGPSNVPAFLTKLWTLVSDPDTDALICWSPSGNSFHVFDQGQFAKEVLPKYFKHNNMASFVRQLNMYGFRKVVHIEQGGLVKPERDDTEFQHPCFLRGQEQLLENIKRKVTSVSTLKSEDIKIRQDSVTRLLTDVQLMKGKQECMDSKLLAMKHENEALWREVASLRQKHAQQQKVVNKLIQFLISLVQSNRILGVKRKIPLMLSDSNSAHSVPKYGRQYSLEHVHGPGPYSAPSPAYSSSSLYSSDAVTSSGPIISDITELAPTSPLASPGRSIDERPLSSSTLVRVKQEPPSPPHSPRVLEASPGRPSSMDTPLSPTAFIDSILRESEPTPAASNTAPMDTTGAQAPALPTPSTPEKCLSVACLDKNELSDHLDAMDSNLDNLQTMLTSHGFSVDTSALLDLFSPSVTMPDMSLPDLDSSLASIQELLSPQEPPRPIEAENSNPDSGKQLVHYTAQPLFLLDPDAVDTGSSELPVLFELGESSYFSEGDDYTDDPTISLLTGTEPHKAKDPTVS

SEQ ID NO: 6442 - protein, 517 aa, Mus musculus
MKQSSNVPAFLSKLWTLVEETHTNEFITWSQNGQSFLVLDEQRFAKEILPKYFKHNNMASFVRQLNMYGFRKVVHIESGIIKQERDGPVEFQHPYFKQGQDDLLENIKRKVSSSKPEENKIRQEDLTKIISSAQKVQIKQETIESRLSELKSENESLWKEVSELRAKHAQQQQVIRKIVQFIVTLVQNNQLVSLKRKRPLLLNTNGAPKKNLYQHIVKEPTDNHHHKVPHSRTEGLKSRERISDDIIIYDVTDDNVDEENIPVIPETNEDVVVDSSNQYPDIVIVEDDNEDEYAPVIQSGEQSEPAREPLRVGSAGSSSPLMSSAVQLNGSSSLTSEDPVTMMDSILNDNINLLGKVELLDYLDSIDCSLEDFQAMLSGRQFSIDPDLLVDSENKGLEATKSSVVQHVSEEGRKSKSKPDKQLIQYTAFPLLAFLDGNSASAIEQGSTTASSEVVPSVDKPIEVDELLDSSLDPEPTQSKLVRLEPLTEAEASEATLFYLCELAPAPLDSDMPLLDS

SEQ ID NO: 6443 - protein, 503 aa, Mus musculus
MDLAVGPGAAGPSNVPAFLTKLWTLVSDPDTDALICWSPSGNSFHVFDQGQFAKEVLPKYFKHNNMASFVRQLNMYGFRKVVHIEQGGLVKPERDDTEFQHPCFLRGQEQLLENIKRKVTSVSTLKSEDIKIRQDSVTRLLTDVQLMKGKQECMDSKLLAMKHENEALWREVASLRQKHAQQQKVVNKLIQFLISLVQSNRILGVKRKIPLMLSDSNSAHSVPKYGRQYSLEHVHGPGPYSAPSPAYSSSSLYSSDAVTSSGPIISDITELAPTSPLASPGRSIDERPLSSSTLVRVKQEPPSPPHSPRVLEASPGRPSSMDTPLSPTAFIDSILRESEPTPAASNTAPMDTTGAQAPALPTPSTPEKCLSVACLDKNELSDHLDAMDSNLDNLQTMLTSHGFSVDTSALLDIQELLSPQEPPRPIEAENSNPDSGKQLVHYTAQPLFLLDPDAVDTGSSELPVLFELGESSYFSEGDDYTDDPTISLLTGTEPHKAKDPTVS

SEQ ID NO: 6444 - protein, 535 aa, Mus musculus
MKQSSNVPAFLSKLWTLVEETHTNEFITWSQNGQSFLVLDEQRFAKEILPKYFKHNNMASFVRQLNMYGFRKVVHIESGIIKQERDGPVEFQHPYFKQGQDDLLENIKRKVSSSKPEENKIRQEDLTKIISSAQKVQIKQETIESRLSELKSENESLWKEVSELRAKHAQQQQVIRKIVQFIVTLVQNNQLVSLKRKRPLLLNTNGAPKKNLYQHIVKEPTDNHHHKVPHSRTEGLKSRERISDDIIIYDVTDDNVDEENIPVIPETNEDVVVDSSNQYPDIVIVEDDNEDEYAPVIQSGEQSEPAREPLRVGSAGSSSPLMSSAVQLNGSSSLTSEDPVTMMDSILNDNINLLGKVELLDYLDSIDCSLEDFQAMLSGRQFSIDPDLLVDLFTSSVQMNPTDNIKYTKSENKGLEATKSSVVQHVSEEGRKSKSKPDKQLIQYTAFPLLAFLDGNSASAIEQGSTTASSEVVPSVDKPIEVDELLDSSLDPEPTQSKLVRLEPLTEAEASEATLFYLCELAPAPLDSDMPLLDS

SEQ ID NO: 6445 - protein, 517 aa, Mus musculus
MKQSSNVPAFLSKLWTLVEETHTNEFITWSQNGQSFLVLDEQRFAKEILPKYFKHNNMASFVRQLNMYGFRKVVHIESGIIKQERDGPVEFQHPYFKQGQDDLLENIKRKVSSSKPEENKIRQEDLTKIISSAQKVQIKQETIESRLSELKSENESLWKEVSELRAKHAQQQQVIRKIVQFIVTLVQNNQLVSLKRKRPLLLNTNGAPKKNLYQHIVKEPTDNHHHKVPHSRTEGLKSRERISDDIIIYDVTDDNVDEENIPVIPETNEDVVVDSSNQYPDIVIVEDDNEDEYAPVIQSGEQSEPAREPLRVGSAGSSSPLMSSAVQLNGSSNLTSDDPVTMMDSILNDNINLLGKVELLDYLDSIDCSLEDFQAMLSGRQFSIDPDLLVDSENKGLEATKSSVVQHVSEEGRKSKSKPDKQLIQYTAFPLLAFLDGNSASAIEQGSTTASSEVVPSVDKPIEVDELLDSSLDPEPTQSKLVRLEPLTEAEASEATLFYLCELAPAPLDSDMPLLDS

SEQ ID NO: 6446 - protein, 517 aa, Mus musculus
MKQSSNVPAFLSKLWTLVEETHTNEFITWSQNGQSFLVLDEQRFAKEVLPKYFKHNNMASFVRQLNMYGFRKVVHIESGIIKQERDGPVEFQHPYFKQGQDDLLENIKRKVSSSKPEENKIRQEDLTKIISSAQKVQIKQETIESRLSELKSENESLWKEVSELRAKHAQQQQVIRKIVQFIVTLVQNNQLVSLKRKRPLLLNTNGAPKKNLYQHIVKEPTDNHHHKVPHSRTEGLKSRERISDDIIIYDVTDDNVDEENIPVIPETNEDVVVDSSNQYPEIVIVEDDNEDEYAPVIQSGEQSEPAREPLRVGSAGSSSPLMSSAVQLNGSSSLTSEDPVTMMDSILNDNINLLGKVELLDYLDSIDCSLEDFQAMLSGRQFSIDPDLLVDSENKGLEATKSSVVQHVSEEGRKSKSKPDKQLIQYTAFPLLAFLDGNSASAIEQGSTTASSEVVPSVDKPIEVDELLDSSLDPEPTQSKLVRLEPLTEAEASEATLFYLCELAPAPLDSDMPLLDS

SEQ ID NO: 6447 - protein, 492 aa, Mus musculus
MQEAPAALPTEPGPSPVPAFLGKLWALVGDPGTDHLIRWSPSGTSFLVSDQSRFAKEVLPQYFKHSNMASFVRQLNMYGFRKVVSIEQGGLLRPERDHVEFQHPSFVRGREQLLERVRRKVPALRGDDSRWRPEDLSRLLGEVQALRGVQESTEARLQELRQQNEILWREVVTLRQSHSQQHRVIGKLIQCLFGPLQTGPSSTGAKRKLSLMLDEGSACSASAKFNACPVSGALLQDPYFIQSPLPETTLGLSPHRARGPIISDIPEDSPSPEGHRLSPSGGCRRVKGLALLKEEPASPGGDGEAGLALAPNECDFCVTAPPPLPVAVVQAILEGKGSYSPEGPRSVQQPEPRGPREVPDRGTLGLDRGNRSPESLLPPMLLRPAPETLEPVAPVDVLGPSLHGREWTLMDLDMELSLMQPLAPETDEAELTVKELNSSGVGKDHTLGTPLMLDVQADLEGAALSVPGALTLYNVTESNASYLDPGASPSSP

SEQ ID NO: 6448 - protein, 492 aa, Mus musculus
MQEAPAALPTEPGPSPVPAFLGKLWALVGDPGTDHLIRWSPSGTSFLVSDQSRFAKEVLPQYFKHSNMASFVRQLNMYGFRKVVSIEQGGLLRPERDHVEFQHPSFVRGREQLLERVRRKVPALRGDDSRWRPEDLSRLLGEVQALRGVQESTEARLQELRQQNEILWREVVTLRQSHSQQHRVIGKLIQCLFGPLQTGPSSTGAKRKLSLMLDKGSACSASAKFNACPVSGALLQDPYFIQSPLPETTLGLSPHRARGPIISDIPEDSPSPEGHRLSPSGGCRRVKGLALLKEEPASPGGDGEAGLALAPNECDFCVTAPPPLPVAVVQAILEGKGSYSPEGPRSVQQPEPRGPREVPDRGTLGLDRGNRSPESLLPPMLLRPAPETLEPVAPVDVLGPSLHGREWTLMDLDMELSLMQPLAPETDEAELTVKELNSSGVGKDHTLGTPLMLDVQADLEGAALSVPGALTLYNVTESNASYLDPGASPSSP

SEQ ID NO: 6449 - protein, 462 aa, Mus musculus
MQEAPAALPTEPGPSPVPAFLGKLWALVGDPGTDHLIRWSPSGTSFLVSDQSRFAKEVLPQYFKHSNMASFVRQLNMYGFRKVVSIEQGGLLRPERDHVEFQHPSFVRGREQLLERVRRKVPALRGDDSRWRPEDLSRLLGEVQALRGVQESTEARLQELRQQNEILWREVVTLRQSHSQQHRVIGKLIQCLFGPLQTGPSSTGAKRKLSLMLDEGSACSASAKFNACPVSGALLQDPYFIQSPSPCSPSQRPRWASALTGPEGPSSLTSQKILHLLKDTGFLPPVVAGAPPPLPVAVVQAILEGKGSYSPEGPRSVQQPEPRGPREVPDRGTLGLDRGNRSPESLLPPMLLRPAPETLEPVAPVDVLGPSLHGREWTLMDLDMELSLMQPLAPETDEAELTVKELNSSGVGKDHTLGTPLMLDVQADLEGAALSVPGALTLYNVTESNASYLDPGASPSSP

SEQ ID NO: 6450 - protein, 492 aa, Mus musculus
  unsure (1)..(492): unsure at all Xaa locations
MQEAPAALPTEPGPSPVPAFLGKLWALVGDPGTDHLIRWSPSGTSFLVSDQSRFAKEVLPQYFKHSNMASFVRQLNMYGFRKVVSIEQGGLLRPERDHVEFQHPSFVRGREQLLERVRRKVPALRGDDSRWRPEDLSRLLGEVQALRGVQESTEARLQELRQQNEILWREVVTLRQSHSQQHRVIGKLIQCLFGPLQTGPSSTGAKRKLSLMLDEGSACSASAKFNACPVSGALLQDPYFIQSPLPETTLGLSPHRARGPIISDIPEDSPSPEGHGLSPSGGCRRVKGLALLKEEPASPGGDGEAGLALAPNECDFCVTAPPPLPVAVVQAILEGKGSYSPEGPRSVQQPEPRGPREVPDRGXLGXDRGNRSPESLLPPMLLRPAPETLEPVAPVDVLGPSLHGREWTLMDLDMELSLMQPLAPETDEAELTVKELNSSGVGKDHTLGTPLMLDVQADLEGAALSVPGALTLYNVTESNASYLDPGASPSSP

SEQ ID NO: 6451 - protein, 486 aa, Mus musculus
SGNSFHVFDQGQFAKEVLPKYFKHNNMASFVRQLNMYGFRKVVHIEQGGLVKPERDDTEFQHPCFLRGQEQLLENIKRKVTSVSTLKSEDIKIRQDSVTRLLTDVQLMKGKQECMDSKLLAMKHENEALWREVASLRQKHAQQQKVVNKLIQFLISLVQSNRILGVKRKIPLMLSDSNSAHSVPKYGRQYSLEHVHGPGPYSAPSPAYSSSSLYSSDAVTSSGPIISDITELAPTSPLASPGRSIDERPLSSSTLVRVKQEPPSPPHSPRVLEASPGRPSSMDTPLSPTAFIDSILRESEPTPAASNTAPMDTTGAQAPALPTPSTPEKCLSVACLDKNELSDHLDAMDSNLDNLQTMLTSHGFSVDTSALLDLFSPSVTMPDMSLPDLDSSLASIQELLSPQEPPRPIEAENSNPDSGKQLVHYTAQPLFLLDPDAVDTGSSELPVLFELGESSYFSEGDDYTDDPTISLLTGTEPHKAKDPTVS

SEQ ID NO: 6452 - protein, 513 aa, Rattus norvegicus
MKQSSNVPAFLSKLWTLVEETHTNEFITWSQNGQSFLVLDEQRFAKEILPKYFKHNNMASFVRQLNMYGFRKVVHIESGIVKQERDGPVEFQHPHFKQGQDDLLENIKRKVSSSKPEENKIRQEDLTKIISSAQKVQIKQETIESRLSELKSENESLWKEVSELRAKHAQQQQVIRKIVQFIVTLVQNNQLVSLKRKRPLLLNTNGAPKKNLFQHIVKEPTDNHHHKVPHSRTEGLKSRERISDDIIIYDVTEDNVDEENIPVIPETNEDVVVDPSSQYPDIVIVEDDNEDEYAPVIQSGEQSEPARVGSASSSSPLMSSAVQLNGSSNLTSEDPVTMMDSILNDNINLLGKVELLDYLDSIDCSLEDFQAMLSGRQFSIDPDLLVDSENKGLEATKNSVVQQVSEEGRKSKSKPDKQLIQYTAFPLLAFLDGNPASAVEQGTTTASSEVVPSVDKPIEVDELLDSNLDQEPTQSKLVRLEPLTEAEASEATLFYLCELAPAPLDSDMPLLDS

SEQ ID NO: 6453 - protein, 556 aa, Emericella nidulans
MLEDPSYAEIVRWGDDGDSFVVLECEKFTKTILPKHFKHSNFASFVRQLNKYDFHKVRQNNEENGQSPYGQNAWEFKHPEFRANSKESLDNIRRKAPAPRKQAQAHDDSVPTQQIDLLNQQIVAQQQQIQHISDRYAQMSVDHQLMLQEVLRVQKTVVNHENVIHQLVNYLVSIDARQKRDNKAGSFQAQVGASPSQVTPMDDGVSTPLQQASKLLSDMNAEVQFNLVPVESMGEPPKTGVVSTPTMETAPRRMEPVVYPVGATNGIDPMYGEHVNNVPYTVPPKQDMDDRRQFPDNRKKSNHVDPGWMRSPRILLVEDDATCRQIGGKFLYSFSCEIDTALDGLEAVNKVQDGSKYDLILMDIIMPNLDGVSACHLIRQFDRTPIIAMTSNIRSDDIQALLPAWYAASVICSRMDDVLPKPFTRKSLLEMLEKHLVHLKTVPQGMEGHQATTPVTIAGQSSAAQSVTIKEDTSSPSQSPAAAMTAWQSPNQFQPMAAVPANLQQVQGQYVPANPATTAYAMDQEWYAISSTAYGSDGRCWARSKCDRSHVGTSLN

SEQ ID NO: 6454 - protein, 214 aa, Anopheles gambiae str. PEST
HGADEGNIGADKKEGGEGAAAAAKMHTFSETGSVPAFLAKLWRLVEDSETNDLISWSTDGRSFIIQNQAQFAKELLPLNYKHNNMASFIRQLNMYGFHKITSIDNGGLRFDKDEMEFTHPCFQKDHPYLLEHIKRKIATSKQQQLQAQQQAEDKSALKLEAVSRVLSEVKNMRGRQDTLDSRFQTMKQENEALWREIAILRQKHHKQQQIVNKV

SEQ ID NO: 6455 - protein, 677 aa, Kluyveromyces lactis
MGHNDSVETMDEISNPNNILLPHDGTGLDATGISGSQEPYGMVDVLNPDSLKDDSNVDEPLIEDIVNPSLDPEGVVSAEPSNEVGTPLLQQPISLDHVITRPASAGGVYSIGNSSTSSAAKLSDGDLTNATDPLLNNAHGHGQPSSESQSHSNGYHKQGQSQQPLLSLNKRKLLAKAHVDKHHSKKKLSTTRARPAFVNKLWSMVNDKSNEKFIHWSTSGESIVVPNRERFVQEVLPKYFKHSNFASFVRQLNMYGWHKVQDVKSGSMLSNNDSRWEFENENFKRGKEYLLENIVRQKSNTNILGGTTNAEVDIHILLNELETVKYNQLAIAEDLKRITKDNEMLWKENMMARERHQSQQQVLEKLLRFLSSVFGPNSAKTIGNGFQPDLIHELSDMQVNHMSNNNHNNTGNINPNAYHNETDDPMANVFGPLTPTDQGKVPLQDYKLRPRLLLKNRSMSSSSSSNLNQRQSPQNRIVGQSPPPQQQQQQQQQQGQPQGQQFSYPIQGGNQMMNQLGSPIGTQVGSPVGSQYGNQYGNQYSNQFGNQLQQQTSRPALHHGSNGEIRELTPSIVSSDSPDPAFFQDLQNNIDKQEESIQEIQDWITKLNPGPGEDGNTPIFPELNMPSYFANTGGSGQSEQPSDYGDSQIEELRNSRLHEPDRSFEEKNNGQKRRRAA

SEQ ID NO: 6456 - protein, 92 aa, Kluyveromyces lactis
ARPAFVNKLWSMVNDKSNEKFIHWSTSGESIVVPNRERFVQEVLPKYFKHSNFASFVRQLNMYGWHKVQDVKSGSMLSNNDSRWEFENERHA

SEQ ID NO: 6457 - protein, 102 aa, Kluyveromyces lactis
GSRRASVGSMARPAFVNKLWSMVNDKSNEKFIHWSTSGESIVVPNRERFVQEVLPKYFKHSNFASFVRQLNMYGWHKVQDVKSGSMLSNNDSRWEFENERHA

SEQ ID NO: 6458 - protein, 90 aa, Kluyveromyces lactis
PAFVNKLWSMVNDKSNEKFIHWSTSGESIVVPNRERFVQEVLPKYFKHSNFASFVRQLNMYGWHKVQDVKSGSMLSNNDSRWEFENERHA

SEQ ID NO: 6459 - protein, 90 aa, Kluyveromyces lactis
PAFVNKLWSMVNDKSNEKFIHWSTSGESIVVPNRERFVQEVLAKYFKHSNFASFVRQLNMYGWHKVQDVKSGSMLSNNDSRWEFENERHA

SEQ ID NO: 6460 - protein, 90 aa, Kluyveromyces lactis
PAFVNKLWSMVNDKSNEKFIHWSTSGESIVVPNRERFVQEVLKKYFKHSNFASFVRQLNMYGWHKVQDVKSGSMLSNNDSRWEFENERHA

SEQ ID NO: 6461 - protein, 92 aa, Kluyveromyces lactis
  unsure (1)..(92): unsure at all Xaa locations
ARPAFVNKLWSXVNDKSNEKFIHWSTSGESIVVPNRERFVQEVLPKYFKHSNFASFVRQLNXYGWHKVQDVKSGSXLSNNDSRWEFENERHA

SEQ ID NO: 6462 - protein, 88 aa, Kluyveromyces lactis
ARPAFVNKLWSMVNDKSNEKFIHWSTSGESIVVPNRERFVQEVLPKYFKHSNFASFVRQLNMYGWHKVQDVKSGSNDSRWEFENERHA

SEQ ID NO: 6463 - protein, 454 aa, synthetic construct
MEYHSVGPGGVVVTGNNVPAFLTKLWTLVEDPDTDPLICWSPNGTSFHVFDQGRFSKEVLPKYFKHNNMASFVRQLNMYGFRKVVHIEQGGLVKPEKDDTEFQHPYFIRGQEQLLENIKRKVTTVSNIKHEDYKFSTDDVSKMISDVQHMKGKQESMDSKISTLKHENEMLWREVATLRQKHSQQQKVVNKLIQFLITLARSNRVLGVKRKMPLMLNDSSSAHSMPKFSRQYSLESPAPSSTAFTGTGVFSPEPPVKTGPIISDITELAQSSPVATDEWIEDRTSPLVHIKEEPSSPAHSPEVEEVCPVEVEVGAGSDLPVDTPLSPTTFINSILQESEPVSALTPPPSELVASDVGLDSLASIQDLLSPDPVKETESGLDTDSGKQLVQYTSQPIVLPDPLSTDSSSTDLPMLLELQDDSYFSSEPAEDPTIALLNLQPVPEDPKLSHHHHHH

SEQ ID NO: 6464 - protein, 503 aa, synthetic construct
MEYHSVGPGGVVVTGNNVPAFLTKLWTLVEDPDTDPLICWSPNGTSFHVFDQGRFSKEVLPKYFKHNNMASFVRQLNMYGFRKVVHIEQGGLVKPEKDDTEFQHPYFIRGQEQLLENIKRKVTTVSNIKHEDYKFSTDDVSKMISDVQHMKGKQESMDSKISTLKHENEMLWREVATLRQKHSQQQKVVNKLIQFLITLARSNRVLGVKRKMPLMLNDSSSAHSMPKFSRQYSLESPAPSSTAFTGTGVFSPEPPVKTGPIISDITELAQSSPVATDEWIEDRTSPLVHIKEEPSSPAHSPEVEEVCPVEVEVGAGSDLPVDTPLSPTTFINSILQESEPVSALTPPPSEQKCLSVACLDKTELHDHLESIDSGLENLQQILNAQSINFDSSPLFDIFSSAASDVGLDSLASIQDLLSPDPVKETESGLDTDSGKQLVQYTSQPIVLPDPLSTDSSSTDLPMLLELQDDSYFSSEPAEDPTIALLNLQPVPEDPKLSHHHHHH

SEQ ID NO: 6465 - protein, 339 aa, synthetic construct
MEYHSVGPGGVVVTGNNVPAFLTKLWTLVEDPDTDPLICWSPNGTSFHVFDQGRFSKEVLPKYFKHNNMASFVRQLNMYGFRKVVHIEQGGLVKPEKDDTEFQHPYFIRGQEQLLENIKRKVTTVSNIKHEDYKFSTDDVSKMISDVQHMKGKQESMDSKISTLKHENEMLWREVATLRQKHSQQQKVVNKLIQFLITLARSNRVLGVKRKMPLMLNDSSSAHSMPKFSRQYSLELVASDVGLDSLASIQDLLSPDPVKETESGLDTDSGKQLVQYTSQPIVLPDPLSTDSSSTDLPMLLELQDDSYFSSEPAEDPTIALLNLQPVPEDPKLSHHHHHH

SEQ ID NO: 6466 - protein, 411 aa, synthetic construct
MESVPESVPSPNSNTPSIPPPVNSVPPFLSKTYDMVDDPLTNEVVSWSSGNNSFVVWSAPEFSKVLLPKYFKHNNFSSFVRQLNTYGFRKVDPDRWEFANEGFLRGRKQLLKSIVRRKPSHVQQNQQQTQVQSSSVGACVEVGKFGIEEEVERLKRDKNVLMQELVRLRQQQQATENQLQNVGQKVQVMEQRQQQMMSFLAKAVQSPGFLNQLVQQNNNDGNRQIPGSNKKRRLPVDEQENRGDNVANGLNRQIVRYQPSINEAAQNMLRQFLNTSTSPRYEFSRGRTRNNYGSTIEGLLDLPDDDDAPAEAGLVAPRMSFLSAGQRPRRLSTTAPITDVSLVDELRLDGEEVDMTPADALDDFDLEMLGDVESPSPGMTHDPVSYGALDVDDFEFEQMFTDALGIDDFGG

SEQ ID NO: 6467 - protein, 402 aa, Phaseolus acutifolius
MDEALGSSCSLPPFLAKTYEMVDDLSTNSIVSWSVSSKSFIVWNPPEFARDLLPRFFKHNNFSSFIRQLNTYGFKKIDPEQWEFANDDFVRGQPHLMKNIHRRKPVHSHSLQNLQAQGPLGDSERQGFTDGIEKLKRDKERLLVELQKFQHEWQTYEIQIHCSNDRLEKLEQKQHKMVSSISHVLQKPVLAVNILPLTETMDRKRRLPRSGHYYDESSIEDAIETSQMLPRENAENTTVLTLNVERLDQLESSVAFWEAIAHDIGDNFAQIQSNMDFDESTSCADSPSISCAQLDVDVRPKSSGIDMNSEPTAAAVPDPLASKDQPAGITVAATGVNDVFWEQFLTEDPGASETQEVQSERKDCDGRKNEGKPNDHSKFWWNIRNANNLSEPMGHVGQAEKT

SEQ ID NO: 6468 - protein, 299 aa, Arabidopsis thaliana
MNSPPVDAMITGESSSQRSIPTPFLTKTFNLVEDSSIDDVISWNEDGSSFIVWNPTDFAKDLLPKHFKHNNFSSFVRQLNTYGFKKVVPDRWEFSNDFFKRGEKRLLREIQRRKITTTHQTVVAPSSEQRNQTMVVSPSNSGEDNNNNQVMSSSPSSWYCHQTKTTGNGGLSVELLEENEKLRSQNIQLNRELTQMKSICDNIYSLMSNYVGSQPTDRSYSPGGSSSQPMEFLPAKRFSEMEIEEEEEASPRLFGVPIGLKRTRSEGVQVKTTAVVGENSDEETPWLRHYNRTNQRVCN

SEQ ID NO: 6469 - protein, 291 aa, Arabidopsis thaliana
MITGESSSQRSIPTPFLTKTFNLVEDSSIDDVISWNEDGSSFIVWNPTDFAKDLLPKHFKHNNFSSFVRQLNTYGFKKVVPDRWEFSNDFFKRGEKRLLREIQRRKITTTHQTVVAPSSEQRNQTMVVSPSNSGEDNNNNQVMSSSPSSWYCHQTKTTGNGGLSVELLEENEKLRSQNIQLNRELTQMKSICDNIYSLMSNYVGSQPTDRSYSPGGSSSQPMEFLPAKRFSEMEIEEEEEASPRLFGVPIGLKRTRSEGVQVKTTAVVGENSDEETPWLRHYNRTNQRVCN

SEQ ID NO: 6470 - protein, 345 aa, Arabidopsis thaliana
MDENNGGSSSLPPFLTKTYEMVDDSSSDSVVAWSENNKSFIVKNPAEFSRDLLPRFFKHKNFSSFIRQLNTYGFRKVDPEKWEFLNDDFVRGRPYLMKNIHRRKPVHSHSLVNLQAQNPLTESERRSMEDQIERLKNEKEGLLAELQNQEQERKEFELQVTTLKDRLQHMEQHQKSIVAYVSQVLGKPGLSLNLENHERRKRRFQENSLPPSSSHIEQVEKLESSLTFWENLVSESCEKSGLQSSSMDHDAAESSLSIGDTRPKSSKIDMNSEPPVTVTAPAPKTGVNDDFWEQCLTENPGSTEQQEVQSERRDVGNDNNGNKIGNQRTYWWNSGNVNNITEKAS

SEQ ID NO: 6471 - protein, 495 aa, Arabidopsis thaliana
MFVNFKYFSFFIRTKMDGVTGGGTNIGEAVTAPPPRNPHPATLLNANSLPPPFLSKTYDMVEDPATDAIVSWSPTNNSFIVWDPPEFSRDLLPKYFKHNNFSSFVRQLNTYGFRKVDPDRWEFANEGFLRGQKHLLKKISRRKSVQGHGSSSSNPQSQQLSQGQGSMAALSSCVEVGKFGLEEEVEQLKRDKNVLMQELVKLRQQQQTTDNKLQVLVKHLQVMEQRQQQIMSFLAKAVQNPTFLSQFIQKQTDSNMHVTEANKKRRLREDSTAATESNSHSHSLEASDGQIVKYQPLRNDSMMWNMMKTDDKYPFLDGFSSPNQVSGVTLQEVLPITSGQSQAYASVPSGQPLSYLPSTSTSLPDTIMPETSQIPQLTRESINDFPTENFMDTEKNVPEAFISPSPFLDGGSVPIQLEGIPEDPEIDELMSNFEFLEEYMPESPVFGDATTLENNNNNNNNNNNNNNNNNNNNTNGRHMDKLIEELGLLTSETEH

SEQ ID NO: 6472 - protein, 482 aa, Arabidopsis thaliana
MDVSKVTTSDGGGDSMETKPSPQPQPAAILSSNAPPPFLSKTYDMVDDHNTDSIVSWSANNNSFIVWKPPEFARDLLPKNFKHNNFSSFVRQLNTYGFRKVDPDRWEFANEGFLRGQKHLLQSITRRKPAHGQGQGHQRSQHSNGQNSSVSACVEVGKFGLEEEVERLKRDKNVLMQELVRLRQQQQSTDNQLQTMVQRLQGMENRQQQLMSFLAKAVQSPHFLSQFLQQQNQQNESNRRISDTSKKRRFKRDGIVRNNDSATPDGQIVKYQPPMHEQAKAMFKQLMKMEPYKTGDDGFLLGNGTSTTEGTEMETSSNQVSGITLKEMPTASEIQSSSPIETTPENVSAASEATENCIPSPDDLTLPDFTHMLPENNSEKPPESFMEPNLGGSSPLLDPDLLIDDSLSFDIDDFPMDSDIDPVDYGLLERLLMSSPVPDNMDSTPVDNETEQEQNGWDKTKHMDNLTQQMGLLSPETLDLSR

SEQ ID NO: 6473 - protein, 483 aa, Arabidopsis thaliana
MFVNFKYFSFFIRTKMDGVTGGGTNIGEAVTAPPPRNPHPATLLNANSLPPPFLSKTYDMVEDPATDAIVSWSPTNNSFIVWDPPEFSRDLLPKYFKHNNFSSFVRQLNTYGFRKVDPDRWEFANEGFLRGQKHLLKKISRRKSVQGHGSSSSNPQSQQLSQGQGSMAALSSCVEVGKFGLEEEVEQLKRDKNVLMQELVKLRQQQQTTDNKLQVMVKHLQVMEQRQQQIMSFLAKAVQNPTFLSQFIQKQTDSNMHVTEANKKRRLREDSTAATESNSHSHSLDASDGQIVKYQPLRNDSMMWNMMKTDDKYPFLDGFSSPNQVSGVTLQEVLPTTSGQSQAYASVPSGQPLSYLPSTSTSLPDTIMPETSQIPQLTRESINDFPTENYMDTEKNVPEAFISPSPFLDGGSVPIQLEGIPEDPEIDELMSNFEFLEEYMPESPVFGDATTLENNNNNNNNTNGRHMDKLIEELGLLTSETEH

SEQ ID NO: 6474 - protein, 406 aa, Arabidopsis thaliana
MDPSFRFIKEEFPAGFSDSPSPPSSSSYLYSSSMAEAAINDPTTLSYPQPLEGLHESGPPPFLTKTYDLVEDSRTNHVVSWSKSNNSFIVWDPQAFSVTLLPRFFKHNNFSSFVRQLNTYGFRKVNPDRWEFANEGFLRGQKHLLKNIRRRKTSNNSNQMQQPQSSEQQSLDNFCIEVGRYGLDGEMDSLRRDKQVLMMELVRLRQQQQSTKMYLTLIEEKLKKTESKQKQMMSFLARAMQNPDFIQQLVEQKEKRKEIEEAISKKRQRPIDQGKRNVEDYGDESGYGNDVAASSSALIGMSQEYTYGNMSEFEMSELDKLAMHIQGLGDNSSAREEVLNVEKGNDEEEVEDQQQGYHKENNEIYGEGFWEDLLNEGQNFDFEGDQENVDVLIQQLGYLGSSSHTN

SEQ ID NO: 6475 - protein, 520 aa, Arabidopsis thaliana
RESLCLCKRYLSLRRTEETSRINQSINFSELTLDFSFEVMESVPESVPSPNSNTPSIPPPVNSVPPFLSKTYDMVDDPLTNEVVSWSSGNNSFVVWSAPEFSKVLLPKYFKHNNFSSFVRQLNTYGFRKVDPDRWEFANEGFLRGRKQLLKSIVRRKPSHVQQNQQQTQVQSSSVGACVEVGKFGIEEEVERLKRDKNVLMQELVRLRQQQQATENQLQNVGQKVQVMEQRQQQMMSFLAKAVQSPGFLNQLVQQNNNDGNRQIPGSNKKRRLPVDEQENRGDNVANGLNRQIVRYQPSINEAAQNMLRQFLNTSTSPRYESVSNNPDSFLLGDVPSSTSVDNGNPSSRVSGVTLAEFSPNTVQSATNQVPEASLAHHPQAGLVQPNIGQSPAQGAAPADSWSPEFDLVGCETDSGECFDPIMAVLDESEGDAISPEGEGKMNELLEGVPKLPGIQDPFWEQFFSVELPAIADTDDILSGSVENNDLVLEQEPNEWTRNEQQMKYLTEQMGLLSSEAQRK

SEQ ID NO: 6476 - protein, 481 aa, Arabidopsis thaliana
MESVPESVPSPNSNTPSIPPPVNSVPPFLSKTYDMVDDPLTNEVVSWSSGNNSFVVWSAPEFSKVLLPKYFKHNNFSSFVRQLNTYGFRKVDPDRWEFANEGFLRGRKQLLKSIVRRKPSHVQQNQQQTQVQSSSVGACVEVGKFGIEEEVERLKRDKNVLMQELVRLRQQQQATENQLQNVGQKVQVMEQRQQQMMSFLAKAVQSPGFLNQLVQQNNNDGNRQIPGSNKKRRLPVDEQENRGDNVANGLNRQIVRYQPSINEAAQNMLRQFLNTSTSPRYESVSNNPDSFLLGDVPSSTSVDNGNPSSRVSGVTLAEFSPNTVQSATNQVPEASLAHHPQAGLVQPNIGQSPAQGAAPADSWSPEFDLVGCETDSGECFDPIMAVLDESEGDAISPEGEGKMNELLEGVPKLPGIQDPFWEQFFSVELPAIADTDDILSGSVENNDLVLEQEPNEWTRNEQQMKYLTEQMGLLSSEAQRK

SEQ ID NO: 6477 - protein, 468 aa, Arabidopsis thaliana
MGTVCESVATAKSSTAVMSSIPPFLSKTYDMVDDPLTDDVVSWSSGNNSFVVWNVPEFAKQFLPKYFKHNNFSSFVRQLNTYGFRKVDPDRWEFANEGFLRGQKQILKSIVRRKPAQVQPPQQPQVQHSSVGACVEVGKFGLEEEVERLQRDKNVLMQELVRLRQQQQVTEHHLQNVGQKVHVMEQRQQQMMSFLAKAVQSPGFLNQFSQQSNEANQHISESNKKRRLPVEDQMNSGSHGVNGLSRQIVRYQSSMNDATNTMLQQIQQMSNAPSHESLSSNNGSFLLGDVPNSNISDNGSSSNGSPEVTLADVSSIPAGFYPAMKYHEPCETNQVMETNLPFSQGDLLPPTQGAAASGSSSSDLVGCETDNGECLDPIMAVLDGALELEADTLNELLPEVQDSFWEQFIGESPVIGETDELISGSVENELILEQLELQSTLSNVWSKNQQMNHLTEQMGLLTSDALRK

SEQ ID NO: 6478 - protein, 401 aa, Arabidopsis thaliana
MDENNHGVSSSSLPPFLTKTYEMVDDSSSDSIVSWSQSNKSFIVWNPPEFSRDLLPRFFKHNNFSSFIRQLNTYGFRKADPEQWEFANDDFVRGQPHLMKNIHRRKPVHSHSLPNLQAQLNPLTDSERVRMNNQIERLTKEKEGLLEELHKQDEEREVFEMQVKELKERLQHMEKRQKTMVSFVSQVLEKPGLALNLSPCVPETNERKRRFPRIEFFPDEPMLEENKTCVVVREEGSTSPSSHTREHQVEQLESSIAIWENLVSDSCESMLQSRSMMTLDVDESSTFPESPPLSCIQLSVDSRLKSPPSPRIIDMNCEPDGSKEQNTVAAPPPPPVAGANDGFWQQFFSENPGSTEQREVQLERKDDKDKAGVRTEKCWWNSRNVNAITEQLGHLTSSERS

SEQ ID NO: 6479 - protein, 468 aa, Arabidopsis thaliana
MGTVCESVATAKSSTAVMSSIPPFLSKTYDMVDDPLTDDVVSWSSGNNSFVVWNVPEFAKQFLPKYFNHNNFSSFVRQLNTYGFRKVDPDRWEFANEGFLRGQKQILKSIVRRKPAQVQPPQQPQVQHSSVGACVEVGKFGLEEEVERLQRDKNVLMQELVRLRQQQQVTEHHLQNVGQKVHVMEQRQQQMMSFLAKAVQSPGFLNQFSQQSNEANQHISESNKKRRLPVEDQMNSGSHGVNGLSRQIVRYQSSMNDATNTMLQQIQQMSNAPSHESLSSNNGSFLLGDVPNSNISDNGSSSNGSPEVTLADVSSIPAGFYPAMKYHEPCETNQVMETNLPFSQGDLLPPTQGAAASGSSSSDLVGCETDNGECLDPIMAVLDGALELEADTLNELLPEVQDSFWEQFIGESPVIGETDELISGSVENELILEQLELQSTLSNVWSKNQQMNHLTEQMGLLTSDALRK

SEQ ID NO: 6480 - protein, 284 aa, Arabidopsis thaliana
MTAVTAAQRSVPAPFLSKTYQLVDDHSTDDVVSWNEEGTAFVVWKTAEFAKDLLPQYFKHNNFSSFIRQLNTYGFRKTVPDKWEFANDYFRRGGEDLLTDIRRRKSVIASTAGKCVVVGSPSESNSGGGDDHGSSSTSSPGSSKNPGSVENMVADLSGENEKLKRENNNLSSELAAAKKQRDELVTFLTGHLKVRPEQIDKMIKGGKFKPVESDEESECEGCDGGGGAEEGVGEGLKLFGVWLKGERKKRDRDEKNYVVSGSRMTEIKNVDFHAPLWKSSKVCN

SEQ ID NO: 6481 - protein, 401 aa, Arabidopsis thaliana
EFRNNHGVSSSSLPPFLTKTYEMVDDSSSDSIVSWSQSNKSFIVWNPPEFSRDLLPRFFKHNNFSSFIRQLNTYGFRKADPEQWEFANDDFVRGQPHLMKNIHRRKPVHSHSLPNLQAQLNPLTDSERVRMNNQIERLTKEKEGLLEELHKQDEEREVFEMQVKELKERLQHMEKRQKTMVSFVSQVLEKPGLALNLSPCVPETNERKRRFPRIEFFPDEPMLEENKTCVVVREEGSTSPSSHTREHQVEQLESSIAIWENLVSDSCESMLQSRSMMTLDVDESSTFPESPPLSCIQLSVDSRLKSPPSPRIIDMNCEPDGSKEQNTVAAPPPPPVAGANDGFWQQFFSENPGSTEQREVQLERKDDKDKAGVRTEKCWWNSRNVNAITEQLGHLTSSERS

SEQ ID NO: 6482 - protein, 284 aa, Arabidopsis thaliana
MTAVTAAQRSVPAPFLSKTYQLVDDHRTDDVVSWNEEGTAFVVWKTAEFAKDLLPQYFKHNNFSSFIRQLNTYGFRKTVPDKWEFANDYFRRGGEDLLTDIRRRKSVIASTAGKCVVVGSPSESNSGGGDDHGSSSTSSPGSSKNPGSVENMVADLSGENEKLKRENNNLSSELAAAKKQRDELVTFLTGHLKVRPEQIDKMIKGGKFKPVESDEESECEGCDGGGGAEEGVGEGLKLFGVWLKGERKKRDRDEKNYVVSGSRMTEIKNVDFHAPLWKSSKVCN

SEQ ID NO: 6483 - protein, 374 aa, Arabidopsis thaliana
MVKSTDGGGGSSSSSSVAPFLRKCYDMVDDSTTDSIISWSPSADNSFVILDTTVFSVQLLPKYFKHSNFSSFIRQLNIYGFRKVDADRWEFANDGFVRGQKDLLKNVIRRKNVQSSEQSKHESTSTTYAQEKSGLWKEVDILKGDKQVLAQELIKVRQYQEVTDTKMLHLEDRVQGMEESQQEMLSFLVMVMKNPSLLVQLLQPKEKNTWRKAGEGAKIVEEVTDEGESNSYGLPLVTYQPPSDNNGTAKSNSNDVNDFLRNADMLKFCLDENHVPLIIPDLYDDGAWEKLLLLSPSRKKTKKQENIVKKGKDDLTLEEEEEDGTMELDKSYMLKLISEEMEKPDDFEFGQLTPERSRNLEILTEQMELLASNE

SEQ ID NO: 6484 - protein, 330 aa, Arabidopsis thaliana
MEDDNSNNNNNNNVIAPFIVKTYQMVNDPSTDWLITWGPAHNSFIVVDPLDFSQRILPAYFKHNNFSSFVRQLNTYGFRKVDPDRWEFANEHFLRGQKHLLNNIARRKHARGMYGQDLEDGEIVREIERLKEEQRELEAEIQRMNRRIEATEKRPEQMMAFLYKVVEDPDLLPRMMLEKERTKQQQQVSDKKKRRVTMSTVKSEEEEVEEDEGRVFRVMSSSTPSPSSTENLYRNHSPDGWIVPMTQGQFGSYETGLVAKSMLSNSTSSTSSSLTSTFSLPESVNGGGGGGCGSIQGERRYKETATFGGVVESNPPTTPPYPFSLFRGGF

SEQ ID NO: 6485 - protein, 447 aa, Arabidopsis thaliana
MVDDPLTNEVVSWSSGNNSFVVWSAPEFSKVLLPKYFKHNNFSSFVRQLNTYGFRKVDPDRWEFANEGFLRGRKQLLKSIVRRKPSHVQQNQQQTQVQSSSVGACVEVGKFGIEEEVERLKRDKNVLMQELVRLRQQQQATENQLQNVGQKVQVMEQRQQQMMSFLAKAVQSPGFLNQLVQQNNNDGNRQIPGSNKKRRLPVDEQENRGDNVANGLNRQIVRYQPSINEAAQNMLRQFLNTSTSPRYESVSNNPDSFLLGDVPSSTSVDNGNPSSRVSGVTLAEFSPNTVQSATNQVPEASLAHHPQAGLVQPNIGQSPAQGAAPADSWSPEFDLVGCETDSGECFDPIMAVLDESEGDAISPEGEGKMNELLEGVPKLPGIQDPFWEQFFSVELPAIADTDDILSGSVENNDLVLEQEPNEWTRNEQQMKYLTEQMGLLSSEAQRK

SEQ ID NO: 6486 - protein, 377 aa, Arabidopsis thaliana
MPGEQTGETPTVAGVGGGGAGCSAGNSGGSSGCGAGGGGGGSGGGGGGGGDSQRSIPTPFLTKTYQLVEDPVYDELISWNEDGTTFIVWRPAEFARDLLPKYFKHNNFSSFVRQLNTYGFRKVVPDRWEFSNDCFKRGEKILLRDIQRRKISQPAMAAAAAAAAAAVAASAVTVAAVPVVAHIVSPSNSGEEQVISSNSSPAAAAAAIGGVVGGGSLQRTTSCTTAPELVEENERLRKDNERLRKEMTKLKGLYANIYTLMANFTPGQEDCAHLLPEGKPLDLLPERQEMSEAIMASEIETGIGLKLGEDLTPRLFGVSIGVKRARREEELGAAEEEDDDRREAAAQEGEQSSDVKAEPMEENNSGNHNGSWLELGK

SEQ ID NO: 6487 - protein, 328 aa, Arabidopsis thaliana
RDSQRSIPTPFLTKTYQLVEDPVYDELISWNEDGTTFIVWRPAEFARDLLPKYFKHNNFSSFVRQLNTYGFRKVVPDRWEFSNDCFKRGEKILLRDIQRRKISQPAMAAAAAAAAAAVAASAVTVAAVPVVAHIVSPSNSGEEQVISSNSSPAAAAAAIGGVVGGGSLQRTTSCTTAPELVEENERLRKDNERLRKEMTKLKGLYANIYTLMANFTPGQEDCAHLLPEGKPLDLLPERQEMSEAIMASEIETGIGLKLGEDLTPRLFGVSIGVKRARREEELGAAEEEDDDRREAAAQEGEQSSDVKAEPMEENNSGNHNGSWLELGK

SEQ ID NO: 6488 - protein, 345 aa, Arabidopsis thaliana
MEELKVEMEEETVTFTGSVAASSSVGSSSSPRPMEGLNETGPPPFLTKTYEMVEDPATDTVVSWSNGRNSFVVWDSHKFSTTLLPRYFKHSNFSSFIRQLNTYGFRKIDPDRWEFANEGFLAGQKHLLKNIKRRRNMGLQNVNQQGSGMSCVEVGQYGFDGEVERLKRDHGVLVAEVVRLRQQQHSSKSQVAAMEQRLLVTEKRQQQMMTFLAKALNNPNFVQQFAVMSKEKKSLFGLDVGRKRRLTSTPSLGTMEENLLHDQEFDRMKDDMEMLFAAAIDDEANNSMPTKEEQCLEAMNVMMRDGNLEAALDVKVEDLVGSPLDWDSQDLHDMVDQMGFLGSEP

SEQ ID NO: 6489 - protein, 412 aa, Arabidopsis thaliana
MSPKKDAVSKPTPISVPVSRRSDIPGSLYVDTDMGFSGSPLPMPLDILQGNPIPPFLSKTFDLVDDPTLDPVISWGLTGASFVVWDPLEFARIILPRNFKHNNFSSFVRQLNTYGFRKIDTDKWEFANEAFLRGKKHLLKNIHRRRSPQSNQTCCSSTSQSQGSPTEVGGEIEKLRKERRALMEEMVELQQQSRGTARHVDTVNQRLKAAEQRQKQLLSFLAKLFQNRGFLERLKNFKGKEKGGALGLEKARKKFIKHHQQPQDSPTGGEVVKYEADDWERLLMYDEETENTKGLGGMTSSDPKGKNLMYPSEEEMSKPDYLMSFPSPEGLIKQEETTWSMGFDTTIPSFSNTDAWGNTMDYNDVSEFGFAAETTSDGLPDVCWEQFAAGITETGFNWPTGDDDDNTPMNDP

SEQ ID NO: 6490 - protein, 476 aa, Arabidopsis thaliana
MSYQSYPTESHGFYTCIIFAIFVCCFVPFLMLQIVKMYMTIVTGRKKKCSNGNNVRDIIYLSSPKGPKKDAVSKPTPISVPVSRRSDIPGSLYVDTDMGFSGSPLPMPLDILQGNPIPPFLSKTFDLVDDPTLDPVISWGLTGASFVVWDPLEFARIILPRNFKHNNFSSFVRQLNTYGFRKIDTDKWEFANEAFLRGKKHLLKNIHRRRSPQSNQTCCSSTSQSQGSPTEVGGEIEKLRKERRALMEEMVELQQQSRGTARHVDTVNQRLKAAEQRQKQLLSFLAKLFQNRGFLERLKNFKGKEKGGALGLEKARKKFIKHHQQPQDSPTGGEVVKYEADDWERLLMYDEETENTKGLGGMTSSDPKGKNLMYPSEEEMSKPDYLMSFPSPEGLIKQEETTWSMGFDTTIPSFSNTDAWGNTMDYNDVSEFGFAAETTSDGLPDVCWEQFAAGITETGFNWPTGDDDDNTPMNDP

SEQ ID NO: 6491 - protein, 466 aa, Arabidopsis thaliana
MNGALGNSSASVSGGEGAGGPAPFLVKTYEMVDDSSTDQIVSWSANNNSFIVWNHAEFSRLLLPTYFKHNNFSSFIRQLNTYGFRKIDPERWEFLNDDFIKDQKHLLKNIHRRKPIHSHSHPPASSTDQERAVLQEQMDKLSREKAAIEAKLLKFKQQKVVAKHQFEEMTEHVDDMENRQKKLLNFLETAIRNPTFVKNFGKKVEQLDISAYNKKRRLPEVEQSKPPSEDSHLDNSSGSSRRESGNIFHQNFSNKLRLELSPADSDMNMVSHSIQSSNEEGASPKGILSGGDPNTTLTKREGLPFAPEALELADTGTCPRRLLLNDNTRVETLQQRLTSSEETDGSFSCHLNLTLASAPLPDKTASQIAKTTLKSQELNFNSIETSASEKNRGRQEIAVGGSQANAAPPARVNDVFWEQFLTERPGSSDNEEASSTYRGNPYEEQEEKRNGSMMLRNTKNIEQLTL

SEQ ID NO: 6492 - protein, 834 aa, Arabidopsis thaliana
MEEDRESRVSAKPSGDRVDRLRNLPDCLLFKILLNLPTKDVVKLSVLSRRWRNVWRYVPGFNSESCLQKFKLTVNWYDDVQLETVHFTEWFNAVVKRKVQHLHILDKTWGRDEVVIPPTVFTCGSLISLNLYDVYLPNREFVSLPSLKVIVLDAVVFDEDFAFEMLVSGCPVLESLSVNKINLNDISENDDDYLEVVIDAPRLHYLKLNDKRTASFIMKNHGSLLKADIDFVFNLGSEYMFDPNYLPTRHIIRDFLVGLSGVKDMIISSSTLQVIYDYSRCEQLPLFRNVSFLRVEFADYRWEMLPIFLESCPNLKSLVLGFSIPPGKEGANILPGPRRFLTSLEYVKIAKPMAAEASEIKLKLVNSTMNGALGNSSASVSGGEGAGGPAPFLVKTYEMVDDSSTDQIVSWSANNNSFIVWNHAEFSRLLLPTYFKHNNFSSFIRQLNTYGFRKIDPERWEFLNDDFIKDQKHLLKNIHRRKPIHSHSHPPASSTDQERAVLQEQMDKLSREKAAIEAKLLKFKQQKVVAKHQFEEMTEHVDDMENRQKKLLNFLETAIRNPTFVKNFGKKVEQLDISAYNKKRRLPEVEQSKPPSEDSHLDNSSGSSRRESGNIFHQNFSNKLRLELSPADSDMNMVSHSIQSSNEEGASPKGILSGGDPNTTLTKREGLPFAPEALELADTGTCPRRLLLNDNTRVETLQQRLTSSEETDGSFSCHLNLTLASAPLPDKTASQIAKTTLKSQELNFNSIETSASEKNRGRQEIAVGGSQANAAPPARVNDVFWEQFLTERPGSSDNEEASSTYRGNPYEEQEEKRNGSMMLRNTKNIEQLTL

SEQ ID NO: 6493 - protein, 282 aa, Arabidopsis thaliana
MDYNLPIPLEGLKETPPTAFLTKTYNIVEDSSTNNIVSWSRDNNSFIVWEPETFALICLPRCFKHNNFSSFVRQLNTYGFKKIDTERWEFANEHFLKGERHLLKNIKRRKTSSQTQTQSLEGEIHELRRDRMALEVELVRLRRKQESVKTYLHLMEEKLKVTEVKQEMMMNFLLKKIKKPSFLQSLRKRNLQGIKNREQKQEVISSHGVEDNGKFVKAEPEEYGDDIDDQCGGVFDYGDELHIASMEHQGQGEDEIEMDSEGIWKGFVLSEEEMCDLVEHFI

SEQ ID NO: 6494 - protein, 251 aa, Arabidopsis thaliana
MDYNLPIPLEGLKETPPTAFLTKTYNIVEDSSTNNIVSWSRDNNSFIVWEPETFALICLPRCFKHNNFSSFVRQLNTYGFKKIDTERWEFANEHFLKGERHLLKNIKRRKTSSQTQTQSLEGEIHELRRDRMALEVELVRLRRKQESVKTYLHLMEEKLKVTEVKQEMMMNFLLKKIKKPSFLQSLRKRNLQGIKNREQKQEVISSHGFDYGDELHIASMEHQGQGEDEIEMDSESTPLIVQRRLSTFYFS

SEQ ID NO: 6495 - protein, 282 aa, Arabidopsis thaliana
MDPSSSSRARSMPPPVPMEGLQEAGPSPFLTKTFEMVGDPNTNHIVSWNRGGISFVVWDPHSFSATILPLYFKHNNFSSFVRQLNTYGFRKIEAERWEFMNEGFLMGQRDLLKSIKRRTSSSSPPSLNYSQSQPEAHDPGVELPQLREERHVLMMEISTLRQEEQRARGYVQAMEQRINGAEKKQRHMMSFLRRAVENPSLLQQIFEQKRDREEAAMIDQAGLIKMEEVEHLSELEALALEMQGYGRQRTDGVERELDDGFWEELLMNNENSDEEEANVKQD

SEQ ID NO: 6496 - protein, 348 aa, Arabidopsis thaliana
MAMMVENSYGGYGGGGGERIQLMVEGQGKAVPAPFLTKTYQLVDDPATDHVVSWGDDDTTFVVWRPPEFARDLLPNYFKHNNFSSFVRQLNTYGFRKIVPDRWEFANEFFKRGEKHLLCEIHRRKTSQMIPQQHSPFMSHHHAPPQIPFSGGSFFPLPPPRVTTPEEDHYWCDDSPPSRPRVIPQQIDTAAQVTALSEDNERLRRSNTVLMSELAHMKKLYNDIIYFVQNHVKPVAPSNNSSYLSSFLQKQQQQQPPTLDYYNTATVNATNLNALNSSPPTSQSSITVLEDDHTNHHDQSNMRKTKLFGVSLPSSKKRSHHFSDQTSKTRLVLDQSDLALNLMTASTR

SEQ ID NO: 6497 - protein, 244 aa, Arabidopsis thaliana
MEDAGEHLRCNDNVNDEERLPLEFMIGNSTSTAELQPPPPFLVKTYKVVEDPTTDGVISWNEYGTGFVVWQPAEFARDLLPTLFKHCNFSSFVRQLNTYGFRKVTTIRWEFSNEMFRKGQRELMSNIRRRKSQHWSHNKSNHQVVPTTTMVNQEGHQRIGIDHHHEDQQSSATSSSFVYTALLDENKCLKNENELLSCELGKTKKKCKQLMELVERYRGEDEDATDESDDEEDEGLKLFGVKLE

SEQ ID NO: 6498 - protein, 272 aa, Arabidopsis thaliana
MMNPFLPEGCDPPPPPQPMEGLHENAPPPFLTKTFEMVDDPNTDHIVSWNRGGTSFVVWDLHSFSTILLPRHFKHSNFSSFIRQLNTYGFRKIEAERWEFANEEFLLGQRQLLKNIKRRNPFTPSSSPSHDACNELRREKQVLMMEIVSLRQQQQTTKSYIKAMEQRIEGTERKQRQMMSFLARAMQSPSFLHQLLKQRDKKIKELEDNESAKRKRGSSSMSELEVLALEMQGHGKQRNMLEEEDHQLVVERELDDGFWEELLSDESLASTS

SEQ ID NO: 6499 - protein, 331 aa, Arabidopsis thaliana
MTAIPNVVDIESSSSSLCQETATETVTVERGSSDSSSKPDDVVLLIKEEEDDAVNLSLGFWKLHEIGLITPFLRKTFEIVDDKVTDPVVSWSPTRKSFIIWDSYEFSENLLPKYFKHKNFSSFIRQLNSYGFKKVDSDRWEFANEGFQGGKKHLLKNIKRRSKNTKCCNKEASTTTTETEVESLKEEQSPMRLEMLKLKQQQEESQHQMVTVQEKIHGVDTEQQHMLSFFAKLAKDQRFVERLVKKRKMKIQRELEAAEFVKKLKLLQDQETQKNLLDVEREFMAMAATEHNPEPDILVNNQSGNTRCQLNSEDLLVDGGSMDVNGRIEIE

SEQ ID NO: 6500 - protein, 346 aa, Arabidopsis thaliana
MTLDPVISWGLTGASFVVWDPLEFARIILPRNFKHNNFSSFVRQLNTYGFRKIDTDKWEFANEAFLRGKKHLLKNIHRRRSPQSNQTCCSSTSQSQGSPTEVGGEIEKLRKERRALMEEMVELQQQSRGTARHVDTVNQRLKAAEQRQKQLLSFLAKLFQNRGFLERLKNFKGKEKGGALGLEKARKKFIKHHQQPQDSPTGGEVVKYEADDWERLLMYDEETENTKGLGGMTSSDPKGKNLMYPSEEEMSKPDYLMSFPSPEGLIKQEETTWSMGFDTTIPSFSNTDAWGNTMDYNDVSEFGFAAETTSDGLPDVCWEQFAAGITETGFNWPTGDDDDNTPMNDP

SEQ ID NO: 6501 - protein, 291 aa, Arabidopsis thaliana
MSKNEGSLTSVSYFITTTYDMVDDLSLDSIISWSQSGKSFIIWNPEEFYNNLLQRFCFQRINTFFSFLFSHGFRKIDSGKWEFANDNFVRGQRHLINNIISDVIEQEVQYDQGMELFKAEKLFARLVKKVQDQLPPHNSYPTSKLPFPTKIYEMVDDPSSDAIISWSQSGKSFIIWNPQEFCKDHLRRLFNTLHIHFFFYKLKIFGFKKINPKKWEFANDNFVRGQRHLVEIIISNDKKKNDQLRKQDAREKKMAEAGELFKLQIEEMSDMRKKMKKAKEVKEQEVRLCKL

SEQ ID NO: 6502 - protein, 282 aa, Glycine max
MSQRSVPAPFLTKTYQLVEDQGTDQVISWGESGNTFVVWKHADFAKDLLPKYFKHNNFSSFVRQLNTYGFRKIVPDKWEFANEHFKRGQKELLSEIKRRKTVPQSSAHPPEAGKSGGDGNSPLNSGSDDAGSTSTSSSSSGSKNQGSVETNTTPSHQLSSENEKLKKDNETLSCELARARKQCDELVAFLRDRLMVGPDQIDRIMRQGSCGSENVVGEGGGGDCLKLFGVWLKGDTLTDKRNNHKRGREDQMGFGGPRLKESKPVVDFSRNRMMMINEKGKG

SEQ ID NO: 6503 - protein, 282 aa, Glycine max
MSQRSVPAPFLTKTYQLVEDQGTDQVISWGESGNTFVVWKHADFAKDLLPKYFKHNNFSSFVRQLNTYGFRKIVPDKWEFANEHFKRGQKELLSEIKRRKTVPQSSAHPPEAGKSGGDGNSPLNSGSDDAGSTSTSSSSSGSKNQGSVETNTTPSHQLSSENEKLKKDNETLSCELARARKQCDELVAFLRDRLMVGPDQIDRIMRQGSCGSENVVGEGGGGDCLKLFGVWLKGDTLTDKRNNHKRGREDQMGFGGPRLKESKPVVDFGAVNIMMKSNRVCN

SEQ ID NO: 6504 - protein, 282 aa, Glycine max; identical to SEQ ID NO: 6503

SEQ ID NO: 6505 - protein, 284 aa, Glycine max
MLQQRSVPAPFLTKTYQLVEDPGTDEVISWGESGNTFVVWKHADFAKDLLPKYFKHNNFSSFVRQLNTYGFRKIVPDKWEFANEHFKRGQKELLSEIKRRKTVPQSSTHSPDAGKPGAEGNSPSNPGGCDDAGSTSTSSSSSGSKNQGSVETNTTPSHQLSSENEKLKKDNETLSCELARARKQCDELVAFLRDRLMVGPDQIDRIMRQGSCGSENAVGEGGGGDCLKLFGVWLKGDTLTDKRNNHKRGREDQMGFGGPRLKESKPVVDFSRNRMMMINEKGKG

SEQ ID NO: 6506 - protein, 298 aa, Glycine max
  unsure (1)..(298): unsure at all Xaa locations
MSQQQRSMPAPFLTKSYLLVDDPATDDVVSWSEGGNTFVVWKHADFANDLLPKYFKHNNFSSFVRQLNTYGFRKTVPDKWEFANEYFKRGQKDLLAEIKRRKTVSSVSGKSGSGGNISASHSGGDDMGSTSTGSMEAATATVTTTQCADLSGENEKLKKDNEKLSDELARTKKHCDDLVAFLRDSLNVGPDVIDCIIRQGTCGSSNDDAKGDNGESLKLFGVWLKGQNGKENSIGSCRKRGRQDPIAATAKELKTLVXDISXGCXINYLIIFQETTIIVRSRTQKRTLSWSSWNMYGR

SEQ ID NO: 6507 - protein, 277 aa, Glycine max
  unsure (1)..(277): unsure at all Xaa locations
MSQQQRSTPAPFLTKTYLLVDDPATDDVVSWSEGGNTFVVWKHADFAKDLLPKYFKHNNFSSFVRQLNTYGFRKTVPDKWEFANEYFKRGQTDLLAEIRRRKVVSPVTGXXSTGGGVNISASHSGGDDMGSTSTGSMEAATAAGADISGENEKLKKDNEKLSGELALAKKQCEELVAFLRDSLNVSPDVIERIIRQGTCVSSNNDAKGDNGESLKLFGVWLKGQNGKENSIGKCRKRGRQDYPIAATAKELKTLVXYNISYSCXINYLLRNNYCSQI

SEQ ID NO: 6508 - protein, 277 aa, Glycine max; identical to SEQ ID NO: 6507
  unsure (1)..(277): unsure at all Xaa locations

SEQ ID NO: 6509 - protein, 376 aa, Glycine max
  unsure (1)..(376): unsure at all Xaa locations
MVKSNENGSGSVSVPPFLKKCYDMVEDRNTDSIIRWSDGGDSFVISDITQFSVTLLPTYFKHNNFSSFIRQLNIYGFRKIDTDCWEFANENFVRGQKHLLKNIRRRKHPHSADQQKALXHSKTIVMNHHKKHRIXGLWKEVENLKLDKNSLTQELVKLRQHQESAENKLLLLSDRLQGMEKHQQQMLSFLVMVVQSPGFMVQLLHPKENNWHLAESWNILDQDKQDDKPVASDGMIIKYKPPVGEXTKACSSSVSWFRKANRTRAFCRRENHSPFLLPDLPDDGSWEQLFLGSPFMGNIXXDSNKESEGHTNGGMEMEPTISETPNENSRTFESMIVEMEKTREXXVGVVCTWWAVFLESIRYFSAGLSHTELMEL

SEQ ID NO: 6510 - protein, 234 aa, Glycine max
  unsure (1)..(234): unsure at all Xaa locations
VRPRVRSIPLTSHRPQYTHPRQKISFQNCDMDGRASSSVGGEASPAPAPVPITNANAPPPFLSKTYEMVEDPSTDSIVSWSPTNNSFVVWNPPEFARDLLPKHFKHNNFSSFVRQLNTYGFRKVDPDRWEFANEGFLRGQKHLLRTITRRKPAHGHNHQQPQQPHGXXSSSVGACVEGGKFGLEEEVERLKRDKNVLMQELVRLRQQQQTTDNQLQTMVQRLISKQLLRFFFSY

SEQ ID NO: 6511 - protein, 522 aa, Glycine max
  unsure (1)..(522): unsure at all Xaa locations
GFPFPNNNATHSLISNYAFSFPIKFISPTWTAAGPLPAPIPNANAPPPFLSKTYDMVEDPSTDAIVSWSATNNSFIVWDPPQFARDLLPKYFKHNNFSSFVRQLNTYGFRKVDPDRWEFANEGFLKGQKHLLRSITRRKPAHGHHQQPQQPHGXXSSSVGACVEVGKFGLEEEVERLKRDKNVLMQELVRLRQQQQTTDNQLQTMVQRLQGMEQRQQQMMSFLAKAVQSPGFFAQFVQQQNDSNRRITEVNKKRRLKQEGMAETEHAATPDGQIIKYQPMVNEAAKAMLRQIMKWDTSXXVESLNKNSDNYVIGDGGMDSSSSSGWTSGVTLKEVSPASVQSXXHVPAATGTQGHVPSTVKPEXXLSVPQAVASEKVMKDGAHDPPSIPVSQADVMIPDLPPITEMVTGNILDIPEENYMATETDEGYMDSSLGAGGSFPIDFEGISPDADIDDLLANPIWDEILQTSVPEDIANVAEASKGNEVQPMENGWGKTQHMDHLTEQMGLLSXRCKKSLISMIYD

SEQ ID NO: 6512 - protein, 370 aa, Glycine max
MALLLDNCESILLSLDTHKSVPAPFLTKTYQLVDDPSTDHIVSWGEDDTTFVVWRPPEFARDLLPNYFKHNNFSSFVRQLNTYGFRKIVPDRWEFANEFFKKGEKNLLCEIHRRKTHHQHHQQVQAMNNHHHHHKFGLNVSSIFPFHNNRLSVSPSHDSDEVIIPNWCDSPPRGVAGVNNNNSSSNNYNTVTALSEDNERLRRSNNMLMSELAHMKKLYNDIIYFVQNHVKPVAPSNNNNFPSFLLCSDNSNINNNTSPQTQTQAQASPMSNVSTVQRQLKQFVGCYSNNTKQARAVNSPTNSSITIVEEEANSNSCKTKLFGVSLQSKKRVHPEYGSNNVLQSSETNKARLALENDELLGLNLMPPSTC

SEQ ID NO: 6513 - protein, 370 aa, Glycine max; identical to SEQ ID NO: 6512

SEQ ID NO: 6514 - protein, 382 aa, Glycine max
  unsure (1)..(382): unsure at all Xaa locations
MVKSNENGSGSVSVPPFLKKCYDMVEDRNTDSIIRWSDGGDSFVISDITQFSVTLLPTYFKHNNFSSFIRQLNIYGFRKIDTDSWEFANENFVRGQKHLLKNIHRRKHPHSADQQKALXHSKTIVTQEAPNHGLWKEVENLKLDKNSLTQELVKLRQHQESAESKLLLLSDRLQGMEKHQQQMLSFLVMVVQSPGFMVQLLHPKENNWRLAESWNRLDQDKQDDKPVASDGMPVVPLSPGFENQPEPELSADGLKDLCISSEFLKVLLDEKLSPLENHSPFLLPDLPDDGSWEQLFLGSPFLGNIQDSKNESEGHTNSGMEMEPTISETPNENSRTFESMIVEMEKTREXSWSCMHMVGCLHKIISIKYFSYGLSHTELMEL

SEQ ID NO: 6515 - protein, 399 aa, Glycine max
  unsure (1)..(399): unsure at all Xaa locations
MMEEAQGSSSSLPPFLTKIYEMVDDPSTNSIVSWSATNRSFIVWNPPEFSRDLLPKYFKHNNFSSFIRQLNTYGFRKIDPEQWEFANDDFVRGQPHLLKNIHRRKPVHSHSLQNIQGQGVSSLTESERQSFKDEIEKLKHEKEQLLRELEMHEQEWKMYEVQLQHSNDRLEKLEKKQENLVSSVSQVLQKPGIALNLLLLTENMDRKRRLPRSGLFSDDASIEDHMETSQVLPRENADGASIFSSSTERLDLLESSMTFWEDITHDVGDIFVQSHLNLDFDASTSCADSPAISCVQLEVEDQPKSPGINMNSEPSVVAVPDLDASKEQPVGKAPVTTGVNDIFWERFLTENPGSSEMQEAQSERKDSDGRSNAKFWWNIRNVNNPPEQMGHXLSQAQQT

SEQ ID NO: 6516 - protein, 299 aa, Glycine max
  unsure (1)..(299): unsure at all Xaa locations
MAKLPVEYNGDCATTASASASAAAESQRSIPTPFLTKTFQLVDDQSIDDVISWNDDGSTFIVWNPTVFARDLLPKYFKHNNFSSFVRQLNTYGFRKVVPDRWEFSNEYFRRGEKRLLCEIQRRKISSPASSPTAPATVSVTAPMPLTAIPIISPSNSGEEQVTSSNSXXPAELLDENERLRKENVQLTKELAEMRSLCNNIYSLMSNYANANGKGNSLESGMTAVKLLDLMPVMRSSDEDAAEMAPEEMNPKLFGVAIGAKRAREGGVKSEPLDFQNHRENQKTPWLSPCYRTNQRVCN

SEQ ID NO: 6517 - protein, 399 aa, Glycine max
  unsure (1)..(399): unsure at all Xaa locations
MMEEAQGSSSSLPPFLTKIYEMVDDPSTNSIVSWSATNRSFIVWNPPEFSRDLLPKYFKHNNFSSFIRQLNTYGFRKIDPEQWEFANDDFVRGQPHLLKNIHRRKPVHSHSLQNIQGQGVSSLTESERQSFKDEIEKLKHEKEQLLRELEMHEQEWKMYEVQLQHSNDRLEKLEKKQENLVSSVSQVLQKPGIALNLLLLTENMDRKRRLPRSGLFSDDASIEDHMETSQVLPRENADGASIFSSSTERLDLLESSMTFWENITHDVGDVFVQSHLNLDFDASTSCADSPAISCVQLEVEDQPKSPGINMNSEPSVVAVPDLDASKEQPVGKAPVTTGVNDIFWERFLTENPGSSEMQEAQSERKDSDGRSNAKFWWNIRNVNNPPEQMGHXLSQAQQT

SEQ ID NO: 6518 - protein, 399 aa, Glycine max
  unsure (1)..(399): unsure at all Xaa locations
MMEEAQGSSSSLPPFLTKIYEMVDDPSTNSIVSWSATNRSFIVWNPPEFSRDLLPKYFKHNNFSSFIRQLNTYGFRKIDPEQWEFANDDFVRGQPHLLKNIHRRKPVHSHSLQNIQGQGVSSLTESERQSFKDEIEKLKHEKEQLLRELEMHEQEWKMYEVQLQHSNDRLEKLEKKQENLVSSVSQVLQKPGIALNLLLLTENMDRKRRLPRSGLFSDDASIEDHMETSQVLPRENADGASIFSSSTERLDLLESSMTFWENITHDVGDVFVQSHLNLDFDESTSCADSPAISCVQLEVEDQPKSHGINVSSEPAVVAAPDLDASKEQPVETAPLTTGVNDIFWERFLTENPGSSEMQEAQSEREDSDGRSNAKFWWNIRNVNNPPEQMGHXLSKAEQT

SEQ ID NO: 6519 - protein, 399 aa, Glycine max; identical to SEQ ID NO: 6518
  unsure (1)..(399): unsure at all Xaa locations

SEQ ID NO: 6520 - protein, 299 aa, Glycine max
  unsure (1)..(299): unsure at all Xaa locations
MAPPLEHNGVSTSGDSQRSIPTPFLTKTYQLVDDHTIDDVISWNDSGSSFIVWNTTAFAKDLLPKYFKHNNFSSFVRQLNTYGFRKVVPDRWEFSNEYFRRGEKRLLCEIQRRKILSASXXPPAGATATVAVPSPLPLSAIPTAKPIVSPSNSAEEQVLSSNSSPARAPVELLDENERLRKENILLTKELVKMRSLCNNIFNLMSNYANAQADGSSAAAGCSGEDAVEEMNPKLFGVAIGKKRAREEEGHGAKYDTALSLHQPFHADVKSEALDLPGRGENKKTPWLNQCHRANQRVCN

SEQ ID NO: 6521 - protein, 143 aa, Glycine max
  unsure (1)..(143): unsure at all Xaa locations
MEXWNTTSSXNNNNVIAPFVIKTYNMVNDPTTDKLIMWGPANNSFIVLDPLDFSHSLLPAFFKHNNFSSFVRQLNTYGFRKVDPDRWEFANEWFLRGQKHLLRNIARRKHGGAGRSNFNLHSHHHPVKVEELDDETMVMEIAX

SEQ ID NO: 6522 - protein, 313 aa, Glycine max
  unsure (1)..(313): unsure at all Xaa locations
MEXWNTTSSXNNNVIAPFVIKTYNMVNDPTTDKLITWGPANNSFIVLDPLDFSHSLLPTFFKHNNFSSFVRQLNTYGFRKVDPDRWEFANEWFLRGQKHLLRNIVRKKHAHPLKLEELDDEAMVMEIARLKEEQKALEEELHEMNKRLETTEKRPQQMMAFLCKVVEDPQILSRILREREKKHLXERKSDASFRLRRRRQXTSSSSSSGIKTEFEEDEGNYNIKSSSPETGLEIDNNSNXYLFAAAAGVLGXXTGLLXGYNCASVPAPLXGGSAGVSDDGRRXYLRRGGFWGEMAAEGNAVPPYPFSLLEGGF

SEQ ID NO: 6523 - protein, 198 aa, Glycine max
  unsure (1)..(198): unsure at all Xaa locations
MEXWNTTSSXNNNVIAPFVIKTYNMVNDPTTDKLITWGPANNSFIVLDPLDFSHSLLPTFFKHNNFSSFVRQLNTYGFRKVDPDRWEFANEWFLRGQKHLLRNIVRKKHAHPLKLEELDDEAMVMEIARLKEEQKALEEELHEMNKRLETTEKRPQQMMAFLCKVVEDPQILSRILREREKKKKKKKKKKKKKKRAAX

SEQ ID NO: 6524 - protein, 301 aa, Glycine max
  unsure (1)..(301): unsure at all Xaa locations
MAPPPPVEHNGDSAATASASASAAAESQRSIPTPFLTKTYQLVDDQSIDDVISWNDDGSTFIVWNPTVFARDLLPKFFKHNNFSSFVRQLNTYGFRKVVPDRWEFSNDYFRRGEKRLLCEIQRRKISSPAPSPTAPTTVTVPMPLTAIPIISPSNSGEEQVISSNSSPLRAXXAELLDENERLRKENVQLTKELAEMRSLCNNIYSLMSSYGNKNGTQGSRESGMTAVKPLDLMPVKRSSGEDAADTVPTNPKLFGVAIGAKRAREGGXEEVEVVEIAEEEEEEETPWLSPCHRTNQRVCN

SEQ ID NO: 6525 - protein, 166 aa, Glycine max
  unsure (1)..(166): unsure at all Xaa locations
MKPLPAEQTGESAPTELQRSIPTPFLTKTYQLVDDPSADDLISWNEDGTSFIVWRPAEFARDLLPKYFKHNNFSSFVRQLNTYGFRKVVPDRWEFANDCFRRGERALLRDIQRRKLXAGSAACATGNAAEAELMVMISIIRIMTLIVGAIGKXNMXLLSLDLSTNX

SEQ ID NO: 6526 - protein, 305 aa, Glycine max
  unsure (1)..(305): unsure at all Xaa locations
SAPPLPWLHRRRWNTTATPPLXASASASAESQRSIPTPFLTKTYQLVDDQSIDDVISWNDDGSTFIVWNPTVFARDLLPKFFKHNNFSSFVRQLNTYGFRKVVPDRWEFSNDYFRRGEKRLLCEIQRRKISSPAPSPTAPTTVTVPMPLTAIPIISPSNSGEEQVISSNSSPLRAXXAELLDENERLRKENVQLTKELAEMRSLCNNIYSLMSSYGNKNGTQGSRESGMTAVKPLDLMPVKRSSGEDAADTVPTNPKLFGVAIGAKRAREGGXEEVEVVEIAEEEEEEETPWLSPCHRTNQRVCN

SEQ ID NO: 6527 - protein, 194 aa, Glycine max
  unsure (1)..(194): unsure at all Xaa locations
MAPLPAEQTGSSHGGESAPTELQRSIPTPFLTKTYQLVDDPSADDLISWNEDGTSFIVWRPAEFARDLLPKYFKHNNFSSFVRQLNTYGFRKVVPDRWEFANDCFRRGERALLRDIQRRKLXAGSAACATGNAAEAESLLIXVPKLFGVSIGLKRCRTECEAEPEGEDQNQMQTRAQTQSQSSQEPDHGFRCEI

SEQ ID NO: 6528 - protein, 490 aa, Glycine max
  unsure (1)..(490): unsure at all Xaa locations
XVTDFATQYQGITPSPRYCPSKPTAPLSTTTSSVAPFLSKTYDMVDDPSTDLVVSWGENNNSFVVWNVPQFATDILPNHFKHNNFSSFVRQLNTYGFRKVDPDRWEFANEGFLRGEKQLLKSISRRKSAHVNGSQQASQVHKSAAGACVEVGKFGLEEEVERLKRDKNVLMQELVRLRQKQQGTDNQLQNVGQRVQSMEQRQQQMMSFLAKAMQSPGFLAQFVQQQNESSKHIPGSNKKRRLQRQEEDSLATNLHSSLDGHIVKYQSSINEAAKALFRQILQINNSTTQSSIKNPDVFLIDDIPSAIASDSSSSSTQVSNVMVPPISELTSMEVGSQFPLSCMPSNISEVQSSPAVLGFCRSQGMAESSLLNHELNVMGADTRNMGEIDMMSTVLDEADEADHFSPDTDGISKLPEISDEFWELFLRPSPLTEDTEDLGCGLTEDQGLPSEMDKQENFDTIQHVDCLTQQMGLHALEYXLCVYMLLTTEG

SEQ ID NO: 6529 - protein, 458 aa, Glycine max
IRLEVVCVAPFLSKTYDMVDDPSTDLVVSWGENNNSFVVWNVPQFATDILPNHFKHNNFSSFVRQLNTYGFRKVDPDRWEFANEGFLRGEKQLLKSISRRKSAHVNGSQQASQVHKSAAGACVEVGKFGLEEEVERLKRDKNVLMQELVRLRQKQQGTDNQLQNVGQRVQSMEQRQQQMMSFLAKAMQSPGFLAQFVQQQNESSKHIPGSNKKRRLQRQEEDSLATNLHSSLDGHIVKYQSSINEAAKALFRQILQINNSTTQSSIKNPDVFLIDDIPSAIASDSSSSSTQVSNVMVPPISELTSMEVGSQFPLSCMPSNISEVQSSPAVLGFCRSQGMAESSLLNHELNVMGADTRNMGEIDMMSTVLDEADEADHFSPDTDGISKLPEISDEFWELLLRPSPLTEGTEETKCSSLGCGLTDDQGLPSEMGNKQENFDTILHVDRLTQQMGLHALEY

SEQ ID NO: 6530 - protein, 481 aa, Glycine max
  unsure (1)..(481): unsure at all Xaa locations
AXESVVXVDLPGMEGASWNSSVCVAPFLSKTYDMVDDPSTDLVVSWGENNNSFVVWNVPQFATDILPNHFKHNNFSSFVRQLNTYGFRKVDPDRWEFANEGFLRGEKQLLKSISRRKSAHVNGSQQASQVHKSAAGACVEVGKFGLEEEVERLKRDKNVLMQELVRLRQKQQGTDNQLQNVGQRVQSMEQRQQQMMSFLAKAMQSPGFLAQFVQQQNESSKHIPGSNKKRRLQRQEEDSLATNLHSSLDGHIVKYQSSINEAAKALFRQILQINNSTTQSSIKNPDVFLIDDIPSAIASDSSSSSTQVSNVMVPPISELTSMEVGSQFPLSCMPSNISEVQSSPAVLGFCRSQGMAESSLLNHELNVMGADTRNMGEIDMMSTVLDEADEADHFSPDTDGISKLPEISDEFWELFLXXPSPLTEDTEDLGCGLTEDQGLPSEMDKQENFDTIQHVDCLTQQMGLHALEYXLCVYMLLTTEG

SEQ ID NO: 6531 - protein, 193 aa, Glycine max
  unsure (1)..(193): unsure at all Xaa locations
MYMERIRVKEEEAVTCGGGSSSSSSSSSSFSPQPMEGLHEVGPPPFLSKIFDMVEDSSTDSIVSWSMARNSFVVWDSHKFSADILPRYFKHGNFSSFIRQLNAYGFRKVDPDRWEFANEGFLAGQRHLLKTIKRRRNVSQSLQQKGGSGACVEVGEFGLEGELERLKRDRNILMAEIVRLRHQQLNSREQLNX

SEQ ID NO: 6532 - protein, 192 aa, Glycine max
MYMERIRVKEEEAVTCGGGSSSSSSSSSSFSPQPMEGLHEVGPPPFLSKIFDMVEDSSTDSIVSWSMARNSFVVWDSHKFSADILPRYFKHGNFSSFIRQLNAYGFRKVDPDRWEFANEGFLAGQRHLLKTIKRRRNVSQSLQQKGGSGACVEVGEFGLEGELERLKRDRNILMAEIVRLRHQQLNSREQLN

SEQ ID NO: 6533 - protein, 193 aa, Glycine max
MYMERIRVKEEEAVTCGGGSSSSSSSSSSFSPQPMEGLHEVGPPPFLSKIFDMVEDSSTDSIVSWSMARNSFVVWDSHKFSADILPRYFKHGNFSSFIRQLNAYGFRKVDPDRWEFANEGFLAGQRHLLKTIKRRRNVSQSLQQKGGSGACVEVGEFGLEGELERLKRDRNILMAEIVRLRHQQLNSREQLNS

SEQ ID NO: 6534 - protein, 356 aa, Glycine max
  unsure (1)..(356): unsure at all Xaa locations
MAPLPAEQTGESAPTELQRSIPTPFLTKTYQLVDDPSADDLISWNEDGTSFIVWRPAEFARDLLPKYFKHNNFSSFVRQLNTYGFRKVVPDRWEFANDCFRRGERALLRDIQRRKLLPVPPAAAAPAAVTANTVTVAVAAPAVRTVSPTTSGDEQVLSSNSSPIAGNNNNNTVHRTTSCTTAPELLEENERLRKENIQLSNELSQLKGLCNNILSLMTNYASGFSRQQLESSTSAVRTVPVPDGKXAASSRIPSFVSSADEAGHVGGAAPCATANAGEAEVPKLFGVSIGLKRCRTECEGEAEGEDQNQVQTRAQAQTQTQSSQEPDHGSDVKSEPLDGDDSDDQDHDPRWLELGK

SEQ ID NO: 6535 - protein, 189 aa, Glycine max
MAPLPAEQTGESAPTELQRSIPTPFLTKTYQLVDDPSADDLISWNEDGTSFIVWRPAEFARDLLPKYFKHNNFSSFVRQLNTYGFRKVVPDRWEFANDCFRRGERALLRDIQRRKLLPVPPAAAAPAAVTANTVTVAVAAPAVRTVSPTTSGDEQPPAVRILHKRCEDRAGAGREGAAGAFARETCFIG

SEQ ID NO: 6536 - protein, 131 aa, Glycine max
  unsure (1)..(131): unsure at all Xaa locations
ILSSYLLLLLPSSLSDKAAKTXNXGFMEGASRNGSVCVAPFLSKTYDMVDDPSTDSVVSWGKNNNTFVVWNVPQFTTDILPKHFKHNNFSSFVRQLNTYGFRKVDPDRWEFANEGFLRGEKQLLKSIIVGF

SEQ ID NO: 6537 - protein, 355 aa, Glycine max
MKPLPAEQTGESAPTELQRSIPTPFLTKTYQLVDDPSADDLISWNEDGTSFIVWRPAEFARDLLPKYFKHNNYSSFVRQLNTYGFRKVVPDRWEFANDCFRRGERALLRDIQRRKLLPVPPAAAAPTAVTANTVTVAVAAPAVRTVSPTTSGDEQVLSSNSSPIAGNNNNTVHRTTSCTTAPELLDENERLRKENMQLSNELSQLKGLCNNILALMTNYASGFSRQQLESSTSAARTVPVPEGKAALELLPAKHVSSADEAGHVGGAAPCATANAGEAEVPKLFGVSIGLKRCRTECEGEAEGEDQNQMQTRAQAQTQTQSSQEPDHGSDVKSEPLDGDDSDDQDHDPRWLELGK

SEQ ID NO: 6538 - protein, 160 aa, Glycine max
  unsure (1)..(160): unsure at all Xaa locations
MAFTLDRLENMVFTLESQKSVPAPFLTKTYQLVDDPHTDHIVSWGEDETTFVVWRPPEFARDLLPNYFKHNNFSSFVRQLNTYGFKKVVADRWEFANEYFRKGAKHLLCEIHRRKAPQQHHQXSFMTNHHPKFFSKMKISXWSXHSSTISKTKHRYSNSX

SEQ ID NO: 6539 - protein, 373 aa, Glycine max
  unsure (1)..(373): unsure at all Xaa locations
GFLGESSSFCGGYDPQPIMVVPQPIEGLHETGPPPFLTKTYDIVDDPSTNHIVSWSTGNNSFVVWDPQAFSVTLLPKFFKHNNFSXFVRQLNTYGFKKVDPDKWEFANEMFLRGQRILLKNIRRRKXXNHHQSHQHAMQQGVEEPFVEVGQFELDGEIDRLRRDRQVLMVELVKLRQQQQSTKSHLQEMEGRIKMTEQKQKQMMNFLARAMQNPNFVQQLAQQKECSRELEEVFSNKKRRPIDQGPNVVEVADDDDGYXGCAEECSDFVKLEPQEYYSDDKVLEFEVPDLDLALNLDEENIESQKRIMEEEHVQLENSRERYIDEVFWQDLLNEGIEDQGVLGVEDVDVLAKQLGYLAXIGDYQGCIFYYSLN

SEQ ID NO: 6540 - protein, 449 aa, Glycine max
  unsure (1)..(449): unsure at all Xaa locations
IRLELSLPPPSSLHPPQPLEILQMNPVPPFLSKTFDLVDDPTLDPIISWGSTGFSFVVWDPLEFARIVLPRHFKHNNFSSFVRQLNTYGFRKIDTDKWEFFNEAFQRGKKHLLKNIQRRRSSQSQQVGSYIGSSTEAGRSDVDEIERLRKERTMLMEEVVDLKQEQRRMAHRAGEVNQRLQSTEQRQKQMVSFLVKLIQNPAFLARLRXXEEQKEIDSPRVVRKFVKQHQHETGTAETLQEGQIVRYQHDWRNIGMSSETPKLSPVSIEQSPXLPFTGFGRRSECRRRRSYCSNREYCIKXLGCSARDHRGLSSFGAEDPLFKGKSVMSPILEVPPEYFASFPEGLTKGKDFQDFSALGTEGMIKLEDIWDSGLNVSGAASGSGNELWSNHVNYVPEFGVTSGMSDSDIWDIGLGSLGIDKWPTDEPSLGETNGQAGQPKEDRPKNFGP

SEQ ID NO: 6541 - protein, 389 aa, Glycine max
  unsure (1)..(389): unsure at all Xaa locations
MGGEEVARVKAELFDDNESDRNDDDVLSESKDSGVTTAHAVKEEMDDGAANWSSSSSTSPKPMEGLHEVGPPPFLKKTFEMVEDPHTNPIVSWSQTRHSFVVWDSHEFSKTLLPKYFKHSNFSSFVRQLNTYGFRKVDSDRWEFANEGFQGGKKHLLKNIRRRSXVQQTASGSIQYDEARRGFXEVEKLKKDQNILKVEILKLRQQQENSHVQLTNVQERIRCAEMKQFQMMYFLTRMARRPAFVEQLVHKIRRKREIDGNDMVKRPRLMGNPCHVPFPKTMETTPNFDYRHQQGHKQFAARAQDASSSAYHVMSEKLMRENSIVDEELDVNANIYLELEDLITKPTDWSVGSASGLVEQTSXINLTSGIVPCNGCKSVLVWMLCCNTR

SEQ ID NO: 6542 - protein, 444 aa, Glycine max
  unsure (1)..(444): unsure at all Xaa locations
MNPNDANSPKPRPLEILQMNPVPPFLSKTFDLVDDPTLDPIISWGSTGFSFVVWDPLEFARIVLPRHFKHNNFSSFVRQLNTYGFRKIDTDKWEFFNEAFQRGKKHLLKNIQRRRSSQSQQVGSYIGSSTEAGRSDVDEIERLRKERTMLMEEVVDLKQEQRRMAHRAGEVNQRLQSTEQRQKQMVSFLVKLIQNPAFLARLRXXEEQKEIDSPRVVRKFVKQHQHETGTAETLQEGQIVRYQHDWRNIGMSSETPKLSPVSIEQSPXLPFTGFGRRSECRRRRSYCSNREYCIKXLGCSARDHRGLSSFGAEDPLFKGKSVMSPILEVPPEYFASFPEGLTKGKDFQDFSALGTEGMIKLEDIWDSGLNVSGAASGSGNELWSNHVNYVPEFGVTSGMSDSDIWDIGLGSLGIDKWPTDEPSLGETNGQAGQPKEDRPKNFGP

SEQ ID NO: 6543 - protein, 349 aa, Glycine max
  unsure (1)..(349): unsure at all Xaa locations
PRVRPRVRPRVRTAARRRQKGTAGRRRQKGTAARRRQKGTAARRRQKGTAARRPQKGNGVSTSGDSLRSIPTPFLTKTFQLVDDHTIDHVISWNDSGSSFIVWNTTVFDKDLLSKYFRHNNFSSFVRQLNTYGFRKVVPDRWEFSNEYFRRGEKRLLCEIQRRKILSASXXPPAGATATVAVPSPLPLSAIPTAKPIVSPSNSAEEQVLSSNSSPARAPVELLDENERLRKENILLTKELVKMRSLCNNIFNLMSNYANAQADGSSAAAGCSGEDAVEEMNPKLFGVAIGKKRAREEEGHGAKYDTALSLHQPFHADVKSEALDLPGRGENKKTPWLNQCHRANQRVCN

SEQ ID NO: 6544 - protein, 364 aa, Glycine max
  unsure (1)..(364): unsure at all Xaa locations
KLKKQWRMLMLLQLAQQHLQTSPRXPMEGLHEVGPPPFLTKTFDVVEDPSTNDIVSWSRSRNSFVVWDSHKFSTTILPRYFKHNNFSSFVRQLNTYGFRKIDPDKWEFANEGFLAGQRQLLKTIKRRRHVTVTQNEGGSGACVELGEFGLEGEMERLRRDRTVLMAEIVRLRQQQHNSREQLLSMETRLQATEKKHQQMMNFLAKALNNQAFIQQFLQRNAQNKELQGARRKRRLTATPSVENLQQDHFALSIEEGSATIESLESFFSAACNDPLESNSELXRPNIEXSVPVASGSNLGEVSDSVWEDLLNQDLVAGDXXEEEVVIGDFSQVDVPVEDLIADADEWSEDLQNLVDHMGYLGSKP

SEQ ID NO: 6545 - protein, 461 aa, Glycine max
  unsure (1)..(461): unsure at all Xaa locations
XLSATKLHSVSVVANSRFSSFSLAFTHSAGAGGPAPFLLKTYDMVDDASTNDIVSWSSTNNSFVVWNPPEFARLLLPTYFKHNNFSSFIRQLNTYGFRKIHPERWEFANDEFLKDQKHLLKNIYRRKPIHSHSHPPGSLVDPERAAFEEEIDKLSREKTSLESNIYNFKQHQSTAKPKLEDFLQRLDGIEKRQKQLLNFXDLSAYKIRRLPQVDHAQPGAGSCLQVNHSNFRVEFGKVRRRAFSRWLSRVLSPARPDLDWVPRSPQRANEDGESPQKKLSEVEPRGVQTRTALTFAPETLELADTGASFTFKMDSCLSRRATTAESSKLISLEPGSEEGDSLSCQLNLTLASCPLQVNRNSYSARSPQKSDSGVSSNLNVAAEATNLASSQEAPSNNQVNPAPPDRVNDVFWEQFLTERPGCSDNEEAISNYRANPYDEQDEGRSTHGISRNIKNMDQLTL

SEQ ID NO: 6546 - protein, 481 aa, Glycine max
  unsure (1)..(481): unsure at all Xaa locations
XLSLSKLHSVSVVANSRFSSFSLAFTHSAGAGGPAPFLLKTYDMVDDASTNDIVSWSSTNNSFVVWNPPEFARLLLPTYFKHNNFSSFIRQLNTYGFRKIHPERWEFANDEFLKDQKHLLKNIYRRKPIHSHSHPPGSLVDPERAAFEEEIDKLSREKTSLESNIYNFKQHQSTAKPKLEDFLQRLDGIEQRQKQLLNFFEKALQNPTFVEHLSRKIESMDLSAYKKRRLPQVDHVQPVAESSLVDNHSNFRMEFGNVFRQDFSNKLRLELSPAVSDMNLVSRSTQSSNEDGESPQKKLSEVEPRGVQTRTALTFAPETLELADTGASFTFKMDSCLSRRATTAESSKLISLEPGSEEGDSLSCQLNLTLASCPLQVNRNSYSARSPQKSDSGVSSNLNVAAEATNLASSQEAPSNNQVNPAPPDRVNDVFWEQFLTERPGCSDNEEAISNYRANPYDEQDEGRSTHGISRNIKNMDQLTL

SEQ ID NO: 6547 - protein, 468 aa, Glycine max
  unsure (1)..(468): unsure at all Xaa locations
GSGKINSXSEMDGAPQSAGGPAPFLLKTYEMVDDASTNDIVSWSSTNNSFVVWNPPEFARLLLPTYFKHNNFSSFIRQLNTYGFRKIHPERWEFANDEFLKDQKHLLKNIHRRKPIHSHSHPPGSLVDPERAAFEEEIDKLSREKNSLESNIRNFKQHQSTAKPKLEDFLQRLDGVDKRQKQLLNFFEKALQNPTFVEHLSRKIESMDLSAYKKRRLPQVDHVQPVAESSLVDNHSNFRMEFGNVFRQDFSNKLRLELSPAVSDMNLVSRSTQSSNEDGESSQKKLSEVEPRGVQTRTALTFAPETLELADTGASFTFKMDSCLSRRATTAESSKLISLEPSSEEGDSLSCQLNLTLASCPLQVNRNSYSARSPQKSDSGVSSNLNVAAEATNLASSQEAPSNNQVNPAPPDRVNDVFWEQFLTERPGCSDNEEAISNYRANPYDEQDEGRSTHGISRNIKNMDQLTL

SEQ ID NO: 6548 - protein, 279 aa, Glycine max
  unsure (1)..(279): unsure at all Xaa locations
MAPPLEHNGVSTSGDSLRSIPTPFLTKTFQLVDDHTIDHVISWNDSGSSFIVWNTTAFAKDLLPKYFKHNNFSSFVRQLNTYGFRKVVPDRWEFSNEYFRRDEKRLLCEIQRRKILPAXXPPTRATATAAVLSPLPLSTIPPAKLIVSPSNSAEEQVISSNSSPAELLDENDRLRKENILLTKELEEMRSLCNNIFNLMSNYANVQADGGSAGXXAARCFGEDAVEEXXNPKLFGVVIGTKRAREENDTVLTLDFARRGENKKTPWLNQCHRANQRVCN

SEQ ID NO: 6549 - protein, 342 aa, Glycine max
  unsure (1)..(342): unsure at all Xaa locations
MALLLDNCEGILLSLDSHKSVPAPFLTKTYQLVDDPATDHIVSWGEDDTTFVVWRPPEFARDLLPNYFKRNNFSSFVRXQLNTYGFRKIVPDRWEFANEFFKKGEKHLLCEIHRRKTAXXPQQGIMNHHHHHAHFNVNVPTFFPFSSRVSISTSNDSDDQXXNWCDSPPRGATSLVNGAAAAANYNTSVTALSEDNERLRRSNNMLMSELAHMKKLYNDIIYFVQNHVKPVAPSNSYSXXSLLLCNTPSCHSNNXWRQCFNDAKANEPAXXGYYSTNPKQXSYTNNSTXQTYVVNSPTNTSRSSITIVEGPNSNINSCKTKLFGVSLQSKKRVHPDYGSNPE

SEQ ID NO: 6550 - protein, 279 aa, Glycine max; identical to SEQ ID NO: 6548
  unsure (1)..(279): unsure at all Xaa locations

SEQ ID NO: 6551 - protein, 212 aa, Glycine max
  unsure (1)..(212): unsure at all Xaa locations
LFTHQKKHSMKGVTVKVEETMAYANAASTSPTTSSNLSPQPMEGLHEVGPPPFLTKTFDVVEDPSTNDIVSWSRSRNSFVVWDSHKFSTTILPRYFKHNNFSSFVRQLNTYGFRKIDPDKWXFANEGFLAGQRQLLKTIKRRRHVTVTQTQSHEGGSGACVELGEFGLEGEMERLRRDRTVLMAEIVRLRQQQHNSREQLGEVEERQDSVDG

SEQ ID NO: 6552 - protein, 476 aa, Glycine max
  unsure (1)..(476): unsure at all Xaa locations
GSSSSXLEPMNSSPSSSQLPSSSADFDKFNSLPRFRPLECLQGNPVPAFLSKTFELVDDPSLDPIISWGSTGVSFVVWDPTLFARHVLPRNFKHNNFSSFVRQLNTYGFRKIDTEKWEFFNEAFQRGKRHLLKNIRRRGPPQSHQVGGNIVPYSDADKAGLDELESLRKERSVLMQEVVELQQQQRTTLQRARQVNQRLQSAELIQKQMVSFLARLFEKPAFLTSLQHAKEQRDLGCPKVRRRFIKQHQGQTEISDFLNEGQIVRYQPDWRNVTTSSEIQEMYPVSLEESPNYLSQALAKEFSEGTENLISDEVMSIADTMGFKSSSFGLDGNLFKGKNVMSSNEGLLAEEFVSFPEDLTKETGFPEFSPLGTEGIIKREDKRNTNFDVSGADSSSGNEQWDPINYEVPEFVVTSGMTDMWDINYLXXSQQVTESIPTDDSTLDEKESNINKNMDASGFICFCTYCAVFSSQGSNY

SEQ ID NO: 6553 - protein, 450 aa, Glycine max
GSSFEQNPNDGNNSPSPKPLEMVNPVPPFLSKTFDLVDAPTLDPIISWNSTGLSFVVWDPLEFARIVLPRHFKHNNFSSFVRQLNTYGFRKIDTDKWEFFNEAFQRGKKHLLKNIQRRRSSQSQPVGSYIGIGSSTEAGGSEVDEIERLRKEKTMLMEEVVDLQQEQRRTAHHAGEVNLRLQSAEQRQKQMVSFLAKLIQNPAFLARLRHKKEQKEIDSPRVVRKFVKQHHETGTTTTAETLQEGQIVRYQPDWRNIAMSSETPKLSSVSIEQSPHYLLGAEDLTAQNNIVSDDLAAVHRITPSQEMMIGEGSSTFGAEDPLFKGKSVMSPILEVPPEYFPSFPEGLTKEKNFQDFSALGTEGMIKLEDIWDSGLNVSGAALSSGNELWGNHVNYVPQFGVTSGMSDSDIWDIGLGSFGIDTWPTDEPSLGETDGQSGQPNEDRSKNFDP

SEQ ID NO: 6554 - protein, 299 aa, Glycine max
  unsure (1)..(299): unsure at all Xaa locations
MAPPLEHNGVSTSGDSQRSIPTPFLTKTYQLVDDHTIDDVISWNDSGSSFIVWNTTAFAKDWLPKGSRHNNFSSFVRQLNTYGFRKVVPDRWEFSNEYFRRGEKRLLCEIQRRKILSASXXPPAGATATVAVPSPLPLSAIPTAKPIVSPSNSAEEQVLSSNSSPARAPVELLDENERLRKENILLTKELVKMRSLCNNIFNLMSNYANAQADGSSAAAGCSGEDAVEEMNPKLFGVAIGKKRAREEEGHGAKYDTALSLHQPFHADVKSEALDLPGRGENKKTPWLNQCHRANQRVCN

SEQ ID NO: 6555 - protein, 449 aa, Glycine max
IRLELSLPPPSSLHPPQPLEILQMNPVPPFLSKTFDLVDDPTLDPIISWGSTGFSFVVWDPLEFARIVLPRHFKHNNFSSFVRQLNTPGFRKIDTDKWEFFNEAFQRGKKHLLKNIQRRRSSQSQQVGSYIGSSTEAGRSDVDEIERLRKERTMLMEEVVDLKQEQRRMAHRAGEVNQRLQSAEQRQKQMVSFLVKLIQNPAFLARLRHKKEQKEIDSPRVVRKFVKQHHETGTTTTAETLQEGQIVRYQPDWRNIAMSSETPKLSSVSIEQSPHYLLGAEDLTAQNNIVSDDLAAVHGITPSQEMMIGEGSSTFGAEDPLFKGKSVMSPILEVPPEYFASFPEGLTKEKNFQDFSALGTEGMIKLEDIWDSGLNVSGAALSSGNELWGNHVNYVPQFGVTSGMSDSDIWDIGLGSLGIDTWPTDEPSLGETDGQSGQPNEDRSKNFDP

SEQ ID NO: 6556 - protein, 449 aa, Glycine max
  unsure (1)..(449): unsure at all Xaa locations
XALNMNPNDGNNSPSPKPLEMVNPVPPFLSKTFDLVDAPTLDPIISWNSTGLSFVVWDPLEFARIVLPRHFKHNNFSSFVRQLNTYGFRKIDTDKWEFFNEAFQRGKKHLLKNIQRRRSSQSQPVGSYIGIGSSTEAGGSEVDEIERLRKEKTMLMEEVVDLQQEQRRTAHHAGEVNLRLQSAEQRQKQMVSFLAKLIQNPAFLARLRHKKEQKEIDSPRVVRKFVKQHHETGTTTTAETLQEGQIVRYQPDWRNIAMSSETPKLSSVSIEQSPHYLLGAEDLTAQNNIVSDDLAAVHRITPSQEMMIGEGSSTFGAEDPLFKGKSVMSPILEVPPEYFPSFPEGLTKEKNFQDFSALGTEGMIKLEDIWDSGLNVSGAALSSGNELWGNHVNYVPQFGVTSGMSDSDIWDIGLGSFGIDTWPTDEPSLGETDGQSGQPNEDRSKNFDP

SEQ ID NO: 6557 - protein, 168 aa, Glycine max
  unsure (1)..(168): unsure at all Xaa locations
XSFVALDHSLVKDERRRRHGVXSGSGGTVAPFVAKTFAMVDDPATDAVVRWGPASNSFVVADPFTFSHALLPAHFKHANFSSFVRQLNTYGFRKVDPDRWEFAHASFLRGQTHLLPRIVRRRSGGKGGKEDADGEEDEDISSKMLAMEVVRLKEEQRATEDRLASMRX

SEQ ID NO: 6558 - protein, 236 aa, Glycine max
  unsure (1)..(236): unsure at all Xaa locations
EEARKRKEENIXSSCNSHELWSPPPFLLKTYMLVEDPATDDVISWNAKGTAFVVWQPPEFARDLLPTLFKHSNFSSFVRQLNTYGFRKIATSRWEFFNDRFKKGERELLHEIRRRKAWTSKQQPKAPNQATLQDSDEDQRSSSISSSSGYTTLVDENKRLKKENGVLNSELTSMKRKCKELLDLVAKYSSHAKEEKEDERPMLFGVRLDVQGEREMKRHRAEMSESASIMLSQSCK

SEQ ID NO: 6559 - protein, 363 aa, Glycine max
MAVLLDNCEGILLSLDSHKSVPAPFLTKTYQLVDAPPARAESARGEDDTTFVVWRPPEFARDLLPNYFKHNNFSSFVRQLNTYGFRKIVPDRWEFANEFFKKGEKHLLCEIHRRKTAQPQQGIMNHHHHHAHSPLGVNVNVPTFFPFSSRVSISTSNDSDDQSNWCDSPPRGATSLVNGAAAANYNTSVTALSEDNERLRRSNNMLMSELAHMKKLYNDIIYFVQNHVKPVAPSNSYSSSLLLCNTPSATPISSANNVSMMQRPMNQLLGYYSTNPKQGATQITQPQTYVVNSPTNTSRSSITIFEGPASSNINSCKTKLFGVSLQSKKRVHPDCGSNPETNRARLVLEKDDLGLNLMPPSTC

SEQ ID NO: 6560 - protein, 149 aa, Glycine max
  unsure (1)..(149): unsure at all Xaa locations
XLEVSWSRGNNSFVVWDPQAFSITLLPRYFKHNNFSSFVRQLNTYGFRKVDPDKWEFANEGFLRGQKHLLKNIRRKKTLTNQQQALPNHCVEVGRFGSLDGEVDALRRDKQVLMVELVKLRQQQQNTRSFLHXPLLNQLLQEVGVPRSX

SEQ ID NO: 6561 - protein, 159 aa, Glycine max
  unsure (1)..(159): unsure at all Xaa locations
XGCVGGNNSPSPKPLEMVNPVPPILSKTFDLVDAPTLDPIISWNSTGLSFVVWDPLEFARIVLPRHFKYNNFSSFVRQLNTYVTRCLSSXGFRKIDTDKWEFFNEAFQRGKKHLLKNIQRRRSSQSQRSYIGIGSSTEAGGSEVEIEIERLRKEKTMLX

SEQ ID NO: 6562 - protein, 100 aa, Glycine max
MKPLPAEQTGESAPTELQRSIPTPFLTKTYQLVDDPSADDLISWNEDGTSFIVWRPAEFARDLLPKYFKHNNYSSFVRQLNTYGFRKVVPDRWEFANYCF

SEQ ID NO: 6563 - protein, 130 aa, Glycine max
EQKNKNKKMEGTSNKGLLECGRKCTPPPFLLKTYMLVEDPATDDVISWNAKGTAFVVWQPPEFARDLLPTLFKHSNFSSFVRQLNTYVRGFRKVATSRWEFFNDKFKKGERELLHEIRRRKSEPMKHNLC

SEQ ID NO: 6564 - protein, 246 aa, Glycine max
  unsure (1)..(246): unsure at all Xaa locations
MWKEEAEKCTPPPFLLKTYMLVDDPATDDVVSWNSEGTAFVVWQPAEFARDLLPTLFKHSNFSSFVRQLNTYKCGFRKVATSRWELLNDKFKKGERELLHEIRRRKAWNXASNNLMHQXQGTPRDSDEDQRSSSSSSSSFHYSCEXNKRLKKENGVLNSELTSMKRKCKELLDLVATYSSHAKXEKKDERPMLFGVRLEVQGGREMKRHRAEMSESTSIMLSQVMQIARYDIIHRGFLRVLGIDTE

SEQ ID NO: 6565 - protein, 89 aa, Glycine max
  unsure (1)..(89): unsure at all Xaa locations
GCXIGNSSKAQPQRGSTPAAPIPNANAPPPFLSKTYDMVEDPSTDAIVSWSATNNSFIVWDPPEFARDLLPKYFKHNNFSSFVRQLNTX

SEQ ID NO: 6566 - protein, 142 aa, Glycine max
EFRFIVWRPAEFARDLLPKYFKHNNFSSFVRQLNTYGFRKVVPDRWEFANDCFRRGERALLRDIQRRKLLPVPPAAAAPAAVTANTVTVAVAAPAVRTVSPTTSGDEQPPAVRILHKRCEDRAGAGREGAAGAFARETCFIG

SEQ ID NO: 6567 - protein, 402 aa, Medicago sativa
MDEAGSSSSLPPFLAKTYEMVDDRSSDPIVSWSASNKSFVVWNPPEFARVLLSEILKHNNFSSFIRQLNTYGFRKVDPEQWEFANDDFIRGQPHLMKNIHRRKPVHSHSLHNLQAQASLTESERQSMIDEIEKLKQDREQLLVETKRYQHDWERHEIQMHCSKDQLEKLEHKQQKMLSSVSEALQKPMIAVNLLPLAEAMERKRRLPARSVCFNNEASVEDAMETSVALPRENSEDNFYFDVKHREIGSTSRHPWHFGKTLAHEVGDNFVHTHSNMDLDESTCCADRLSISCQQLDGEVRPKSPEIDMNVEPAAAALEAVAVKEQPARITTAATGVNDVFWEQFLTEDPGASEAQEVQSERKDNSSRKNEGKPSDHGRFWWNMRKSNNHPEQMGHVSQVEKI

SEQ ID NO: 6568 - protein, 95 aa, Pisum sativum
MEGLHETGPPPFLTKTFDVVEDPSTDGIVSWSRARNSFVVWDLSKFSTAILPRYFKHSNFSSFVRQLNTYGFRKVDPDRWEFANEGFLAGQRILL

SEQ ID NO: 6569 - protein, 440 aa, Oryza sativa (japonica cultivar-group)
MEGGGGGGSLPPFLSKTYEMVDDPSTDAVVGWTPAGTSFVVANQPEFCRDLLPKYFKHNNFSSFVRQLNTYGFRKVDPEQWEFANEDFIKGQRHRLKNIHRRKPIFSHSSHSQGAGPLTDNERKDYEEEIERLKSDNAALSSELQNNTLKKLNMEKRMQALEEKLFVVEDQQRSLISYVREIVKAPGFLSSFVQQQDHHRKKRRLPIPISFHEDANTQENQIMPCDLTNSPAQTFYRESFDKMESSLNSLENFLREASEEFGNDISYDDGVPGPSSTVVLTELHSPGESDPRVSSPPTRMRTSSAGAGDSHSSRDVAESTSCAESPPIPQMHSRVDTRAKVSEIDVNSEPAVTETGPSRDQPAEEPPAVTPGANDGFWQQFLTEQPGSSDAHQEAQSERRDGGNKVDEMKSGDRQHLWWGKRNVEQITEKLGLLTSTEKT

SEQ ID NO: 6570 - protein, 506 aa, Oryza sativa (japonica cultivar-group)
MEAAVAAAAAAAGAVTTAVAPPPGAAVSNGVATAPPPFLMKTYEMVDDPATDAVVSWGPGNNSFVVWNTPEFARDLLPKYFKHSNFSSFVRQLNTYGFRKVDPDRWEFANEGFLRGQKHLLKTINRRKPTHGNNQVQQPQLPAAPVPACVEVGKFGMEEEIEMLKRDKNVLMQELVRLRQQQQTTDHQLQTLGKRLQGMEQRQQQMMSFLAKAMHSPGFLAQFVQQNENSRRRIVASNKKRRLPKQDGSLDSESASLDGQIVKYQPMINEAAKAMLRKILKLDSSHRFESMGNSDNFLLENYMPNGQGLDSSSSTRNSGVTLAEVPANSGLPYVATSSGLSAICSTSTPQIQCPVVLDNGIPKEVPNMSAVPSVPKAVAPGPTDINILEFPDLQDIVAEENVDIPGGGFEMPGPEGVFSLPEEGDDSVPIETDEILYNDDTQKLPAIIDSFWEQFLVASPLSVDNDEVDSGVLDQKETQQGNGWTKAENMANLTEQMGLLSSHHTG

SEQ ID NO: 6571 - protein, 372 aa, Oryza sativa (japonica cultivar-group)
MDDPMLNAVKEEESHGDGGGLEVVAGEDGAAAVAAGVAPRPMEGLHDAGPPPFLTKTYDMVDDAGTDAAVSWSATSNSFVVWDPHAFATVLLPRFFKHNNFSSFVRQLNTYGFRKVDPDRWEFANENFLRGQRHLLKNIKRRKPPSHTASNQQSLGPYLEVGHFGYDAEIDRLKRDKQLLMAEVVKLRQEQQNTKANLKAMEDRLQGTEQRQQQMMAFLARVMKNPEFLKQLMSQNEMRKELQDAISKKRRRRIDQGPEVDDVGTSSSIEQESPALFDPQESVEFLIDGIPSDLENSAMDAGGLVEPQDFDVGASEQQQIGPQGELNDNFWEELLNEGLVGEENDNPVVEDDMNVLSEKMGYLNSNGPTAGE

SEQ ID NO: 6572 - protein, 459 aa, Oryza sativa (japonica cultivar-group)
MESSNLGGGGGGGGGGGPPPFLIKTYEMVEDAATNHVVSWGPGGASFVVWNPLDFSRDLLPKYFKHNNFSSFIRQLNTYGFRKIDPERWEFANEDFIRGHTHLLKNIHRRKPVHSHSLQNQINGPLAESERRELEEEINRLKYEKSILVADLQRQNQQQYVINWQMQAMEGRLVAMEQRQKNIVASLCEMLQRRGGAVSSSLLESDHFSKKRRVPKMDLFVDDCAAGEEQKVFQFQGIGTDAPAMPPVLPVTNGEAFDRVELSLVSLEKLFQRANDACTAAEEMYSHGHGGTEPSTAICPEEMNTAPMETGIDLQLPASLHPSSPNTGNAHLHLSTELTESPGFVQSPELPMAEIREDIHVTRYPTQADVNSEIASSTDTSQDGTSETEASHGPTNDVFWERFLTETPRSCLDESERQESPKDDVKAELGCNGFHHREKVDQITEQMGHLASAEQTLHT

SEQ ID NO: 6573 - protein, 376 aa, Oryza sativa (japonica cultivar-group)
MNPLRVIVKEEELDFAAAAAAAAAGEGSPSSWAVGVMDLPRPMEGLGEAGPPPFLCKTYEVVDDPGTDTVISWGFAGNSFVVWDANAFAAVLLPRYFKHSNFSSFVRQLNTYGFRKVDPDRWEFANEGFLRGKKELLKTIKRRRPPPSSPPSSSSSSSSSQHQQQPAAACLEVGQFGRDGVVNRLQRDKSVLIAEVVKLRQEQQTTRAQMQAMEERISAAEQKQQQMTVFLARAMKNPGFLQMLVDRQAGQHGARNRVLEDALSKKRRRPIEYLLTRNGETCAAGESAAMLAADGVAEPDGDTTPRGDGGGGGGGDTESFWMQLLSLGLEEKQREDGVAGGVQESNSGGADVDNDEEDDDDDVDVLVQSIYHLSPK

SEQ ID NO: 6574 - protein, 250 aa, Oryza sativa (japonica cultivar-group)
MMGGECKVHQLQAAGDGGPGAVAPFVAKTFHMVSDPSTNAVVRWGGAGNTFLVLDPAAFSDFLLPSYFKHRNFASFVRQLNTYGFRKVDPDRWEFAHESFLRGQAQLLPRIVRKKKKGGAAPGCRELCEEGEEVRGTIEAVQRLREEQRGMEEELQAMDQRLRAAESRPGQMMAFLAKLADEPGVVLRAMLAKKEELAAAGNNGSDPCKRRRIGADTGRGGVATGGDAAEMAQSRGTVPFPFSVLGQVFY

SEQ ID NO: 6575 - protein, 406 aa, Oryza sativa (japonica cultivar-group)
MGSKKRSPQHPAAAAPPPAVGGGGGGEVSGDGGASTANGPVVPKPSEVAPFLTKVYDMVSDPATDNVISWAEGGGSFVIWDSHAFERDLHRHFKHSNFTSFIRQLNTYGFRKVHPDRWEWANEGFIMGQKHLLKTIKRRKKSSQESPSEIQKAPVKTAPGTENIEIGKYGGLEKEVETLKRDKALLMQQLVDLRHYQQTSNLEVQNLIERLQVMEQNQQQMMALLAIVVQNPSFLNQLVQQQQQQRRSNWWSPDGSKKRRFHALEQGPVTDQETSGRGAHIVEYLPPVPETSGQVNPVEGAICSANSQPVPSPAVATPMDMQTSNVADTLGSSEEPFADNSTLHEWDDNDMQLLFDDNLDPILPPFENDGQMGPPLSVQDYDFPQLEQDCLMEAQYNSNNPQYGND

SEQ ID NO: 6576 - protein, 300 aa, Oryza sativa (japonica cultivar-group)
MVVSMEMGPHGGGGAAAGKPVPAPFLTKTYQLVDDPCTDHIVSWGEDDTTFVVWRPPEFARDLLPNYFKHNNFSSFVRQLNTYGFRKIVADRWEFANEFFRKGAKHLLAEIHRRKSSQPPPPPMPHQPYHHHHHLNPFSLPPPPPAYHHHHLIQEEPATTAHCTVAGDGGEGGDFLAALSEDNRQLRRRNSLLLSELAHMKKLYNDIIYFLQNHVAPVTTTTTTPSSTAMAAAQHHLPAAASCRLMELDSPDHSPPPPPPKTPATDGGDTVKLFGVSLHGRKKRAHRDDDDGVHDQGSEV

SEQ ID NO: 6577 - protein, 348 aa, Oryza sativa (japonica cultivar-group)
MDGLHTELALGLIGCCGGDGQQQTAPFVAKTYQMVCDPRTDALVRWGRDNNSFVVVDPAAFSQLLLPCFFKHGNFSSFVRQLNTYVSIIQSPAPGFRKVHPDRWEFAHESFLRGQTHLLPRIVRRKKRGEGGGGGGGASCSFGGGAGEHQVAAAAASVGMSGEEEDAAEDVLAKEAALFEEVQRLRHEQTAIGEELARMSQRLQATERRPDQLMSFLAKLADDPNAVTGHLLEQAAERKRRRQHLPSHEPTVCPLPPAPPPQPPQPLLALAGAAAMDGTYWWTTEHHHHHHHQMKPMTVLPSLEPPTASCGVHQVPELGGGGVMGLTTDGEAKVEPPFPFCLLGQAFF

SEQ ID NO: 6578 - protein, 379 aa, Oryza sativa (japonica cultivar-group)
MEKMMPGMVKEEWPPSSPEEGEAPRPMEGLHEVGPPPFLTKTFDLVADPATDGVVSWGRAGSSFVVWDPHVFAAVFLPRFFKHNNFSSFVRQLNTYFLVRTNYLNKRSHFYSLRFQGFRKIDPDRWEFANDGFLRGQRHLLKMIKRRRPLSYLPGSQQALGTCLEVGQFGLDEEIDRLKRDKNILLAEVVKLRHKQQSTKANMRAMEERLQHAEQKQVQMMGFLARAMQNPDFFHQLIHQQDKMKGLEDTFSKKRTRSIDIVPFLNPGEVSQGDQLESTLLFDPRPFAELNDEPAKSELENLALNIQGLGKGKQDVNRTRNQPRNQASNETELTDDFWEELLNEGARDDAGIPGMERRRPRYVDALAQKLGYLSNSSQK

SEQ ID NO: 6579 - protein, 411 aa, Oryza sativa (japonica cultivar-group)
MASSSSSSSLCRLLIPRPTTRRFSGGGGEGGMAAAAPVKREVKPEAGEGWGGGDLGVVPPPPRPMEGLGEAGPAPFVAKTYEMVADAATDAVVSWGPGGSGASFVVWDPHALAAGVLPRFFKHANFSSFVRQLNTYVRIPIARSAACAASRKTYRPLPVVAMQGFRKVTPDRWEFANEAFLAGQKHLLKNIKRRRVSKPLVDSQLRNKASVVFGQPEAPGEVVSLKRDRAALRAEVIMLKQQYNACKSQLIAMEEMVRNIERRQQQTIGFFAKVLTNPAFVQQVLLNYVNKNGLRGAAKRQRLMENEEQHADSPLNKGMEAASVMEADVSPGSTGCGTVGKVETTPMCNFQNIENMCDDVWEELDALPETGMEQEEKAGIGSFDVEEFVGRPCGWVDDCPYLVEPMQFVEH

SEQ ID NO: 6580 - protein, 527 aa, Lycopersicon esculentum
MEPNSYGSGKAAVGDGVGAPMLQTAPAPAPIPSANAPPPFLVKTYDMVDDPSTDKIVSWSPTNNSFVVWDPPEFAKDLLPKYFKHNNFSSFVRQLNTYGFRKVDPDRWEFANEGFLRGQKHLLKSISRRKPAHGHAQQQQQPHGNAQQQMQPPGHSASVGACVEVGKFGLEEEVERLKRDKNVLMQELVRLRQQQQATDNQLQGMVQRLQGMELRQQQMMSFLAKAVNRPGFLAQFVQQQNESNKRIAEGSKKRRIKQDIESQDPSVTPADGQIVKYQPGINEAAKAMLRELSKLDSSPRLDNFSNSPESFLIGDGSPQSNASSGRVSGVTLQEVPPTSGKPLLNTASAIAGQSLLPATSEMQSSHLGTCSEIINNQLSNIIPLVGGEDLHPGSLSASDMIMPELSQLQGILPENNTDVIGCDSFMDTSAVEGKVGLDIIGSCLSPGADIDWQSGLLDEIEEFPSVGDPFWEKFLQSPCSPDAAMDDDISNTSETKPQINGWDKTQNMEHLTEQMGATNIKQQKHMI

SEQ ID NO: 6581 - protein, 301 aa, Lycopersicon peruvianum
MSQRTAPAPFLLKTYQLVDDAATDDVISWNEIGTTFVVWKTAEFAKDLLPKYFKHNNFSSFVRQLNTYGFRKIVPDKWEFANENFKRGQKELLTAIRRRKTVTSTPAGGKSVAAGASASPDNSGDDIGSSSTSSPDSKNPGSVDTPGKLSQFTDLSDENEKLKKDNQMLSSELVQAKKQCNELVAFLSQYVKVAPDMINRIMSQGTPSGSSLEELVKEVGGVKDLEEQGSYNDNDDKEDDDEKGDTLKLFGVLLKEKKKKRGPDENIETCGGRGKMMKTVDYNGPWMKMSSPAGESSKVCN

SEQ ID NO: 6582 - protein, 527 aa, Lycopersicon peruvianum
MEPNSSGSGKAAVGDGGGGGAPMLQPAPAPAPMPSANAPPPFLVKTYDMVDDPSTDKIVSWSPTNNSFVVWDPPEFAKDLLPKYFKHNNFSSFVRQLNTYGFRKVDPDRWEFANEGFLRGQKHLLKSISRRKPAHGHAQQQQQPHGHAQQQMQPPGHSASVGACVEVGKFGLEEEVERLKRDKNVLMQELVRLRQQQQSTDNQLQGMVQRLQGMELRQQQMMSFLAKAVNSPGFLAQFVQQQNESNKRIAEGSKKRRIKQDIESQDPSVTPADGQIVKYQPGINEAAKAMLRELSKLDSSPRLENFSNSPESFLIGDGSPQSNASSGRVSGVTLQEVPPTSGKPLLNTASAIAGQSLLPATSEMQSSHLGTCSEIINNQLSNIIPLVGGEDLHPGSLSASDMIMPELSQLQGILPENNTDVIGCDSFMDTIAVEGKMGLDIGSLSPGADIDWQSGLLDEIQEFPSVGDPFWEKFLQSPSSPDAAMDDDISNTSETKPQINGWDKTQNMEHLTEQMGATNIKQQKHMI

SEQ ID NO: 6583 - protein, 508 aa, Lycopersicon peruvianum
MNPFDKKQEPDTDSKTPFLTEMDSEFAAFSPISLPFADPSSPFINFGSFATPLSQHPVGEGEREGEGEGGEIEQPAEGGLGVPQPMECLHGIQIPPFLSKTFDLVEDPLLDTIISWGTNGESFVVWDPVEFSRLVLPRNFKHSNFSSFVRQLNTYGFRKIDADRWEFANEGFSRGKRHLLKNIQRRRSQQGGSSSGSSAEAGKGTMDEIEKLRNEKSLMMQEVVELQQQQHGTVQLMESVNEKLQAAEQRQKQMVSFLAKVLQNPTFLARVRQMKEQGEITSPRTMRKFVKHQSHGPDGVGSSSMEGQIVKFRSDFQDLAGCFDSPDFNPVVDQQLPETGLGAEAMPFEGGPVADGLTVAHELLNCSDREIRGASFFNSGGSQFKGKNVASPQIEVMPEYFASFPEEMGKEKNISGFSAPAIGSMVKDEELWGMGFEASAGMPSTGPELWDSLSSYVPDFGVSSGLSDLWDIDPLQVAGSSGVDKWPADGSPFGQSESHANQPKNDSF

SEQ ID NO: 6584 - protein, 351 aa, Lycopersicon peruvianum
MEDVMKVKVEEDGIPTAVLPMEGLHDVGPPPFLSKTYEMVEDSSTDQVISWSTTRNSFIVWDSHKFSTTLLPRFFKHSNFSSFIRQLNTYGFRKVDPDRWEFANEGFLGGQKHLLKTIKRRRNVGQSMNQQGSGACIEIGYYGMEEELERLKRDKNVLMTEIVKLRQQQQSTRNQIIAMGEKIETQERKQVQMMSFLAKIFSNPTFLQQYLDKQVHRKDKQRIEVGQKRRLTMTPSVTGSDQPMNYSSSLQESEAELASIEMLFSAAMDNESSSNVRPDSVVTANGTDMEPVADDIWEELLSEDLISGDRAAEEVVVVEQPEFDVEVEDLVVKTPEWGEELQDLVDQLGFL

SEQ ID NO: 6585 - protein, 292 aa, Nicotiana tabacum
MSQRTVPAPFLTKTYQLVDDATTDDVVSWNESGTTFVVWKTAEFAKDLVPTYFKHNNFSSFVRQLNTYGFRKIVPDKWEFANENFKRGQKELLTAIRRRKTVTPTPAGGKSVVPGTSASPDNSGEDLGSSSTSSPDSKNPGSVDTPGKSQFADLSDENEKLKKDNQMLSSELAQAKKQCDELVAFLNQYVKVAPDMINRIISQGTSGSSYGELVKEVIGGVNDLEAQGSDDDEKGDTLKLFGVLLKENKKKRGPDENADISGSRGKMMKTMDYNLPWMKMSSAPGESNKVCN

SEQ ID NO: 6586 - protein, 408 aa, Nicotiana tabacum
MDEATCSTNALPPFLTKTYEMVDDPSSDAIVSWSSSNKSFVVWNPPDFARDLLPRYFKHNNFSSFIRQLNTYGFRKVDPEKWEFANEDNFFRGQPHLLKNIHRRKPVHSHSAQNLHGLSSPLTESERQGYKEDIQKLKHENESLHLDLQRHQQDRQGLELQMQVFTERVQHVEHRQKTMLSALARMLDKPVTDLSRMPQLQVNDRKRRLPGNSCLYNETDLEDTRAISSRALTWENMNPSSLLTINAELLNQLDSSLTFWENVLQDVDQAWIQQNCSLELDESTSCADSPAISYTQLNVDVGPKASDIDMNSEPNANTNPEVAAPEDQAAVAGTTTNVPTGVNDIFWEQFLTENPGSVDASEVQSERKDIGNKKNESKPVDSGKFWWNMKSVNSLAEQLGHLTPAEKT

SEQ ID NO: 6587 - protein, 371 aa, Helianthus annuus
MAGVVKEFDSSHDMFKVREEPKVVFNNKDLSEEMMKIKEEPMLVFDEHEDFVGGEEAPKPIEGLRDGGPPPFLKKTFEMVDDPTTDSIISWSSSKNSFILWDPHKFSTDLLPQRFKHNNFSSFVRQLNTYRFKKIDPDRWEFANEFFQKGKKHLLRDIKRRTNQPQNTQKQEEIRKQEQQQCCGHQTNSTMETELKNLRKERITLKQEILKMKQQQENTEKHLEMVEERMLRMEFKQQQLLVFMSKAFRNPIFVKLLQHLVQKQKTGSVEMCKKRKLEQMLNTDDLDRFQEMWNMIEPDAYTVLSSDGSVSPPEDQNTSDKSGSNGSDYNSESFILWEKLMEDELIFGGEQSGKDQTETYLQEWEELIPKA

SEQ ID NO: 6588 - protein, 441 aa, Oryza sativa
  unsure (1)..(441): unsure at all Xaa locations
MEGGGGGGSLPPFLSKTYEMVDDPSTDAVVGWTPAGTSFVVANQPEFCRDLLPKYFKHNNFSSFVRQLNTYGFRKVDPEQWEFANEDFIKGQRHRLKNIHRRKPIFSHSSHSQGAGPLTDNERKDYEEEIERLKSDNAALSSELQNNTLKKLNMEKRMQALEEKLFVVEDQQRSLISYVREIVKAPGFLSSFVQQQDHHRKKRRLPIPISFHEDANTQENQIMPCDLTNSPAQTFYRESFDKMESSXLNSLENFLREASEEFGNDISYDDGVPGPSSTVVLTELHSPGESDPRVSSPPTRMRTSSAGAGDSHSSRDVAESTSCAESPPIPQMHSRVDTRAKVSEIDVNSEPAVTETGPSRDQPAEEPPAVTPGANDGFWQQFLTEQPGSSDAHQEAQSERRDGGNKVDEMKSGDRQHLWWGKRNVEQITEKLGLLTSTEKT

SEQ ID NO: 6589 - protein, 227 aa, Oryza sativa
  unsure (1)..(227): unsure at all Xaa locations
VARRREAAHNCALWIFFSVSSPVSCERYSRPTGSSWRRRRRGRPAPFLTKTYAMVEDPSTDETISWNDSGTAFVVWRPAEFARDLLPKHFKHSNFSSFVRQLNTYGFKKVVADRWEFANDCFRRGEKHLLGGIQRRKGSGTGGAGAAPAGGIPTAIPISSPPTSSGGEPAVSSSPPRGAAGIAAGVSGXXVAELEEENARLRRENARLARELARARRLHCSSYQYQA

SEQ ID NO: 6590 - protein, 370 aa, Oryza sativa
  unsure (1)..(370): unsure at all Xaa locations
XLQPQGASPSPLPASEPDKEVQCTVPEDGAAAVAAGVAPRPMEGLHDAGPPPFLTKTYDMVDDAGTDAAVSWSATSNSFVVWDPHAFATVLLPRFFKHNNFSSFVRQLNTYGFRKVDPDRWEFANENFLRGQRHLLKNIKRRKPPSHTASNQQSLGPYLEVGHFGYDAEIDRLKRDKQLLMAEVVKLRQEQQNTKANLKAMEDRLQGTEQRQQQMMAFLARVMKNPEFLKQLMSQNEMRKELQDAISKKRRRRIDQGPEVDDVGTSSSIEQESPALFDPQESVEFLIDGIPSDLENSAMDAGGLVXXPQDFDVGASEQQQIGPQGELNDNFWEELLNEGQENDNPVVEDDMNVLSEKMGYLNSNGPTAGE

SEQ ID NO: 6591 - protein, 416 aa, Oryza sativa
  unsure (1)..(416): unsure at all Xaa locations
MNPLRVIVKEEELDFAAAAAAAAAVGVMDLPRPMEGLGEAGPPPFLCKTYEVVDDPGTDTVISWGFAGNSFVVWDANAFAAVLLPRYFKHSNFSSFVRQLNTYGFRKVDPDRWEFANEGFLRGKKELLKTIKRRRSSSSSSQHQQQPAAACLEVGQFGRDGVVNRLQRDKSVLIAEVVKLRQEQQTTRAQMQAMEERISAAEQKQQQMTVFLARAMKNPGFLQMLAVQTXVDRQAGQHGARNRVLEDALSKKRRRPSTMLAADGVAEPDGDTTPRRDGGGGGGGDTESFWMQLLSLGLEEKQREDGVAGGVQESNSGGADVDNDEEDDDDDVDVLVQSIYHLSPKRRKVQEVEKLLPRGKLLEVSKLAVAALQRNYSSQSATTPIGLQQDKHITALLQWPSAAMLQPFDYDYAVQT

SEQ ID NO: 6592 - protein, 686 aa, Oryza sativa
MINTIQRIATFYLFYFILSSGGTWHLTRGCIGVRSPAKGVLSGFQPIIFLYYIIISRLPLYHYLHWTYSRLFKPYRYPLLSASAIIGYRLELLHQLVSRSAVLSIICIFCQLQDQTDWHARISPTFGPALELSRSPRPYRSDASLPARHTSDDRFRSDRTTTGRASSGELLPSPWPWLIRTSWRSIGKSLSFGDSVRICAAVQCEKFWPVASWIWRRVHSELRGAVDMESSNLGGGGGGGGGGGPPPFLIKTYEMVEDAATNHVVSWGPGGASFVVWNPLDFSRDLLPKYFKHNNFSSFIRQLNTYGFRKIDPERWEFANEDFIRGHTHLLKNIHRRKPVHSHSLQNQINGPLAESERRELEEEINRLKYEKSILVADLQRQNQQQYVINWQMQAMEGRLVAMEQRQKNIVASLCEMLQRRGGAVSSSLLESDHFSKKRRVPKMDLFVDDCAAGEEQKVFQFQGIGTDAPAMPPVLPVTNGEAFDRVELSLVSLEKLFQRANDACTAAEEMYSHGHGGTEPSTAICPEEMNTAPMETGIDLQLPASLHPSSPNTGNAHLHLSTELTESPGFVQSPELPMAEIREDIHVTRYPTQADVNSEIASSTDTSQDGTSETEASHGPTNDVFWERFLTETPRSCLDESERQESPKDDVKAELGCNGFHHREKVDQITEQMGHLASAEQTLHT

SEQ ID NO: 6593 - protein, 410 aa, Oryza sativa
MESSNLGGGGGGGGGGGPPPFLIKTYEMVEDAATNHVVSWGPGGASFVVWNPLDFSRDLLPKYFKHNNFSSFIRQLNTYGFRKIDPERWEFANEDFIRGHTHLLKNIHRRKPVHSHSLQNQINGPLAESERRELEEEINRLKYEKSILVADLQRQNQQQYVINWQMQAMEGRLVAMEQRQKNIVASLCEMLQRRGGAVSSSLLESDHFSKKRRVPKMDLFVDDCAAGEEQKVFQFQGIGTDAPAMPPVLPVTNGEAFDRVELSLVSLEKLFQRANDACTAAEEMYSHGHGESPGFVQSPELPMAEIREDIHVTRYPTQADVNSEIASSTDTSQDGTSETEASHGPTNDVFWERFLTETPRSCLDESERQESPKDDVKAELGCNGFHHREKVDQITEQMGHLASAEQTLHT

SEQ ID NO: 6594 - protein, 143 aa, Oryza sativa
  unsure (1)..(143): unsure at all Xaa locations
LITCCIKRVVITYRPDRWHSSWRGXGGEMVVSMERSHGRSTTTAAPAPFLSKTYQLVDDPSTDDVVSWGEDEATFVVWRPPEFARDLLPNYFKHNNFSSFVRQLNTYGFRKIVADRWEFANEFFRKGAKHLLSEIHRRKSSSX

SEQ ID NO: 6595 - protein, 288 aa, Oryza sativa
  unsure (1)..(288): unsure at all Xaa locations
AAAEALAGQRSLPTPFLTKTYQLVEDPAVDDVISWNEDGSTFVVWRPAEFARDLLPKYFKHNNFSSFVRQLNTYGFRKIVPDRWEFANDCFRRGEKRLLCDIHRRKVVAAAAAAPPPPAHSSEEQVLSSNSGSGEEHRQASGSGSAPGGGXXGGSASGGDMGEENERLRRENARLTRELGHMKKLCNNILLLMSKYAATQHVEGSAAPGDTRSNALVPRPGHRRRXAAGLAIDGEPDPSARLFGVSIGLKRTRDDAAAAADEDGGGEDQAEHGGWVAAVNTNNAASCP

SEQ ID NO: 6596 - protein, 261 aa, Oryza sativa
  unsure (1)..(261): unsure at all Xaa locations
YLRITRSVVALXLGGECKVHQLQAAGDGGPGAVAPFVAKTFHMVSDPSTNAVVRWGGAGNTFLVLDPAAFSDFLLPSYFKHRNFASFVRQLNTYGFRKVDPDRWEFAHESFLRGQAQLLPRIVRKKKKGGAAPGCRELCEEGEEVRGTIEAVQRLREEQRGMEEELQAMDQRLRAAESRPGQMMAFLAKLADEPGVVLRAMLAKKEELAAAGNNGSDPCKRRRIGADTGRGGVATGGDAAEMAQSRGTVPFPFSVLGQVFY

SEQ ID NO: 6597 - protein, 424 aa, Oryza sativa
  unsure (1)..(424): unsure at all Xaa locations
WSSVVVASSYGRWSGAGGSDCEAAAAAAQKAVPAPFLTKTYQLVDDPATDHIVSWGDDRVSTFVVWRPPEFARDILPNYFKHNNFSSFVRQLNTYGFRKVVPERWEFANEFFRKGEKQLLTEIHRRKTSSASTASPSPPPFFAPPHFPXVPPPXRVSAAQHHHAFVGDDGPSPSSAEAGGAGRAATAAVLMEENERLRRSNTALLQELAHMRKLYNDIIYFVQNHVRPVAPSPAAAAFLQGLGMQARKKPAAANVLNNSGGSTTSSSSLTTSPPPQQQHLAGEKSGGEAGNSSAARSSAPTKLFGVHLSASSPEEHPPTSPATKPRLVLECDDLSLTVAPSSSSQQQLSAASSPTSTSYREADPWTVIMLQESNDLLDDXSXXXXXXXXXXXXXXXDYLSDRENRERRSVMIRRAVDEICSSEV

SEQ ID NO: 6598 - protein, 289 aa, Oryza sativa
  unsure (1)..(289): unsure at all Xaa locations
MGSKKRSPQHPAAAAPPPASEVAPFLTKVYDMVSDPATDNVISWAEGGGSFVIWDSHAFERXXLHRHFKHSNFTSFIRQLNTYGFRKVHPDRWEWANEGFIMGQKHLLKTIKRRKKSSQESPRQKAPVKTAPGTENIEIGKYGVERRVDPXXEDKALLMQQLVDLRHYQQTSNLEVQNLIERLQVMEQNQQQMMALLAVGVQNPSFLNQLVQQQQQQRRSNWWSPDGSKKRRFHALEQGPVTDQETSGRGAHIVEYLPPVPETSGQLLFVLXNMSSFVHLPCVSKKKKK

SEQ ID NO: 6599 - protein, 459 aa, Oryza sativa
MESSNLGGGGGGGGGGGPPPFLIKTYEMVEDAATNHVVSCGPGGASFVVWNPLDFSRDLLPKYFKHNNFSSFIRQLNTYGFRKIDPERWEFANEDFIRGHTHLLKNIHRRKPVHSHSLQNQINGPLAESERRELEEEINRLKYEKSILVADLQRQNQQQYVINWQMQAMEGRLVAMEQRQKNIVASLCEMLQRRGGAVSSSLLESDHFSKKRRVPKMDLFVDDCAAGEEQKVFQFQGIGTDAPAMPPVLPVTNGEAFDRVELSLVSLEKLFQRANDACTAAEEMYSHGHGGTEPSTAICPEEMNTAPMETGIDLQLPASLHPSSPNTGNAHLHLSTELTESPGFVQSPELPMAEIREDIHVTRYPTQADVNSEIASSTDTSQDGTSETEASHGPTNDVFWERFLTETPRSCLDESERQESPKDDVKAELGCNGFHHREKVDQITEQMGHLASAEQTLHT

SEQ ID NO: 6600 - protein, 459 aa, Oryza sativa; identical to SEQ ID NO: 6599

SEQ ID NO: 6601 - protein, 254 aa, Oryza sativa
  unsure (1)..(254): unsure at all Xaa locations
MAFLVERCGEMVVSMETGKPVPAPFLTKTYQLVDDPCTDHIVSWGEDDTTFVVWRPPEFARDLLPNYFKHNNFSSFVRQLNTYGFRKIVADRWEFANEFFRKGAKHLLAEIHRRKSSQPPPPPMPHQPYHHHHHLNPFSLPPPPPAYHHHHLIQEXSPPXTAHCTVAGDGGEGGDFLAALSEDNRQLRRRNSLLLSELAHMKKLYNDIIYFLQNHVAPVTTTTTTPSSTAMAAAQHGRTGTTTTASMTREARCX

SEQ ID NO: 6602 - protein, 430 aa, Oryza sativa
  unsure (1)..(430): unsure at all Xaa locations
MAEQGAGEADAGGGEPPPAAVMTAAAEALAGQRSLPTPFLTKTYQLVEDPAVDDVISWNEDGSTFVVWRPAEFARDLLPKYFKHNNFSSFVRQLNTYGFRKIVPDRWEFANDCFRRGEKRLLCDIHRRKVVAAAAAAPPPPSPGMATAAAAVASGAVTVAAAPIPMALPVTRAGSPAHSSEEQVLSSNSGSGEEHRQASGSGSAPGGGGGGSASGGDMGEENERLRRENARLTRELGHMKKLCNNILLLMSKYAATQHESSEAVPPPPPLPPAILDLMPSCPALATAAAAAGLAIDGEPDPSARLFGVSIGLKRTRDDAAAAADEDGGGEDQAEHGGXXDVKPEAADPHPAGGGGGSSTEASPESHPWPIYRPTPMYHAVRPTCNGPDRAGSDQDGSSSSVRSIRMPLLVFCTTWHQTATHRRMVVGQFS

SEQ ID NO: 6603 - protein, 559 aa, Oryza sativa
  unsure (1)..(559): unsure at all Xaa locations
MAADGVLAGGGGCRDHGLRRRVRDDGRRRWWRARVDDGRRHQSARRRQEAMGGATIAGGGTRASTAGGRTAPARGETTASGAMRSAAWRPTPHPRNVSLIPPPPTNDLNLPEQTKSIKKDTETSRTFPHPFSHLPHATQPSLRPISRATPIQPPKQPDTTVYPGQICAAAGGGGGMADQTAAAVVVGGGAAATMGEPSPPPPAPAAEAAGVGVGQQQRTVPTPFLTKTYQLVDDPAVDDVISWNDDGSTFVVWRPAEFARDLLPKYFKHNNFSSFVRQLNTYGFRKIVPDRWEFANDCFRRGERRLLCEIHRRKVTPPAPAATTAAVAAAIXXMALPVTTTRDGSPVLSGEEQVISSSSSPXAPARAAAGAVXGSGSGGVASGDVGDENERLRRENAQLARELSQMRKLCNNILLLMSKYASTQQXRRRQRLLRRREQQQQQLLRRIRRGGHAAPAPRRPRPHAFLPRRRLRRRARIRQRGGNDEREALRRLHRPEANAARRRRRRRPRGDGEGGADGRAAARQGRTIGGDAGLAHLPAQARLPAHPGLQRIRVRPSRQ

SEQ ID NO: 6604 - protein, 264 aa, Oryza sativa
  unsure (1)..(264): unsure at all Xaa locations
XNPALKGISLGRWRRCXHGPQLPPFLSKTYDLVCEPELDGVISWGHAGNSFVVWDPSAFARDVLPHHFKHNNFSSFVRQLNTYGFRKVHADRWEFAHEDFLRHSKHLLKKIVRRRSSPTQQSGLQPGSSGESGLDPELNTLRREKSALLQEVTRLKQEHLQTIEQMSTLNQRLESAEDRQKQMVSFLAKLLQNPTFLRQLKMHRQQKEIDSTRVKRKFLKHVPHGNIDSENIGLDGIEAPDDIGALVQGFDTQEMYCLQDWMLP

SEQ ID NO: 6605 - protein, 348 aa, Oryza sativa; identical to SEQ ID NO: 6577

SEQ ID NO: 6606 - protein, 288 aa, Oryza sativa
  unsure (1)..(288): unsure at all Xaa locations
YSKKGDDDDDDGGGRXGGVAPFVAKTYRMVDDPATDGVIAWGRDSNSFVVADPFAFSQTLLPAHFKHSNFSSFVRQLNTYGFRKVDPDRWEFAHVSFLRGQTHLLRRIVRRSSGGGGAKRKEEAGVVAMEVARLRREQREIEGRGAAVWRRVHDAERPPVPMLAFLVKVVGDPQVLRRLXRQGQHQRRRLQRRRLRRVIRSRGRASSSTHPPPPPPTATATSSPPPQTGSTPAAAARRPPAAAFVPDDAVDFTGLYTGXATGSATPSSTPASTTRRRTRSRWWTAATX

SEQ ID NO: 6607 - protein, 252 aa, Oryza sativa
  unsure (1)..(252): unsure at all Xaa locations
MNPLRVIVKEEELDFAAAAAAAAAVGVMDLPRPMEGLGEAGPPPFLCKTYEVVDDPGTDTVISWGFAGNSFVVWDANAFAAVLLPRYFKHSNFSSFVRQLNTYXWEFANEGFLRGKKELLKTIKRRRSSSSSSQHQQQPAAACLEVGQFGRDGVVNRLQRDKSVLIAEVVKLRQEQQTTRAQMQAMEERISAAEQKQQQMTVFLARAMKNPGFLQMLVDRQAGQHGARNRDVGAKDIFKHTNRKGHQNIIIX

SEQ ID NO: 6608 - protein, 524 aa, Oryza sativa
  unsure (1)..(524): unsure at all Xaa locations
MPEYTAVPTVIHNTDLFGHASHSLVIDSSRKLVQSFGIGFIISLCLILLINISTSDVRETKIIQTEVLAGIHARRVGDGLAWPIWGDSSGVRRSDGASGASARIPVRRVPACKAWRAQRDGCVGLIGPPATRVRTRRSPIGPHRQLARRVMTTTTAEGGGGVAPFVAKTYRMVDDPATDGVIAWGRDSNSFVVADPFAFSQTLLPAHFKHSNFSSFVRQLNTYVRSRFPSIPGFRKVDPDRWEFAHVSFLRGQTHLLRRIVRRSSGGGGAKRKEEAGGCGGGGEAAAGDVDEESAVVALEVARLRREQREIEGRVAAMWRRVQETERRPKQMLAFLVKVVGDPHAAPPRRQGQHQRRRLQRRRLPSSGQEAAPPPPRPPPPPPTATATSSXAAADGXSTPAAAARRPQLPPRSCRTTRSTSPASXTGGDGFGNAVVDAGVDYPPAYAFPVVDSGYXSCNRFEIRALVADPTICVRSSIFRFSLPSPKCLDEVAVNGEGRKLGSSPSSHVGFFPPCWGFLVSVCA

SEQ ID NO: 6609 - protein, 302 aa, Oryza sativa
  unsure (1)..(302): unsure at all Xaa locations
MASSSSSSSLCRLLIPRPTTRRFSGGGGEGGMAAAAPVKREVKPEAXXGGVGRGXSGGGAAAXPRPMEGLGEAGPAPFVAKTYEMVADAATDAVVSWGPGGSGASFVVWDPHALAAGVLPRFFKHANFSSFVRQLNTYGFRKVTPDRWEFANEAFLAGQKHLLKNIKRRRVSKPLVDSQLRNKASVVFGQPEAPGEVVSLKRDRAALRAEVIMLKQQYNACKSQLIAMEEMVRNIERRQQQTIGFFAKVLTNPAFVQQVLLNYVNKNGLXAPLKGRRRLLEQSLNIGNEHSQVMXSQEFVGX

SEQ ID NO: 6610 - protein, 260 aa, Oryza sativa
AAPVKREVKPEAGEGWGGGDLGVAPPPRPMEGLGEAGPAPFVAKTYEMVADAATDAVVSWGPGGSGASFVVWDPHALAAGVLPRFFKHANFSSFVRQLNTYGFRKVTPDRWEFANEAFLAGQKHLLKNIKRRRVSKPLVDSQLRNKASVVFGQPEAPGEVVSLKRDRAALRAEVIMLKQQYNACKSQLIAMEEMVRNIERRQQQTIGFFAKVLTNPAFVQQVLLNYVNKNGLRGLEWSRKKRLGLAPSMSRSSSNTIHAA

SEQ ID NO: 6611 - protein, 148 aa, Oryza sativa
  unsure (1)..(148): unsure at all Xaa locations
XGWGKGNNSFVVADPFVFSQTLLPAHFKHNNFSSFVRQLNTYGFRKVDPDRWEFAHASFLRGQTHLLRNIVRRGSAAAGGGGGGGGGKVATEVVRLKQEQRTIDDRVAAMWRRVQETERRPKQMLAFLLRVVGDRDKLHRLNTFSYXK

SEQ ID NO: 6612 - protein, 95 aa, Oryza sativa
  unsure (1)..(95): unsure at all Xaa locations
XGGRRCCCGCGRRGGAAVAPPPGAAVSNGVATAPPPFLMKTYEMVDDPATDAVVSWGPGNNSFVVWNTPEFARDLLPKYFKHSNFSSFVRQLNTY

SEQ ID NO: 6613 - protein, 175 aa, Triticum aestivum
  unsure (1)..(175): unsure at all Xaa locations
APRSGPGPYGSRDGDGRRGCCCGGCGGGGAVTTAVAPPGAAGAGAGAPPPFLMKTYDMVDDPATDAVVSWGPANNSFIVWNTPEFARDLLPKYFKHNNFSSFVRQLNTYGFRKVDPDKWEFANEGFLRGQKHLLKTINRRKPSHANNQVQVQQHQQQQQQQQPQLQNAPMPSCVX

SEQ ID NO: 6614 - protein, 322 aa, Triticum aestivum
  unsure (1)..(322): unsure at all Xaa locations
MAGAAAQQQQRGGGGGGGAVRVGGGGPAPFLTKTHQMVEERGTDEVISWGEQGRSFVVWKPVELARDLLPLHFKHCNFSSFVRQLNTYGFRKVVPDRWEFANENFRRGEQGLLSGIRRRKATATTTXXPQSSKTSGTGVNVAFPPPLPALRPASASTSGTGNDHSSSSASSPTRPDLSSENEQLRKDNHALAAELALARRHCEELLGFLSRFLDVRQLDLRLLMDGDMQGAAGAGGARXGGPRALLREEGEAVRRDPXKDASARKRGRCDEAAASERPMNMTRIGEPWVGVPIVLPGALRRRELMGASPWPDGCTQHARAPL

SEQ ID NO: 6615 - protein, 265 aa, Triticum aestivum
  unsure (1)..(265): unsure at all Xaa locations
MAGAAAQQQQQKGGGAVRVGGGGPAPFLTKTHQMVEERGTDEVISWGEQGRSFVVWKPVELARDLLPLHFKHCNFSSFVRQLNTYGFRKVVPDRWEFANENFRRGEQGLLSGIRRRKATATTTXXPQSSKTSGTGVNVAFPPPLPALRPASASTSGTGNDHSSSSASSPTRPDLSSENEQLRKDNHALAAELALARRHCEELLGFLSRFLDVRQLDLRLLMDGDMQGAAGAGGARSSTDCILRFCLEIHIDILFSSKKKKKKKKX

SEQ ID NO: 6616 - protein, 128 aa, Triticum aestivum
  unsure (1)..(128): unsure at all Xaa locations
MASPALGAGTPPFLTKTYAMVDDPETDDTISWNESGTAFVVWRRAEFERDLLPKNFKHSNFASFVRQLNTYGFRKIGLDRWEFANECFRKGEKRLLGAIQRRKGSGAGAPPPAMMATPIATAIPISPX

SEQ ID NO: 6617 - protein, 150 aa, Triticum aestivum
  unsure (1)..(150): unsure at all Xaa locations
KEEEEEGAHGRGDSPAVGAAPRPMEGLHDAGPPPFLTKTYDMVDDPNTDSIMSWSAGNNSFVVWDPHAFATVLLPRHFKHSNFSSFVRQLNTYGFRKVDPDRWEFANEGFLRGQRHLLKNIRRRKPPAHTASNQQSLGSYLEVGHFGYDX

SEQ ID NO: 6618 - protein, 152 aa, Triticum aestivum
  unsure (1)..(152): unsure at all Xaa locations
MSHRMMMNPVKVEGDGRAGGGGAPRPMDGLGDAGPTPFLAKTYDMVDDPATDAVVSWSATNNSFVVWDPHLFATVLLPRYFKHGNFSSFVRQLNTYGFRKVDPDRWEFANEGFLRGQRHLLRNIKRRKPNMGSKNNNLXVLLEXGTLDMMWR

SEQ ID NO: 6619 - protein, 176 aa, Triticum aestivum
  unsure (1)..(176): unsure at all Xaa locations
MEGSGGSASLPPFLTKTYEMVDEPATDAVVAWTPSGTSFVVLSQADFCRDLLPKYFKHNNFSSFVRQLNTYGFRKVDPEQWEYANEEFLRDQRHRLKNIHRRKPIFSHSXDNPAARXRARXXXXXXXPXVXXXXTXXKXXXKKLXRTSXKEXXNEXXXXXXXXKXIXXVXHQKXXX

SEQ ID NO: 6620 - protein, 380 aa, Triticum aestivum
MSAEHGAAAADGAGAEPPPPAPMPGLVASADAAGQRSLPTPFLTKTYQLVEDPAVDDVISWGEDGSTFVVWRPAEFARDLLPKYFKHNNFSSFVRQLNTYGFRKIVPDRWEFANDCFRRGEKRLLCDIHRRKVVQSAGLAAAAAAAAAGAVTVATAAIPMALPVTRSAPEPQLSSEEQVLSSNSGSAEELPLAAPSGSGSGLGGAAAGSSSGEENDRLRRDNARLTRELGQMKKLCNNIVSLMSKFASSQQNCSGESALAPPPPLPAGILDLMPSCSALATAAGLAVDGGPDTDARLFGVSIGLKRARDEEEDGDGGELPNSNGDGADVKPEEAADPRAAAARIGSRGRYTGPSPCTGPATGRTGPGAGSGSDQDRSNSR

SEQ ID NO: 6621 - protein, 462 aa, Triticum aestivum
  unsure (1)..(462): unsure at all Xaa locations
QFSISLIFILVLLLPLGISLIIPRGKLPEGLLPYVPRFGGVALXPHLEATTGFPGPDPAGRGRGGPGVMSGRRGGGRGWGGASSPGADAGAGGLGGPGQRSLPTPFLTKTYQLVEDPAVDDVISWGEDGSTFVVWRPAEFARDLLPKYFKHNNFSSFVRQLNTYGFRKIVPDRWEFANDCFRRGEKRLLCDIHRRKVVQSAGLAAAAAAAAAGAVTVATAAIPMALPVTRSAPEPQLSSEEQVLSSNSGSAEELPLAAPSGSGSGLGGAAAGSSSGDMGEENDRLRRDNARLTRELGQMKKLCNNIVSLMSKFASSQQPCDGGPVAVVVVNCRVSRRWRLRRRPRGDTGPDAILLGAATAAGXPSRXPDXDAXLXAXHRLNQRXQEKAXRGEFLXNTRXDLNRXEXTGPRRGXDGXWPLRPAXTADGRXPSVTXNNRRAFXTXLXLSPXIXXXXXXXIXXGC

SEQ ID NO: 6622 - protein, 120 aa, Triticum aestivum
  unsure (1)..(120): unsure at all Xaa locations
XTAHSGHPPPRPLEVLQGPQLPPFLSKTYNLVSEPQLDGVISWGPAGNSFVVWNPSTFARDVLPHNFKHNNFSSFVRQLNTYGFRKVHADRWEFAHEGFLRGSKHLLKTIVRRRSSPTQX

SEQ ID NO: 6623 - protein, 200 aa, Triticum aestivum
  unsure (1)..(200): unsure at all Xaa locations
KPNPDPPAATTTTPLSRPSLPLPPTRVGEQHREPARRHSHPMEGSGAAGARGGGGGGPAPFLLKTYEMVDDPATDAVVSWSDASDTSFVVWNSPEFAARLLPAYFKHSNFSSFIRQLNTYGFRKIDPERWEFGNEYFVKGQKHLLKNIYRRKPIHSHSHQPGALPDNERSXFEDEIDRLAREKANLQAEXWKSKQQEXRN

SEQ ID NO: 6624 - protein, 148 aa, Triticum aestivum
MDGLHTELALGLIGCGHGDLQTAPFVAKTYQMVCDPRTDALVRWGKGNNSFLVTDVAGFSQLLLPCFFKHGNFSSFVRQLNTYGFRKVHPDRWEFAHESFLRGQTHLLPRIVRRKKRGEAGVGASCSSAVGGGEQQQHVVANMGDQGE

SEQ ID NO: 6625 - protein, 135 aa, Triticum aestivum
  unsure (1)..(135): unsure at all Xaa locations
MSGGMDSSSSGSGSSGGAGVAPFVAKTYGMVDDRATDAVVAWGPAGNSFVVADPFAFSQALLPAHFKHANFSSFVRQLNTYGFRKVDPDRWEFAHASFLRGQTHLLPRIVRRQKRQARRQGGRRGGGXGEQQHGV

SEQ ID NO: 6626 - protein, 228 aa, Triticum aestivum
  unsure (1)..(228): unsure at all Xaa locations
TPRVKTPSRASLVEWFRNLRRLFLQLFQCSSPSSVRRVSRSASDGAGGSWSESDAAAQAAAQKAVPAPFLTKTYQLVDDPATDHIVSWGDDRVSTFVVWRPPEFARDILPNYFKHNNFSSFVRQLNTYGFRKVVPERWEFANEFFRKGEKQLLCEIHRRKTSGSTTSSSPPPXXFAPPHFPLSPGRFGRASPPAVRXGEDGAMAAHAGMGVPFMQPHWRDQGAPRLLA

SEQ ID NO: 6627 - protein, 270 aa, Triticum aestivum
  unsure (1)..(270): unsure at all Xaa locations
LETDRWRRRRRASAAGXAPFVWKTYRMVEDPGTDGVIGWGKGNNSFVVADPFVFSQTMLPAHFKHNNFSSFVRQLNTYGFRKVDPDRWEFAHGSFLRGQTHLLRNIVRRGTAVGGGGGGKRKDAVATEVVRLKKEQNTIDDRVAAMWRRVQETERKPKQMLAFLLTVVGDRDTLQRLVXQQRQRGRRRSGAGGGRREKGEAAAXRRLRQRVRXXLGRTPSTSRGSTPTTRSPMRRCRWRRPPGRAVVVPAARXXVWSGQWVLSSDARQKX

SEQ ID NO: 6628 - protein, 284 aa, Triticum aestivum
  unsure (1)..(284): unsure at all Xaa locations
AAPPAAQQAHTEQSRNSERLPYPVVDSSSMGSECKGHQPQXXDGGVAPFVAKTFHMVSDPATDAVVCWGGASNTFLVLDPAAFSDFLLPSYFKHRNFASFVRQLNTYGFGKVDPDVWEFAHESFLRGQAKLLPLIVRKKKRAGAGAAGRELCVEEEEVRGTIQAVQRLRDERRGMEEELQAMDRRLCAAENRPGQMMAFLXAKLADDPGVVLPAMVAKKEELAXAAGAGGKDSKXPDKSRRIGADAGSGGPXXGRPAPCWAXXPCPFRNLGQVFYXIDPWEXES

SEQ ID NO: 6629 - protein, 147 aa, Triticum aestivum
  unsure (1)..(147): unsure at all Xaa locations
IPCFSPRYAIRNLPEGCFATLPSVPSNGXSSGQICAVGGGDGAMGXAGRGRFLLRDACSGGGGDXGVGQRSLPTPFLNKTYQLVDDPAVDDVISWSEDGSAFIVWRPAEFARDLLPKYFKHNNFSSFVRQLNTYGFRKIVPDRWEFA

SEQ ID NO: 6630 - protein, 161 aa, Triticum aestivum
  unsure (1)..(161): unsure at all Xaa locations
KNQSFLTRGTSTAFPSCLLSRVELDEQRRHGVXSGSEGDGGMVAPFVAKDVQXMVDDPATDAVVAWGPASNSFVVADPFAFSRALLPAHFKHANFSSFVRQLNTYGFRKVDPDRWEFAHASFLRGQTHLLPRIVRRRTGGGRRAKDSHDEEEDEDISSKMX

SEQ ID NO: 6631 - protein, 124 aa, Triticum aestivum
  unsure (1)..(124): unsure at all Xaa locations
MEAAVAGGVVKEEELLLHEEQPPAGPQQQDGALPRPMEGLHEAGPPPFLTKTYDLVEDPATDQVVSWGRAGNTFVVWDPHVFAEALLPRLFKHSNFSSFVRQLNTYGFRKVDPDRWEFANEGFX

SEQ ID NO: 6632 - protein, 251 aa, Triticum aestivum
  unsure (1)..(251): unsure at all Xaa locations
KSLRTQTEIPTPIRLPPPVSPPSSIPNEARVSARRTAMGSSKGSPPPSAAGPSSAGNAPAPVGPVPRPPEVAPFLTKVYDMVSDAATDKVMSWTDAGNSFVIWDAHAFERDLRRHFKHRNFSSFIRQLNTYGFRKVDPDRWEWANEGFLRDQKHLLKIIKRKKRXXQEAGRELEKAPVKAAPGTENIEIGRYGGLVKEVETLKRGGGVLMQQLVDLTHYQQSSNLEVQSLIQRLQVMEQNQKQMMALLSIX

SEQ ID NO: 6633 - protein, 615 aa, Zea mays
  unsure (1)..(615): unsure at all Xaa locations
RPVRDTHPSSSPRRESEPLSFHSPFLSIAYTSGGAGTPKTLSPHTTANRNHSAPPSPSRPGPGRAPLHDAGVRQVLSGSRWWEDAGRCHGPCRRRRGGRVDGDHGGGAPSHGARGGGGAPXVTAHAAAAAGNGSATAAPPPPFLMKTYEVVDDPATDDVISWGPGNNSFIVWNTPEFARDLLPKYFKHSNFSSFVRQLNTYGFRKVDPDRWEFANEGFLRGQKHLLKTINRRKPSLQGNSQPQQPQSXXNAPVPSCVEVGKFGLEEEIERLKRDKNVLMQELVRLRQQQQTTDHQLQTLGKRLQGMESRQQQMMSFLAKAMQSPGFLAQFVQQNEKSRRRIVAANKKRRLPRQDGGLDSESAAASLDGQIIKYQPLINEAAKAMLRKILKLDSSHRLESMGNSENGNFLLENYMPGAQAFESSSSTRNSGVTLSEVSANPGLPYXAAAAARALGCQPSALLKSXCPVVMDNMSSNQVPSMSAXXPPVSKATIDMGIPEFSALADLVNEGSVDIPGGAFEMPGPEFPLPEGDDXVSPSRPXETMYNNNDETQSLPGIIDSFWEQFLVGSPLSADNDEVDSGSPQENGWSKVGNIGDLTEQMGLLSSTNHRDSGNGL

SEQ ID NO: 6634 - protein, 529 aa, Zea mays
  unsure (1)..(529): unsure at all Xaa locations
RPGIPFPIPLSSQSHTPAAAPGPRKPSPRTPRPTGTTPLLRALAVPGRVGLPYMTPAAGNGSATAAXXPPPFLMKTYEVVDDPATDDVISWGPGNNSFIVWNTPEFARDLLPKYFKHSNFSSFVRQLNTYGFRKVDPDRWEFANEGFLRGQKHLLKTINRRKPSLQGNSQPQQPQSXXNAPVPSCVEVGKFGLEEEIERLKRDKNVLMQELVRLRQQQQTTDHQLQTLGKRLQGMESRQQQMMSFLAKAMQSPGFLAQFVQRNENSRRRIVAANKKRRLPKQVVDSSPKVLPLDGQIIKYQPSINEAAKAMLRKILNVDSSHMFESMGNSDNSDYMPAGQAFESSSSTRNSGVTLAEVPANSGLAYVGTSSAICSPPAAPEMQCPVVLDNKAYKQVASMSAVPXXVSSDMGIIPEFSDLADLVSVDILGGAFEMMPGPEFPLPEEGDDGTTMYNNNDEEAQSLPGIINSIWEQFLVGSPLSTDNEEVDSAGGLYAQEDGWSKVGNIANLTEQMGLVSSTNHRDSGNGLY

SEQ ID NO: 6635 - protein, 182 aa, Zea mays
MEGGSSLPPFLSKTYEMVDDPATDAVVAWTPLGTSFVVANQAEFCRDLLPKYFKHNNFSSFVRQLNTYGFKKIDPEQWEFANDDFIRGQQHRLKNIHRRKPIFSHSSHTQGSGPLPDTERRDYEEEIERLKCDNAALTSELEKNAQKKLVTEKRMQELEDKLIFLEDRQKNLMAYVRDIGQA

SEQ ID NO: 6636 - protein, 492 aa, Zea mays
  unsure (1)..(492): unsure at all Xaa locations
PRSNLVFWKSPSIRFRTAENFPFPRPPTNQTRATSLSHLPCAAPQPEEEEEDAVVWRGMEGASSLPPFLSKTYEMVDDPATDAVVAWTPLGTSFVVANQAEFWRDLLPKYFKHNNFSSFVRQLNTYGFKKIDPEQWEFANDDFIRGQQHRLKNIHRRKPIFSHSSHTQGSGPLPDTERRDYEEEIERLKCDNAALTSELEKNAQKKLVTEKRMQELEDKLIFLEDRQKNLMAYVRDIVQAPGSFSSFVQQPDHHGKKRRLPVPISLYQDSNAEGNQVVHGGFITNPPACRESFDKTESSLNSLENFLREASEAFNISYGDGLPGPSSAVVITELHSSGESDPHVPSPVSRMHTSSAGAGDSLSSRDLTESTSCAESPRLAQIQPCTDSRTKVSEIDVNREPAVTETGPTRDQPAEEPPHVAAGVNDGFWQQFLTEQPGXXDVHQEAQSERRDGDDDKGDQTRIGDRENFWWGKKNVEQMREKLGRLTSVEKT

SEQ ID NO: 6637 - protein, 308 aa, Zea mays
MEGASSLPPFLSKTYEMVDDPATDAVVAWTPLGTSFVVANQAEFWRDLLPKYFKHNNFSSFVRQLNTYGFKKIDPEQWEFANDDFIRGQQHRLKNIHRRKPIFSHSSHTQGSGPLPDTERRDYEEEIERLKCDNAALTSELEKNAQKKLVTEKRMQDLEDKLIFLEDRQKNLMAYVRDIVQAPGSFSSFVQQPDHHGKKRRLPVPISLYQDSNAKGNQVVHGSFITNPPACRESFDKTESSLNSLENFLREASEAFNISYDDGLPGLHLLSLSQSSIRPEKVIPMCHHLSQECIHLRLVREIRSLPAI

SEQ ID NO: 6638 - protein, 308 aa, Zea mays; identical to SEQ ID NO: 6637

SEQ ID NO: 6639 - protein, 339 aa, Zea mays
  unsure (1)..(339): unsure at all Xaa locations
SKNTFLSAAPLLTALRCLMASPAAGTPPFLTKTYAMVEDSATDDTISWNDTGTAFVVWRPAEFARDLLPKHFKHSNFSSFVRQLNTYGFKKVVGDRWEFANDGFRRGEKHLLAGIQRRKGTGAVAAVPVPGIPAGIPLPLSSPPTSSGGEPAVSSSPXAWXSTAGVSGAVAELEEENARLRRENARLARELARARRLCDGVRQLMARYDDDQGRGGDEDPADGDEXXHGGSGEGPSGPEVKPMLFGVPIGAKRLRGXXVVMETMXMXGEDNDEEPDEDDERQTVRKQGVKAARRNEASDLDVLTLSVRAAAAARTGGGSRDRKSPITAHPDRSLSLGLK

SEQ ID NO: 6640 - protein, 152 aa, Zea mays
  unsure (1)..(152): unsure at all Xaa locations
MVKSTDGGGGSSSSSSVAPFLRKCYDMVDDSTTDSIISWSPSADNSFVILDTTVFSVQLLPKYFKHSNFSSFIRQLNIYGFRKVDADRWEYANDGFVRGQKDLLKNVIRRKNVQSSEQSKHESTSTTYAQEKSGLWKEVDILKGDKQVLAQX

SEQ ID NO: 6641 - protein, 419 aa, Zea mays
  unsure (1)..(419): unsure at all Xaa locations
MGFTKRSPQHPASPAGGEVGAQTAGKVTPVPAAPESAPVAVVPRPPDVAPFLTKVYDMVSDPATDAVISWSAGGGSFVIWDSHAFERDLLPRHFKHNHFTSFIRQLNTYGFHKVDPDRWEWANEGFVKGQKHLLKTIKRKKKSSQDVPSDLQSVPVKTAPGTENIEIGKYGGLEKEVETLKRDKALLMQQLVDLRQYQQSSSXAEVQNLIQRLRVMEQNQQQMMALLAIVVQNPDFLNQLVQQQRRSNWWNDDGNRKRRFQALEHGPVDDQETSGGGAQIIQYRPPVPETSNQPIPANEAFYSTPAQPASSPALEMPMDVEMTSNNVDTFDSTGNDFTDTSALCEWDDMDXXFGDELEHILQQPEQDFQVDPPLTVEDYGYDHPRLEQDCQMEAQQNCKNPQYVACVLKQRESHASDVH

SEQ ID NO: 6642 - protein, 377 aa, Zea mays
  unsure (1)..(377): unsure at all Xaa locations
MDSTLNQVKEESHGEGGDLMAGTVEAADGPSAAVAAAPKPMEGLHDPGPPPFLTKTYDMVDDSDTDLIVSWSATNNSFVVWDPHAFATVLLPRHFKHNNFSSFVRQLNTYGFRKVDPDRWEFANEGFLRGQRHXLLRNIRRRKPPAQNATNQQSIGPGLEVGHFGYDAEIDMWKRDKQLLMAEVVKLRQEQQNTKANLKAMEDRLQGTEQKQQQMMAFLARVMRNPEFLKHLVSQNEMRKELQDAISKKRRRRIDQGPEADDLGASSSLEQGSPVLFNAQDPVEFLVDGIPADLESPAFDGHGLIGPHDIDIDIDIGSTSEQQQDMPQEDLNDNFWEQLLNEGLGEENDSPVIEDXXMNVLSEKMGYLNSDGPTSSN

SEQ ID NO: 6643 - protein, 406 aa, Zea mays
  unsure (1)..(406): unsure at all Xaa locations
MSHGNGMLNSVKVERWPAAVAANGQPRPMDVLHDGSSPPFLTKTYDMVDDPTTNAVVSWSAANNSFXXWDPHIFGTVLLPRYFKHNNFSSFVRQLNTYGFRKVDPDRWEFANEEFLRGQRHLLKNIRRRKPPHSSPNQQSLGSYLEVGHFGYEEEIDQLKRDKQLLMAEVVKLRQEHQNTRSDLQAMEEKLQDTEQKQQQMMAFMARVMQNPDFMRQLISQREMRKELEDAISKKRRRRIDQGHEAGSMGTGSSLEQGPQGVFEPQEPVESVANGVPSDLESSSVEAKGLXXVRQGVSSGGSEHLNGRPSXXELNDDFWEDLLHEGGLGDVSLPQLKQHGPRHXPLLCYDNGCDSVSIFTVMLVISLWCTCFDRSSSTKCHVDCSLQLLIQSVQHADLSIWVKMFI

SEQ ID NO: 6644 - protein, 300 aa, Zea mays
  unsure (1)..(300): unsure at all Xaa locations
MVEEGATAAASRSGPAPFLSKTHQMVEEPGTDEVISWAEQGRSFVVWKPVELARDLLPLHFKHCNFSSFVRQLNTYGFRKVVPDRWEFANENFRRGEQGLLSGIRRRKSTTPQPSKYGGGSVVNTAFPPPLPFPPPASVTTSGGGGGAGAGNERSSSSASSPPRTXXDLTSENEQLKKDNRTLSTELAQARRHCEELLGFLSRFLDVRQLDLGLLMQEDVRAGAGDDAAPRRAMVSQLERGGEEGKSVKLFGVLLKDAARKRARCEEAAASERPIKMIRIGXXPWIGVPSSGPGRCGGGN

SEQ ID NO: 6645 - protein, 354 aa, Zea mays
  unsure (1)..(354): unsure at all Xaa locations
MDKPVAPGIIKEELLEQQPPSGDAPRPMEGLHEVGPPPFLTKTFDLVEDPATDAVLSWSRAGNSFIVWDPHVFADGLLPRLFKHSNFSSFVRQLNTYGFRKVDPDRWEFANEGFLRGQRHLLKMIKRRKPPSAVAPLRQQRAPASCLEVGEFGFEEEIDRLKRDKNILITEVVKLRQEQQSTKDHVRAMEERLRVAEQKQVQMMGFLARAMRNPEFFQQLAQQQDKRKELEDTISKKRRRPIDNTPFYSDGESEQLDSXXLKMFESGVLNGLNEXXELENLAVNIQELGKGSIDDGNLXXQVSDQSELNDDFWAELLVEDFGDKAGQPELEXXRTEDVNDLAQQLGYLSSSSPK

SEQ ID NO: 6646 - protein, 239 aa, Zea mays
  unsure (1)..(239): unsure at all Xaa locations
MDKPVAPGIIKEELLEQQPPSGDAPRPMEGLHEVGPPPFLTKTFDLVEDPATDAVLSWSRAGNSFIVWDPHVFADGLLPRLFKHSNFSSFVRQLNTYGFRKVDPDRWEFANEGFLRGQRHLLKMIKRRKPPSAVAPLRQQRAPASCLEVGEFGFEEEIDRLKRDKNILITEVVKLRQEQQSTKDHVRAMEERLRVAEQKQVQMMGFLARAMRNPEFFQQLAQQQDKRKELEDTKKKKKX

SEQ ID NO: 6647 - protein, 177 aa, Zea mays
  unsure (1)..(177): unsure at all Xaa locations
IPCFSPRYAIRNLPEGCFATLPSVPSNGXSSGQICAVGGGDGAMGXAGRGRFLLRDACSGGGGDXGVGQRSLPTPFLNKTYQLVDDPAVDDVISWSEDGSAFIVWRPAEFARDLLPKYFKHNNFSSFVRQLNTYGFRKIVPDRWEFANDCFRRGEKRLLCDIHRRKVTPTVSPLHPL

SEQ ID NO: 6648 - protein, 298 aa, Zea mays
  unsure (1)..(298): unsure at all Xaa locations
MGEAASAVAASKRGGGGPAPFLTKTHQMVEERGTDEVISWAEQGRSFVVWKPVELARDLLPLHFKHCNFSSFVRQLNTYGFRKVVPDRWEFANDNFRRGEQGLLSGIRRRKSTAPKSGSGGSGGVNATFPPPLPPPPPASATTSGVHERSSSSASSPPRAXXDLASENEQLKKDNHTLSVELAQARRHCEELLGFLSRFLDVRQLDLRLLMQEDVRAGASDDGAQRRAHAVASQLERGGGEEGKSVKLFGVLLKDAARKRGRCEEAAASERPIKMIRVGXXPWVGVPSSGPGRCGGEN

SEQ ID NO: 6649 - protein, 294 aa, Zea mays
  unsure (1)..(294): unsure at all Xaa locations
MDGLHTELALGLLECGVVGSGGETAPFVAKTYQMVCDSRTDALVRWGRGNNSFVVADPAGFSRLLLPCFFKHSNFSSFVRQLNTYGFRKVHPDRWEFAHESFLRGQTHLLPRIVRRKKRGGGGGACSSGGDAPQAGCCISTMGEDHRPEADPDEKQEADAEAALLEEVQRLRQEQTAIGEELAQMSRRLQATERRPDQLMSFLDRLAEDPDGVTRNLVEQAAEKKRRRMQLAFQSQPARPPLPPAPPPPVLHPLLALAGAAANPLDGWQWAEVXXKPSVVLPAFDFDPAARGIX

SEQ ID NO: 6650 - protein, 238 aa, Zea mays
  unsure (1)..(238): unsure at all Xaa locations
LASFSEWFLSQSGFTKWVGFFPRATFLTVSLLVSSRFPSSSRWGGIKFSNPQTKLPEGFFLRTFHFHPTRLALSRIGKSPAQIQPGCGAGRMAEQGGAAGEAAGSDPPXACACDCPGASPSACCGRGXGQRSLPTPFLTKTYQLVDDPAVDDVISWNEDGSTFVVWRPAEFARDLLPKYFKHNNFSSFVRQLNTYGFRKMVPDRWEFANDFFRRGEKRLLCDIHRRKVAPAPAAGLAT

SEQ ID NO: 6651 - protein, 239 aa, Zea mays
  unsure (1)..(239): unsure at all Xaa locations
MLRDRKLPESTSTTFLSLSHSSCATVHPSPIRGAAMVAEQATTTVAVGEPPTATPQPAAAAAAGQRSVPTPFLTKTYQLVDDPAVDDVISWNDDGSAFIVWRPAEFARDLLPKYFKHNNFSSFVRQLNTYGFKKIVPDRWEFANDCFRRGEKRLLCDIHRRKVTPPAAAATVVATIPMALPVDSPVYSGEEQVLSSSSSPXAPVAAAAXQPTPSALVSGDLGEENERLWWENAWFAREX

SEQ ID NO: 6652 - protein, 94 aa, Zea mays
SPPFLTKTYDMVDDPTTNAVVSWSAANNSFVVWDPHIFGTVLLPRYFKHNNFSSFVRQLNTYGFRKVDPDRWEFANEEFLRGQRHLLKNIRRRK

SEQ ID NO: 6653 - protein, 213 aa, Zea mays
  unsure (1)..(213): unsure at all Xaa locations
MEVAGAREPGSGGGGGGGGGGPAPFLLKTYEMVDDPSSDAVVSWSDASDGSFVVWNQPEFAARMLPTYFKHNNFSSFIRQLNTYGFRKIDPERWEFANEYFVKGQKHLLKNIHRRKPIHSHSHQPGALPDNERALFEDEIDRLSREKAALQADLWKFNQQQSGAVNQLEDLERRVLDMEQRQTKMLSFLQQARKNPQFGRKLVKMAEESPIFX

SEQ ID NO: 6654 - protein, 301 aa, Zea mays
  unsure (1)..(301): unsure at all Xaa locations
MHRARPTAHANDPDAPYAAAAAMLLEPKLEDEELPLQQLASPGTFVSLDQLMPPVTAPAEGTLGSPRPLEALLHGPQLPPFLSKTYDLVNEPSLDGVISWGAAGNSFVVWDPSTFARDVLPHNFKHNNFSSFVRQLNTYGFRKVHADRWEFAHEDFLRDSKHLLKRIVRRRSSPTKQCSVQPASSGESSLDPELHTLRREKNALLEEVARLKQEHRQTIEQMSTLNHRLESAEDRQRQMVSFLAKLLQNPSFVRKLKLHREKKEIDSTRVKRKFLKHVPHGSVESGESSMSNGIKKIRSQX

SEQ ID NO: 6655 - protein, 372 aa, Zea mays
  unsure (1)..(372): unsure at all Xaa locations
XRKLTDKIIMVTNPSPAAEETPPSTWELGSTNLHPLAAGSSSGGGGGGGGGGPAPFLLKTYEMVDDPSSDAVVSWSDASDGSFVVWNQPEFAARMLPTYFKHNNFSSFIRQLNTYGFRKIDPERWEFANEYFVKGQKHLLKNIHRRKPIHSHSHQPGALPDNERALFEDEIDRLSREKAALQADLWKFNQQQSGAVNQLEDLERRVLDMEQRQTKMLSFLQQARKNPQFVRKLVKMAEESPIFADAFHKKRRLPGLESDATGTATSFFDDHSSSSRQEMGNLLNQHFSDKLKLGLCPAXGGNNLITLSTQSSHEDNGSPLGKHPDYERTGMECLPLVPQMMELSDTGTSICPSKMYIIPHSKVVRISRNVSX

SEQ ID NO: 6656 - protein, 421 aa, Zea mays
  unsure (1)..(421): unsure at all Xaa locations
SYQPWFLFHPSFLSSLSLSPRAHGARQPDPRVHRRHGRRACHRRGGXAASRHVAAGGGRDGGGGXQRSVPTPFLSKTYQLVDDPAVDDIISWNDDGSAFIVWRPAEFARDLLPKYFKHNNFSSFVRQLNTYGFRKIVPDRWEFANDCFRRGEKRLLCDIHRRKVSPATGAVTVAAAAAAAIPMALPVGSPVYSGEEQVLSSSSPXAPVAAAAPAGAVRVGXSGGVVSGDVGEENERLRRENARLARELGQMKKLCNNILLLMSKYAATQQPDAXPRRRPPGTAPASRRMPPRRLRSLRSSGTDHEDDEKAGARLFGVSIGRKRMRDESDHHAGVCAAEVKAEPVDARPDQQRQRNAXRSRSRGPFTGPGLCTTRSGPATARAALGATTTGPTTRGDGSNRRSALSKLVLHLLMVLGNYITG

SEQ ID NO: 6657 - protein, 354 aa, Zea mays
  unsure (1)..(354): unsure at all Xaa locations
MDKPVAPGIIKEELLEQQPPSGDAPRPMEGLHEVGPPPFLTKTFDLVEDPATDAVLSWSRAGNSFIVWDPHVFADGLLPRLFKHSNFSSFVRQLNTYXLQKVDPDRWEFANEGFLRGQRHLLKMIKRRKPPSAVAPLRQQRAPASCLEVGEFGFEEEIDRLKRDKNILITEVVKLRQEQQSTKDHVRAMEERLRVAEQKQVQMMGFLARAMRNPEFFQQLAQQQDKRKELEDTISKKRRRPIDNTPFYSDGESEQLDSXXLKMFESGVLNGLNEXXELENLAVNIQELGKGSIDDGNLXXQVSDQSELNDDFWAELLVEDFGDKAGQPELEXXRTEDVNDLAQQLGYLSSSSPK

SEQ ID NO: 6658 - protein, 330 aa, Zea mays
RRSSTWTSTSPARLRRRRRRPRGPSPSEMPRPMEGLGEVGPTPFLTKTYDVVDDPNTDTIVSWGFAGTSFVVWDANAFALVILPRYFKHSNFSSFVRQLNTYGFRKVDPDRWEFANEGFQRGQRELLRTIKRRRPPSSPSAQQGQAPSACLEVGQFGLDGEVHRLQRDRGILLAEVVKLRQEQQATRAQMQAMEKRITTAEQKQQQMTVFLARAMKNPSFIRMLVDREGRRRELEDALSRKRRRPIDLVPPARRREKRHCHGVGGERLHFRTSGRRQRRGGGGRRRETVGEKGRRRRRRGHGELLGEVAQPRPGGEAQGGQMRWRGGERS

SEQ ID NO: 6659 - protein, 140 aa, Zea mays
  unsure (1)..(140): unsure at all Xaa locations
MDGLHTELALGLIGCGHGDLQTAPFVAKTYQMVCDPRTDALVRWGKGNNSFLVTDVAGFSQLLLPCFFKHGNFSSFVRQLNTYGFRKVHPDRWEFAHESFLRGQTHLLPRIVRRKKRGEGXGAGASCSSAVGGGEQHQHX

SEQ ID NO: 6660 - protein, 310 aa, Zea mays
  unsure (1)..(310): unsure at all Xaa locations
MAFLVERCGEMVVSMESPHAKPVPAPFLTKTYQLVDDPCTDHIVSWGDDDTTFVVWRPPEFARDLLPNYFKHNNFSSFVRQLNTYGFRKIVADRWEFANEFFRKGAKHLLAEIHRRKSSQPLPTPLPPHQPYHHHHHHLHHHLSPFSPPPPQPVPSYHHHFQEEPIATATAPHGGGAGAGGDFLAALSEDNRQLRRRNSLLLSELAHMKKLYNDIIYFLQNHVAPVTSPSSXXAHASLPSAGGGGAAASSCRLMELDPADXXPSPPRRPEADDGTDTVKLFGVALQGKKKKRAHQEDGDDGNHEQGSSDV

SEQ ID NO: 6661 - protein, 94 aa, Zea mays
LAPFLTKVYDMVSDPATDAVISWSAGGGSFVIWDSHAFSARPLPRHFKHNHFTSFIRQLNTYGFHKVDPDRWEWANEGFIKGQKHLLKTIKRKK

SEQ ID NO: 6662 - protein, 184 aa, Zea mays
  unsure (1)..(184): unsure at all Xaa locations
MDPMPTLVKEEEDGHGTGESPGATAASRPVKGLRDARPSLFLTKTYDMVDDRSTDDVVSWSAGNNSLVVWDLHHFSTVLLPRHFKHSNFSSFVKQLNTYGFRKVDPDRWEFANEGFLRXQRHLLKNIRRRRPPANTASNQQSLGSYLEVGHFGKSSDTDQLKRDKQLLMAEVVKAKAEQQSMKT

SEQ ID NO: 6663 - protein, 200 aa, Zea mays
  unsure (1)..(200): unsure at all Xaa locations
MDGLHTDLALGLLGCGGGGEQLQTAPFVAKTYQMVCDPRTDALVRWGSENNSFVVVDPAGFSRLLLPCFFKHRNFSSFVRQLNTYVSAPVSEARGFRKVHPDRWEFAHESFLRGQTHLLPRIVRRKKRGEGXXCTSSGGDAQAQYAAAAAGCCISMGGEDHRTEGEAEAAVLEEVQRLRQEQTAIGEELAQMSRRLQACX

SEQ ID NO: 6664 - protein, 224 aa, Zea mays
  unsure (1)..(224): unsure at all Xaa locations
SARGPPQQTFVHASTPAGSEGGDGEVRELGLRRGGSAXKAVPAPFLTKTYQLVDDPATDHIVSWGDDRVSTFVVWRPPEFARDILPNYFKHNNFSSFVRQLNTYGFRKVVPERWEFGNEFFRKGEKQLLCEIHRRKTSTSAAPPSPPPFFAAPHFPLFHXGRPAPPPPPPVRGPRGCXPWARLLRRRRPRCRPPMPAEXGRAAVLVEENERLRRSNAALLQACX

SEQ ID NO: 6665 - protein, 369 aa, Zea mays
  unsure (1)..(369): unsure at all Xaa locations
SQSYRPPQQTFVHASTPAGSEGESDGEVRELGLRRGGSAXKAVPAPFLTKTYQLVDDPATDHIVSWGDDRVSTFVVWRPPEFARDILPNYFKHNNFSSFVRQLNTYGFRKVVPERWEFGNEFFRKGEKQLLCEIHRRKTSTSAAPPSPPPFFAAPHFPLFHXGRPAPPPPPPVRGPRGCXPWARLLRRRRPRCRPPMPAEXGRAAVLVEENERLRRSNAALLQELAHMRKLYNDIIYFVQNHVRPAAPSPAAAAFLQGLGLQARKKPAAGPLNHSGGSTTSSSSLTIADSPPPPPQQADKSAGSSGTARSAADRAPPTMLFGVHLSAAREDDQSPTSPAGKPRLALECAGLSLAVAVPSAGASSPASTS

SEQ ID NO: 6666 - protein, 229 aa, Zea mays
  unsure (1)..(229): unsure at all Xaa locations
RLCCCWDQRGSLVTTTTLLSLRXLMDSNRSMATSGVAPFVAKTYRMVDDPATDGVVAWGRDNNSFVVADPFAFSQTLLPAHFKHSNFSSFVRQLNTYGFRKVDPDRWEFAHVSFLRGQTHLLGQIVRRSSXRQAQGRRQRRRRXGSADDEDAVAMEVVRLRREQRAIEEQVAAMWRRVQETERRPKQMLAFLVKVAGDPQVLRRLFLVVERVSNQKSLTDKKKKKKKKK

SEQ ID NO: 6667 - protein, 256 aa, Zea mays
  unsure (1)..(256): unsure at all Xaa locations
CEAVLSVAEGRKDKARQLMAAGGGGGSAAPFVWKTYTMVEDPGTAGVIGWGSGNNSFVVADPFVFSQTLLPAHFKHNNFSSFVRQLNTYGFRKVDPDRWEFAHASFLRGQTHLLRNIVRRGSSAAGAGGGKRKDASPTELWCLKQEQRAIDDRVASMWRRVQETERRPKQMLAFLLKVVGDRDRLHRLXRRRPRARXRVRLRRCRRAARRGGRREAGQAAARRSAWWRSVPRPSTSPGSTAAAVRSAMLPGWMIMM

SEQ ID NO: 6668 - protein, 315 aa, Zea mays
  unsure (1)..(315): unsure at all Xaa locations
MAFLVERCGEMVVSMESPHAKPVPAPFLTKTYQLVDDPCTDHIVSWGDDDXXTFVVWRPPEFARDLLPNYFKHNNFSSFVRQLNTYGFRKIVADRWEFANEFFRKGAKHLLAEIHRRKSSQPLPTPLPPHQPYHHHHHHLHHHLSPFSPPPLAQPVPSYHHHHXXQEEPIATATAPHGGGAGAGGDFLAALSEDNRQLRRRNSLLLSELAHMKKLYNDIIYFLQNHVAPVTSPSSXXAHASLPSAGGGGAAASSCRLMELDPADSPSPPRRPEADDGTDTDTVKLFGVALQGKKKKRAHQEDGDDGNHEQGSSDV

SEQ ID NO: 6669 - protein, 205 aa, Zea mays
  unsure (1)..(205): unsure at all Xaa locations
CEAVLSVAEGRKDKARQLMAAGGGGGSAASFVWKTYTMVEDPGTAGVIGWGSGNNSFVVADPFVFSQTLLPAHFKHNNFSSFVRQLNTYGFRKVDPDRWEFAHASFLRGQTHLLRNIVRRPHGAGLRGRHDHGGHXEVVRLKQEQRAIDDRVASMWRRVQETERRPKQMLAFLLKVVGDRDRLHRLVGDAPLFSQSQKKKKKKKX

SEQ ID NO: 6670 - protein, 216 aa, Zea mays
  unsure (1)..(216): unsure at all Xaa locations
MAFLVERCGEMVVSMESPHAKPVPAPFLTKTYQLVDDPATDHIVSWGDDRVSTFVVWRPPEFARDILPNYFKHNNFSSFVRQLNTYGFRKVVPERWEFGNEFFRKGEKQLLCEIHRRKTPHFPLFHPDAPHHHHHHHSWGEETTGLWRPRTSAASASPSRSRTRIVGGSRRTPPPGSHAAASPGRGSSGAVGRAAVLVEENERLRRSNAALLQACX

SEQ ID NO: 6671 - protein, 276 aa, Zea mays
  unsure (1)..(276): unsure at all Xaa locations
ALHRERNGNWGIGILTLLCVLSSKLRAMGSECKGYGVGVAXQPAAGAGAGWRXAVAPFVAKTFHMVSDPATDAVVRWGGASNTFHVLDPATFSDYLLPSYFKHRNFASFVRQLNTYGFRKVDTDRWEFAHESFLRGQARLLPLVVRKRKKAGAGAGAGGRELCEAGEEVRGTIRAVQRLREQQRGVEDELRAMDRRLRAAESRPAQMMAFLAKLADDPGLVLRAMLAKEEELALIDKGSEEPAKRRRIGAEAVDLAHSRGGGAVPFPFSVLGQVFY

SEQ ID NO: 6672 - protein, 207 aa, Zea mays
  unsure (1)..(207): unsure at all Xaa locations
CEAVLSVAEGRKDKARQLMAAGGGGGSAAPFVWKTYTMVEDPGTAGVIGWGSGNNSFVVADPFVFSQTLLPAHFKHNNFSSFVRQLNTYGFRKVHPDRWEFAHASFLRGQTHLLRNIVRRPHGAGLRGRHDHGGHXEVVRLKQEQRAIDDRVASMWRRVQETERRPKQMLAFLLKVVGDRDRLHRLPFSKKKKKKKKKLEGXXARVX

SEQ ID NO: 6673 - protein, 107 aa, Zea mays
  unsure (1)..(107): unsure at all Xaa locations
KDERRRRHGVXSGSGGTVAPFVAKTFAMVDDPATDAVVRWGPPSNSFVVADPFAFSHALLPAHFKHANFSSFVRQLNTYGFRKVDPDRWEFAHASFLRGQTHLLPRX

SEQ ID NO: 6674 - protein, 147 aa, Zea mays
  unsure (1)..(147): unsure at all Xaa locations
MDKPVAPGIIKEELLEQQPPSGDAPRPMEGLHEVGPPPFLTKTFDLVEDPATDAVLSWSRAGNSFIVWDPHVFADGLLPRLFKHSNFSSFVRQLNTYLDGTRYWMNRRLYXPPSHAIGFRKVDPDRWEFANEGFLRGQRHLAEMIKX

SEQ ID NO: 6675 - protein, 393 aa, Zea mays
  unsure (1)..(393): unsure at all Xaa locations
MELMLPVTVKEEWPPEEEEEEEAPRPMEGLHEVGPPPFLTKTFDLVADPATDEVISWGRAGNSFVVWDPHVFAAVLLPRFFKHNNFSSFVRQLNTYVSAPSTLLAQLLSFIALRLQGFRKIDPDSWEFANEGFLRGQRHLLRLIKRRRPAPPPPYLQASQSQGSCLEVGRFGGLDGEMERLRRDKSILLAEVVKLRQEQQSTRADMRAMEERLRHAEHKQVQMMGFLARAVQSPDLFQLLAQQQGRRRELEGAALLSAASRKRRRPIGAAPANGGLQQQEEEQQQGXTTTTPPPRGRXFAELDERGTTSELENLALNIQGLGKRRQDGSESRARSQQQGGFETAELTDDFWEELLNEGMKGGAALPPERRRPAWYVDALAQKLSSMSNNTTAK

SEQ ID NO: 6676 - protein, 609 aa, Schizosaccharomyces pombe
MIQTASTISSNGGTNQGMESSSANSPEMHGTQNSMSVGMSGSGSSQNRKITQFSNKLYNMVNDSSTDSLIRWSDRGDSFLVIGHEDFAKLVLPRYFKHNNFSSFVRQLNMYGFHKVPHIQQGVLQSDSPNELLEFANPNFQRDQPELLCLVTRKKAGSQPVEESNTSLDMSTISSELQNIRIQQMNLSNELSRIQVDNAALWQENMENRERQRRHQETIDKILRFLASVYLDGKQKPPSKVMPKSRRLLLEAKYPTVSPTNEPSAHSRPSPQGTTANSSSASISSLHNTTPDGEGKYRSVQNGRALNYVSSFNSDSHSPKDYISQSYTNEPGLKKESADSFNNSIDSYISPNQSPNTDVPSLNRDDTTDPKVVNTGDIINMLDDANSIEGSNMNSLSPLLFDYPNSLYPVNNTSSEQHHNSYRGSVSNSQPSGNLSESTNLQPVQPVDYMSNSNPSYGSYNAEDQLTNFHPGYAMDQKRISKLSDGITKQDQNIQALADILGIPLGDGKIDDAGFSANSPTNLNLPVSSDLDSVLNIPPNEDVFPDSNPVFDEFTNISNLTSPIEASNGNTFGSNPVSLPNQQKSVNPSLMTVSSPRQVRKKRKSSIGA

SEQ ID NO: 6677 - protein, 609 aa, Schizosaccharomyces pombe
MIQTASTISSNGGTNQGMESSSANSPEMNGTQNSMSVGMSGSGSSQNRKITQFSNKLYNMVNDSSTDSLIRWSDRGDSFLVIGHEDFAKLVLPRYFKHNNFSSFVRQLNMYGFHKVPHIQQGVLQSDSPNELLEFANPNFQRDQPELLCLVTRKKAGSQPVEESNTSLDMSTISSELQNIRIQQMNLSNELSRIQVDNAALWQENMENRERQRRHQETIDKILRFLASVYLDGKQKPPSKVMPKSRRLLLEAKYPTVSPTNEPSAHSRPSPQGTTANSSSASISSLHNTTPDGEGKYRSVQNGRALNYVSSFNSDSHSPKDYISQSYTNEPGLKKESADSFNNSIDSYISPNQSPNTDVPSLNRDDTTDPKVVNTGDIINMLDDANSIEGSNMNSLSPLLFDYPNSLYPVNNTSSEQHHNSYRGSVSNSQPSGNLSESTNLQPVQPVDYMSNSNPSYGSYNAEDQLTNFHPGYAMDQKRISKLSDGITKQDQNIQALADILGIPLGDGKIDDAGFSANSPTNLNLPVSSDLDSVLNIPPNEDVFPDSNPVFDEFTNISNLTSPIEASNGNTFGSNPVSLPNQQKSVNPSLMTVSSPRQVRKKRKSSIGA

SEQ ID NO: 6678 - protein, 787 aa, Neurospora crassa
MSSPNPRKRPAPGASPVVPLPLQQMPQQFTPGPADQVFRWNNPPDAAAAPLNSFGMISTQAPFPQPIPAPSTALARRPPSRALVTTNQFNGTTDTWASFSDDAAYPLGHNVPPMDEHDNIERLEEMAQRAKREAQAKRKQIPPFVQKLSSFLDESRNTDLIRWSDKGDSFIVLDEDEFAKTLIPELFKHNNYASFVRQLNMYGFHKRVGLSDNSMKASERKNKSPSEYYNPYFRRGHPNLLWLINKPKSGGKGNKPNKTTPKAEGEADSEEDAGGEDPYAGQNYSSAQVGRGSSGAGEVGPLHKKDLVAVKSQLDRLQQQQVAISSLLQKIRAEHTTLFQQALTFQNQHERHENSINAILNFLANVFRKSLEEQGGTQSVQDLLASIIPNAQVHNQNQMPQANVVDLGGFVNHQVHNNTSMGTPKRQQRLLPPIPQQGVAKVHSLASSASPAPVHPQYQAQQMGSVTELFDTTPGDSPSSTFMKNKLQNNPQEGMMKLIQDTNAVSASGGVDLPDMATKTHVNALSNDQRNKMLSIMAGNLPSTNGSSPAPSPTVPAVPTPTATMPPVSTIPTVPVTTAAAPPTPVVPNHAAPNALSPALGSMPPPPPFPSYSHEELDALQRLQEEQASQIDRLTSLLGPLSPSGRIPGIDEHGNPNSAAGYFDSTDIEQYLNDNAFSDPAYEFSGLPGANGTGDGASDFNFNLDDGFDLTNPTHTGATPTPNGGTATTAGTSNTGGLSVPGGGFDSGRIFEHNSPVNTPSPSAATEEISKNDLESPERDPKRRRKG

SEQ ID NO: 6679 - protein, 728 aa, Candida tropicalis
MSKKSNSTNNPGDPRVKKNAFVHKLYTMLNDPNLSHLIWWTTNNVEGNTFALYPGKEFANCLTRYFKHGNVASFVRQLHMYGFHKVSDPHNSSSSSSALSINHINSPYSMNIVHQHQNNAGGAHNNKDVPPIWEFKHSSGKFKKGDEKSLALIKRRSSSNSSSGSRNNSYNETLTLQNHVHPVPQQPMYQEYPIPQQNITYDPYNLNMNFQQQQPPPPPPQPFMYYNNQPQPVPPPLPPPPPLAANQQQLPTPQFVYGQPYFQYPGSIIPPQSQPQPVPQPPPQAAAPPVPSGVTQFTNFSQFPSPSPQQPISQMMNLQPSQNSASNTPQIQQPTPQHVEPPTKRQDCTPDHVKLESLSKSPHQNSAGYNATLQFRKIWDDNNGPVARQRNPSLLYDPLTTIPPTTTPQQQSKSNEGSSSESILPPPSQLNRSSSLNSVPLPLTSSQPSIMAATPPEMFRRSTTPLLHSLSHSSYNNGNTTSRLSNSIPRNSSPLALSSTTAESTPTPNIVSSSSSQPSTSSGLNIPNVTKKPSLFSSSLQERLRPSVFDIHHNHNHQSGIKSPSTIQDTYSKKNSIVSNTSSIFSNKSSISSIASTNQHGINNNRPSLSSITNSHVKEEVEEEVKREEIVIKNGKSILNNDNSKSWTPMNGNASVAQDREQRSLTESPNLKSEICVPENKKVSVNSLLKDDDNEDKTKMGAKNHHLDFNDNNEVHKSRIVTIEKEEN

SEQ ID NO: 6680 - protein, 185 aa, Guillardia theta
MSEKSNLAPFIKKLYQLVNDPMTNDYICWEKNETCFIVNKPTELSVYILPRYFKHNNFSSFVRQLNQYGFHKLEPNEWVFGHPYFKGGDKLKLSSIKRKKQWSSQKNVSVDFYNNEIFKKLIYELDTLKKYKQVLTKDILDVCRRQERFLIKQQSIETKIKKIEEELNNLKYLVFGYFGKILKSN

SEQ ID NO: 6681 - protein, 643 aa, Schistosoma mansoni
MYGFTSGPPVQSIPAFLTKLKLLVDDEETNELIYWDPHGTSFHIRDGNRLAKELLPLYFKHNNLSSFIRQLNMYGFRKINRVDPSLPLKSDTEDMEFSHPYFIRNKDILLSKIQRRTSNMFSPIMGSRNQSFGVKVPYVQANSGLNGSISVSPQRPITATDFLRLAETVRHLRCNQETLSQQISVLKSENQLLYRELSDLREHHDKQSQLIQTLFTFLSAFAKEGRSASVCIGQTKRKALPSITPSGSRLQNKELKLDLRKGFQIERNSVQPLQLVQTSDLLGSHKRPKFDIRNLSAKIGNTSSGANITDQISDIGSVVHILPSNLQLTPVSLECDVNTQSLVDKNPVNVQDGPRYYLSKVDDNFTHPTNDEEFPVGLNVEEDGVTDVNNSILELNWPCSRSDTPYCLTDSPGLSDVIPSKLDGVTDESICDLLLNGDSQTEQEVGNNQPFSESTLSKYKKEPIRKQHKIQNRPRCIAPFAESDPQFVSTTLQDIDSLPWEKYQDSGFDFNLDVEQNQTENSRSSSNGLIVGNEIIPVEPANLNACDDVIQFLRSEIPGKKLKSDEPLKTVATTEAHASTQNGAIDLTSSSSAPTTWKARLSANNRLTISSSPKVKRKQVPVLIRRQSITPLSTPDFCEEELE

SEQ ID NO: 6682 - protein, 520 aa, Schistosoma mansoni
GFTSGPPVQSIPAFLTKLKLLVDDEETNELIYWDPHGTSFHIRDGNRLAKELLPLYFKHNNLSSFIRQLNMYGFRKINRVDPSLPLKSDTEDMEFSHPYFIRNKDILLSKIQRRTSNMFSPIMGSRNQSFGVKVPYVQANSGLNGSISVSPQRPITATDFLRLAETVRHLRCNQETLSQQISVLKSENQLLYRELSDLREHHDKQSQLIQTLFTFLSAFAKEGRSASVCIGQTKRKALPSITPSGSRFQNKELKLDLRKGFQIERNSVQPLQLVQTSDLLGSHKRPKFDIRNLSAKIGNTSSGANITDQISDIGSVVHILPSNLQLTPVSLECDVNTQSLVDKNPVNVQDGPRYYLSKVDDNFTHPTNDEEFPVGLNVEEDGVTDVNNSILELNWPCSRSDTPYCLTDSPGLSDVIPSKLDGVTDESICDLLLNGDSQTEQEVGNNQPFSESTLSKYKKEPIRKQHKIQNRPRCIAPFAESDPQFVSTTLQDIDSLPWEKYQDSGFDFNLDVEQNQTENS

SEQ ID NO: 6683 - protein, 646 aa, Schistosoma mansoni
MYGFTSGPPVQSIPAFLTKLKLLVDDEETNELIYWDPHGTSFHIRDGNRLAKELLPLYFKHNNLSSFIRQLNMYGFRKINRVDPSLPLKSDTEDMEFSHPYFIRNKDILLSKIQRRTSNMFSPIMGSRNQSFGVKVPYVQANSGLNGSISVSPQRPITATDFLRLAETVRHLRCNQETLSQQISVLKSENQLLYRELSDLREHHDKQSQLIQTLFTFLSAFAKEGRSASVCIGQTKRKALPSITPSGSRLQNKELKLDLRKGFQIERNSVQPLQLVQTSDLLGSHKRPKFDIRNLSAKIGNTSSGANITDQISDIGSVVHILPSNLQLTPVSLGNDECDVNTQSLVDKNPVNVQDGPRYYLSKVDDNFTHPTNDEEFPVGLNVEEDGVTDVNNSILELNWPCSRSDTPYCLTDSPGLSDVIPSKLDGVTDESICDLLLNGDSQTEQEVGNNQPFSESTLSKYKKEPIRKQHKIQNRPRCIAPFAESDPQFVSTTLQDIDSLPWEKYQDSGFDFNLDVEQNQTENSRSSSNGLIVGNEIIPVEPANLNACDDVIQFLRSEIPGKKLKSDEPLKTVATTEAHASTQNGAIDLTSSSSAPTTWKARLSANNRLTISSSPKVKRKQVPVLIRRQSITPLSTPDFCEEELE

SEQ ID NO: 6684 - protein, 658 aa, Schistosoma mansoni
MYGFTSGPPVQSIPAFLTKLKLLVDDEETNELIYWDPHGTSFHIRDGNRLAKELLPLYFKHNNLSSFIRQLNMYGFRKINRVDPSLPLKSDTEDMEFSHPYFIRNKDILLSKIQRRTSNMFSPIMGSRNQSFGVKVPYVQANSGLNGSISVSPQRPITATDFLRLAETVRHLRCNQETLSQQISVLKSENQLLYRELSDLREHHDKQSQLIQTLFTFLSAFAKEGRSASVCIGQTKRKALPSITPSGSRLQNKELKLDLRKGFQIERNSVQPLQLVQTSDLLGSHKRPKFDIRNLSAKIGNTSSGANITDQISDIGSVVHILPSNLQLTPVSLGNDGKYIYSLTGSSPECDVNTQSLVDKNPVNVQDGPRYYLSKVDDNFTHPTNDEEFPVGLNVEEDGVTDVNNSILELNWPCSRSDTPYCLTDSPGLSDVIPSKLDGVTDESICDLLLNGDSQTEQEVGNNQPFSESTLSKYKKEPIRKQHKIQNRPRCIAPFAESDPQFVSTTLQDIDSLPWEKYQDSGFDFNLDVEQNQTENSRSSSNGLIVGNEIIPVEPANLNACDDVIQFLRSEIPGKKLKSDEPLKTVATTEAHASTQNGAIDLTSSSSAPTTWKARLSANNRLTISSSPKVKRKQVPVLIRRQSITPLSTPDFCEEELE

SEQ ID NO: 6685 - protein, 631 aa, Schistosoma mansoni
FLTKLKLLVDDEETNELIYWDPHGTSFHIRDGNRLAKELLPLYFKHNNLSSFIRQLNMYGFRKINRVDPSLPLKSDTEDMEFSHPYFIRNKDILLSKIQRRTSNMFSPIMGSRNQSFGVKVPYVQANSGLNGSISVSPQRPITATDFLRLAETVRHLRCNQETLSQQISVLKSENQLLYRELSDLREHHDKQSQLIQTLFTFLSAFAKEGRSASVCIGQTKRKALPSITPSGSRLQNKELKLDLRKGFQIERNSVQPLQLVQTSDLLGSHKRPKFDIRNLSAKIGNTSSGANITDQISDIGSVVHILPSNLQLTPVSLGNDECDVNTQSLVDKNPVNVQDGPRYYLSKVDDNFTHPTNDEEFPVGLNVEEDGVTDVNNSILELNWPCSRSDTPYCLTDSPGLSDVIPSKLDGVTDESICDLLLNGDSQTEQEVGNNQPFSESTLSKYKKEPIRKQHKIQNRPRCIAPFAESDPQFVSTTLQDIDSLPWEKYQDSGFDFNLDVEQNQTENSRSSSNGLIVGNEIIPVEPANLNACDDVIQFLRSEIPGKKLKSDEPLKTVATTEAHASTQNGAIDLTSSSSAPTTWKARLSANNRLTISSSPKVKRKQVPVLIRRQSITPLSTPDFCEEELE

SEQ ID NO: 6686 - protein, 671 aa, Caenorhabditis elegans
MQPTGNQIQQNQQQQQQLIMRVPKQEVSVSGAARRYVQQAPPNRPPRQNHQNGAIGGKKSSVTIQEVPNNAYLETLNKSGNNKVDDDKLPVFLIKLWNIVEDPNLQSIVHWDDSGASFHISDPYLFGRNVLPHFFKHNNMNSMVRQLNMYGFRKMTPLSQGGLTRTESDQDHLEFSHPCFVQGRPELLSQIKRKQSARTVEDKQVNEQTQQNLEVVMAEMRAMREKAKNMEDKMNKLTKENRDMWTQMGSMRQQHARQQQYFKKLLHFLVSVMQPGLSKRVAKRGVLEIDFCAANGTAGPNSKRARMNSEEGPYKDVCDLLESLQRETQEPFSRRFTNNEGPLISEVTDEFGNSPVGRGSAQDLFGDTFGAQSSRYSDGGATSSREQSPHPIISQPQSNSAGAHGANEQKPDDMYMGSGPLTHENIHRGISALKRDYQGASPASGGPSTSSSAPSGAGAGARMAQKRAAPYKNATRQMAQPQQDYSGGFVNNYSGFMPSDPSMIPYQPSHQYLQPHQKLMAIEDQHHPTTSTSSTNADPHQNLYSPTLGLSPSFDRQLSQELQEYFTGTDTSLESFRDLVSNHNWDDFGNNVPLDDDEEGSEDPLRQLALENAPETSNYDGAEDLLFDNEQQYPENGFDVPDPNYLPLADEEIFPHSPALRTPSPSDPNLV

SEQ ID NO: 6687 - protein, 662 aa, Drosophila melanogaster
MSRSRSSAKAVQFKHESEEEEEDEEEQLPSRRMHSYGDAAAIGSGVPAFLAKLWRLVDDADTNRLICWTKDGQSFVIQNQAQFAKELLPLNYKHNNMASFIRQLNMYGFHKITSIDNGGLRFDRDEIEFSHPFFKRNSPFLLDQIKRKISNNKNGDDKGVLKPEAMSKILTDVKVMRGRQDNLDSRFSAMKQENEVLWREIASLRQKHAKQQQIVNKLIQFLITIVQPSRNMSGVKRHVQLMINNTPEIDRARTTSETESESGGGPVIHELREELLDEVMNPSPAGYTAASHYDQESVSPPAVERPRSNMSISSHNVDYSNQSVEDLLLQGNGTAGGNILVGGAASPMAQSVSQSPAQHDVYTVTEAPDSHVQEVPNSPPYYEEQNVLTTPMVREQEQQKRQQLKENNKLRRQAGDVILDAGDILVDSSSPKAQRTSIQHSTQPDVMVQPMIIKSEPENSSGLMDLMTPANDLYSVNFISEDMPTDIFEDALLPDGVEEAAKLDANQASTSKAAAKAQASEEEGMAVAKYSGAENGNNRDTNNSQLLRMASVDELHGHLESMQDELETLKDLLRGDGVAIDQNMLMGLFNDSDLMDNYGLSFPNDSISSEKKAPSGSELISYQPMYDLSDILDTDDGNNDQEASRRQMQTQSSVLNTPRHEL

SEQ ID NO: 6688 - protein, 691 aa, Drosophila melanogaster
MSRSRSSAKAVQFKHESEEEEEDEEEQLPSRRMHSYGDAAAIGSGVPAFLAKLWRLVDDADTNRLICWTKDGQSFVIQNQAQFAKELLPLNYKHNNMASFIRQLNMYGFHKITSIDNGGLRFDRDEIEFSHPFFKRNSPFLLDQIKRKISNNKNGDDKGVLKPEAMSKILTDVKVMRGRQDNLDSRFSAMKQENEVLWREIASLRQKHAKQQQIVNKLIQFLITIVQPSRNMSGVKRHVQLMINNTPEIDRARTTSETESESGGGPVIHELREELLDEVMNPSPAGYTAASHYDQESVSPPAVERPRSNMSISSHNVDYSNQSVEDLLLQGNGTAGGNILVGGAASPMAQSVSQSPAQHDVYTVTEAPDSHVQEVPNSPPYYEEQNVLTTPMVREQEQQKRQQLKENNKLRRQAGDVILDAGDILVDSSSPKAQRTSIQHSTQPDVMVQPMIIKSEPENSSGLMDLMTPANDLYSVNFISEDMPTDIFEDALLPDGVEEAAKLDQQQKFGQSTVSSGKFASNFDVPTNSTLLDANQASTSKAAAKAQASEEEGMAVAKYSGAENGNNRDTNNSQLLRMASVDELHGHLESMQDELETLKDLLRGDGVAIDQNMLMGLFNDSDLMDNYGLSFPNDSISSEKKAPSGSELISYQPMYDLSDILDTDDGNNDQEASRRQMQTQSSVLNTPRHEL

SEQ ID NO: 6689 - protein, 106 aa, Drosophila melanogaster
  unsure (1)..(106): unsure at all Xaa locations
XSGVPAFLAKLWRLVDDADTNRLICWTKDGQSFVIQNQAQFAKELLPLNYKHNNMASFIRQLNMYGFHKITSIDNGGLRFDRDEIEFSHPFFKRNSPFLLDQIKRK

SEQ ID NO: 6690 - protein, 512 aa, Danio rerio
MEYHSVGPGGVVVTGNNVPAFLTKLWTLVEDPDTDPLICWSPNGTSFHVFDQGRFSKEVLPKYFKHNNMASFVRQLNMYGFRKVVHIEQGGLVKPEKDDTEFQHPYFIRGQEQLLENIKRKVTTVSNIKHEDYKFSTDDVSKMISDVQHMKGKQESMDSKISTLKHENEMLWREVATLRQKHSQQQKVVNKLIQFLITLARSNRVLGVKRKMPLMLNDSSSAHSMPKFSRQYSLESPAPSSTAFTGTGVFSSESPVKTGPIISDITELAQSSPVATDEWIEDRTSPLVHIKEEPSSPAHSPEVEEVCPVEVEVGAGSDLPVDTPLSPTTFINSILQESEPVFRPDSAPSEQKCLSVACLDKTELHDHLESIDSGLENLQQILNAQSINFDSSPLFDIFSSAASDVDLDSLASIQDLLSPDPVKETESGVDTDSGKQLVQYTSQPSFSPIPFSTDSSSTDLPMLLELQDDSYFSSEPTEDPTIALLNFQPVPEDPSRTRIGDPCFKLKKESKR

SEQ ID NO: 6691 - protein, 538 aa, Danio rerio
MEYHSVGPGGVVVTGNNVPAFLTKLWTLVEDPDTDPLICWSPNGTSFHVFDQGRFSKEVLPKYFKHNNMASFVRQLNMYGFRKVVHIEQGGLVKPEKDDTEFQHPYFIRGQEQLLENIKRKVTTVSNIKHEDYKFSTDDVSKMISDVQHMKGKQESMDSKISTLKHENEMLWREVATLRQKHSQQQKVVNKLIQFLITLARSNRVLGVKRKMPLMLNDSSSAHSMPKFSRQYSLESPAPSSTAFTGTGVFSSESPVKTGPIISDITELAQSSPVATDEWIEDRTSPLVHIKEEPSSPAHSPEVEEVCPVEVEVGAGSDLPVDTPLSPTTFINSILQESEPVFRPDSAPSEQKCLSVACLDNYPQMSEITRLFSGFSTSSLHLRPHSGTELHDHLESIDSGLENLQQILNAQSINFDSSPLFDIFSSAASDVDLDSLASIQDLLSPDPVKETESGVDTDSGKQLVQYTSQPSFSPIPFSTDSSSTDLPMLLELQDDSYFSSEPTEDPTIALLNFQPVPEDPSRTRIGDPCFKLKKESKR

SEQ ID NO: 6692 - protein, 497 aa, Danio rerio
MEYHSVGPGGVVVTGNNVPAFLTKLWTLVEDPDTDPLICWSPNGTSFHVFDQGRFSKEVLPKYFKHNNMASFVRQLNMYGFRKVVHIEQGGLVKPEKDDTEFQHPYFIRGQEQLLENIKRKVTTVSNIKHEDYKFSTDDVSKMISDVQHMKGKQESMDSKISTLKHENEMLWREVATLRQKHSQQQKVVNKLIQFLITLARSNRVLGVKRKMPLMLNDSSSAHSMPKFSRQYSLESPAPSSTAFTGTGVFSSESPVKTGPIISDITELAQSSPVATDEWIEDRTSPLVHIKEEPSSPAHSPEVEEVCPVEVEVGAGSDLPVDTPLSPTTFINSILQESEPVFRPDSAPSEQKCLSVACLDKTELHDHLESIDSGLENLQQILNAQSINFDSSPLFDIFSSAASDVDLDSLASIQDLLSPDPVKETESGVDTDSGKQLVQYTSQPSFSPIPFSTDSSSTDLPMLLELQDDSYFSSEPTEDPTIALLNFQPVPEDPKLS

SEQ ID NO: 6693 - protein, 497 aa, Danio rerio
MEYHSVGPGGVVVTGNNVPAFLTKLWTLVEDPDTDPLICWSPNGTSFHVFDQGRFSKEVLPKYFKHNNMASFVRQLNMYGFRKVVHIEQGGLVKPEKDDTEFQHPYFIRGQEQLLENIKRKVTTVSNIKHEDYKFSTDDVSKMISDVQHMKGKQESMDSKISTLKHENEMLWREVATLRQKHSQQQKVVNKLIQFLITLARSNRVLGVKRKMPLMLNDSSSAHSMPKFSRQYSLESPAPSSTAFTGTGVFSPEPPVKTGPIISDITELAQSSPVATDEWIEDRTSPLVHIKEEPSSPAHSPEVEEVCPVEVEVGAGSDLPVDTPLSPTTFINSILQESEPVSALTPPPSEQKCLSVACLDKTELHDHLESIDSGLENLQQILNAQSINFDSSPLFDIFSSAASDVGLDSLASIQDLLSPDPVKETESGLDTDSGKQLVQYTSQPIVLPDPLSTDSSSTDLPMLLELQDDSYFSSEPAEDPTIALLNLQPVPEDPKLS

SEQ ID NO: 6694 - protein, 489 aa, Danio rerio
MKHSSNVPAFLTKLWTLVEDSDTNEFICWSQEGNSFLVLDEQRFAKEILPKFFKHNNMASFVRQLNMYGFRKVMHIDSGIVKQERDGPVEFQHPYFKHGQDDLLENIKRKVSNARPEESKIRQDDLSKILTSVQSVHEQQENMDARLATLKRENEALWTELSDLRKVHVQQQQVIKELVQFIFTLVQNNRLLNLKRKRPLALNINGKKSKFIHQLFEEPIDHSKTTVNGLKNNSDISDDVIICDITDEDPEVTDGISVPDEEDAEIVEITYESSPKTVQQDSANGTIVNSTAHQEAEPKTTHDVSTTNSALQLNKPSCLSLEDPMKLMDSILSENGAISQNINLLGKVELMDYLDSIDCSLEDFQAMLYGKQFNIDPDIIEETISETKNNNSKANKENLDSENTDKQLIQYTTCPLMAFLDGCTPLTPSDPQPEDPPDLLDESLEMKTPRSSLIRLEPLTEAEANEATLFYLCELNSDLPNADTPPLDI

SEQ ID NO: 6695 - protein, 511 aa, Oncorhynchus mykiss
MKQNSNVPAFLTKLWTLVEDSDTNEFICWSQEGNSFLVMDEQRFSKDILPKFFKHNNMASFVRQLNMYGFRKVMHIDTGIVKQERDGPVEFQHHYFKHGQDDLLENIKRKVSNARPNDTKIRQEDLSNILASVQNVHGKQESIDSRLNTLKRDNEGLWREISDLRQKHSQQQQIIKKLIQFIVTLVQKNRMSLKRKRPILLNSNGKKPKYIHEIYDDPPLDHNKPSVSGLKSADLTDDVVICDVTDDDTEITEGPSRALDQSDVEIVGVFNNNTVSQTDSADSIGQTNSLVIEPEETTISTYDSLPTSSTLQLNKQSGLSLEDPMKMMDSILNESGAISQNINLLGKVELMDYLDSIDCSLEDFQAMVYGKQFSIDPDILEATEGSGGPKENAGLLSKGDKSSFSADNQLVQYTSCPLLAFLDGCTPLATEADSSTATELGDSLLQHNTEVPTDLLEPDKEPPRSSLIRLEPLTEAEASESTLFYLCELNPEGDTTDSTQLEIYDLFPVQK

SEQ ID NO: 6696 - protein, 451 aa, Xenopus laevis
MDPHGTCGGSNVPAFLAKLWTLVEDPDTDPLICWSPEGNSFHVFDQGQFAKEVLPKYFKHNNMASFVRQLNMYGFRKVVHIEQGGLVKPERDDTEFQHPYFIRGQEQLLENIKRKVNTMSATKSDEVKVRQDSVGKLISDVQSMKGKQESIDGRLLSMKHENEALWREVASLRQKHTQQQKVVNKLIQFLVSLVQSNRILGVKRKIPLMLNDSSTGHSPPKYSRQYSLEHVPSSTSYPVSGFTDSSAGPIISDVTELPESSPSPSPCPSLEASPSPVILIKTEPLTPSQSPEQSPAPPKLDDTPISPSTFIDSILLETETSVCPGGNKNDEMSESHPPEPCLSVACLDNISLSRQMSEVSRLFPTSCSSVPGRAEPPGLDMAVAELNDHVDNIDFNLDTLQNLLNGQSFSVDTSALMDLFSPSLGIPDLSLPDPDSSLASVSSTPIYTCVV

SEQ ID NO: 6697 - protein, 564 aa, Gallus gallus
MKQEPQQQQPAQQPPPAGAGVPAFLSKLWALVGEAPSNQLITWSQNGQSFLVLDEQRFAKEILPKYFKHNNMASFVRQLNMYGFRKVVHVDSGIVKLERDGLVEFQHPYFKQGREDLLEHIKRKVSSSRPEENKISQEDLSKIISSAQKVEIKQETIESRLSALKRENESLWREVAELRAKHLKQQQVIRKIVQFIVTLVQNNQLVSLKRKRPLLLNTNGPTKSNVFQQIVKEPADNNNHVPLNRTEGLKQREQISDDIIIYDVTEDVADEENTMVDEENAPITPETNEDTTSDSSNCSRSPDIVIVEDDNEEEYAPVIQGDKSTESVAVSANDPLSPVSDSTSPLMSSAVQLNNQSTLTAEDPVSMMDSILNENGVISQNINLLGKVELLDYLDSIDCSLEDFQAMLSGRQFSIDPDLLFDLFTSSVQMNPTDHIPNTKMETKGIETTKSNAGPAASQETQVSKPKSDKQLIQYTAFPLLAFLDGNPGSTVESGSSATETPSSVDKPLEVDELLESSLDPEPTQSKLVRLEPLTEAEASEATLFYLCELAPAPMDTDMPFLDN

SEQ ID NO: 6698 - protein, 491 aa, Gallus gallus
MEGPGAAAAAVGAGPGGSNVSAFLTKLWTLVEDPETDPLICWSPSGNSFHVFDQGQFAKEVLPKYFKHNNMASFVRQLNMYGFRKVVHIEQGGLVKPEKDDTEFQHPYFIRGQEHLLENIKRKVTSVSSIKNEDIKVRQDNVTKLLTDIQVMKGKQESMDSKLIAMKHENEALWREVASLRQKHAQQQKVVNKLIQFLISLVQSNRILGVKRKIPLMLNDSSSAHSMPKYSRQYSLEHVHGSSPYAASSPAYSGSNIYSPDSSTNSGPIISDVTELAQSSPSASPSGSLDERSSPVVRIKEEPPSPSRSPKENEPSTTTAAAGNSTEQPQPQEKCLSVACLDKNELNDHLDTIDSNLDNLQTMLSTHGFSVDTTALLDLFSPSMTVTDMNLPDLDSSLASIQDLLSSQEQQKPSEADAAAADTGKQLVHYTAQPLFLVDSSAVDVGSGDLPIFFELGEGSYFTDGDEYNEDPTISLLSGTEQPKPKDPTVS

SEQ ID NO: 6699 - protein, 467 aa, Gallus gallus
MREGSALPGAPGAAPVPGFLAKLWALVEDPQSDDVICWSRNGENFCILDEQRFAKELLPKYFKHNNISSFIRQLNMYGFRKVVALENGMITAEKNSVIEFQHPFFKQGNAHLLENIKRKVSAVRTEDLKVCAEDLHKVLSEVQEMREQQNNMDIRLANMKRENKALWKEVAVLRQKHSQQQKLLSKILQFILSLMRGNYIVGVKRKRSLTDAAGASPSKYSRQYVRIPVESGQAMAFSEHNSDDEDGNRTGLIIRDITDTLENATNGLLAVAHTSGRDRETQTALDPGLPICQVSQPNELSCAEPIPPVHINDVSKPNEMGNVAVELHTAQANAPEDPVSVIDSILNENNSGNQNDPLLDREEIQDFLNCIDASLEELQAMLSGKQYSFGSEAFSDVFNPELPALDMNLMETSPGMENIANMEDSTEDLGASERETAGSKGGQEGTESCDSSVLFQNCVLKWNFSSL

SEQ ID NO: 6700 - protein, 529 aa, Homo sapiens
MDLPVGPGAAGPSNVPAFLTKLWTLVSDPDTDALICWSPSGNSFHVFDQGQFAKEVLPKYFKHNNMASFVRQLNMYGFRKVVHIEQGGLVKPERDDTEFQHPCFLRGQEQLLENIKRKVTSVSTLKSEDIKIRQDSVTKLLTDVQLMKGKQECMDSKLLAMKHENEALWREVASLRQKHAQQQKVVNKLIQFLISLVQSNRILGVKRKIPLMLNDSGSAHSMPKYSRQFSLEHVHGSGPYSAPSPAYSSSSLYAPDAVASSGPIISDITELAPASPMASPGGSIDERPLSSSPLVRVKEEPPSPPQSPRVEEASPGRPSSVDTLLSPTALIDSILRESEPAPASVTALTDARGHTDTEGRPPSPPPTSTPEKCLSVACLDKNELSDHLDAMDSNLDNLQTMLSSHGFSVDTSALLDLFSPSVTVPDMSLPDLDSSLASIQELLSPQEPPRPPEAENSSPDSGKQLVHYTAQPLFLLDPGSVDTGSNDLPVLFELGEGSYFSEGDGFAEDPTISLLTGSEPPKAKDPTVS

SEQ ID NO: 6701 - protein, 529 aa, Homo sapiens [sequence omitted]

SEQ ID NO: 6702 - protein, 536 aa, Homo sapiens
MKQSSNVPAFLSKLWTLVEETHTNEFITWSQNGQSFLVLDEQRFAKEILPKYFKHNNMASFVRQLNMYGFRKVVHIDSGIVKQERDGPVEFQHPYFKQGQDDLLENIKRKVSSSKPEENKIRQEDLTKIISSAQKVQIKQETIESRLSELKSENESLWKEVSELRAKHAQQQQVIRKIVQFIVTLVQNNQLVSLKRKRPLLLNTNGAQKKNLFQHIVKEPTDNHHHKVPHSRTEGLKPRERISDDIIIYDVTDDNADEENIPVIPETNEDVISDPSNCSQYPDIVIVEDDNEDEYAPVIQSGEQNEPARESLSSGSDGSSPLMSSAVQLNGSSSLTSEDPVTMMDSILNDNINLLGKVELLDYLDSIDCSLEDFQAMLSGRQFSIDPDLLVDLFTSSVQMNPTDYINNTKSENKGLETTKNNVVQPVSEEGRKSKSKPDKQLIQYTAFPLLAFLDGNPASSVEQASTTASSEVLSSVDKPIEVDELLDSSLDPEPTQSKLVRLEPLTEAEASEATLFYLCELAPAPLDSDMPLLDS

SEQ ID NO: 6703 - protein, 230 aa, Homo sapiens
MKQSSNVPAFLSKLWTLVEETHTNEFITWSQNGQSFLVLDEQRFAKEILPKYFKHNNMASFVRQLNMYGFRKVVHIDSGIVKQERDGPVEFQHPYFKQGQDDLLENIKRKVSSSKPEENKIRQEDLTKIISSAQKVQIKQETIESRLSELKSENESLWKEVSELRAKHAQQQQVIRKIVQFIVTLVQNNQLVSLKRKRPLLLNTNGAQKKNLFQHIVKEPTDNHHHKVIF

SEQ ID NO: 6704 - protein, 463 aa, Homo sapiens
MVQEAPAALPTEPGPSPVPAFLGKLWALVGDPGTDHLIRWSPSGTSFLVSDQSRFAKEVLPQYFKHSNMASFVRQLNMYGFRKVVSIEQGGLLRPERDHVEFQHPSFVRGREQLLERVRRKVPALRGDDGRWRPEDLGRLLGEVQALRGVQESTEARLRELRQQNEILWREVVTLRQSHGQQHRVIGKLIQCLFGPLQAGPSNAGGKRKLSLMLDEGSSCPTPAKFNTCPLPGALLQDPYFIQSPSTYSLSQRQIWALALTGPGAPSSLTSQKTLHPLRGPGFLPPVMAGAPPPLPVAVVQAILEGKGSFSPEGPRNAQQPEPGDPREIPDRGPLGLESGDRSPESLLPPMLLQPPQESVEPAGPLDVLGPSLQGREWTLMDLDMELSLMQPLVPERGEPELAVKGLNSPSPGKDPTLGAPLLLDVQAALGGPALGLPGALTIYSTPESRTASYLGPEASPSP

SEQ ID NO: 6705 - protein, 493 aa, Homo sapiens [sequence omitted]

SEQ ID NO: 6706 - protein, 366 aa, Homo sapiens
MQEAPAALPTEPGPSPVPAFLGKLWALVGDPGTDHLIRWSPSGTSFLVSDQSRFAKEVLPQYFKHSNMASFVRQLNMYGFRKVVSIEQGGLLRPERDHVEFQHPSFVRGREQLLERVRRKVPALRGDDGRWRPEDLGRLLGEVQALRGVQESTEARLRELRQQNEILWREVVTLRQSHGQQHRVIGKLIQCLFGPLQAGPSNAGGKRKLSLMLDEGSSCPTPAKFNTCPLPGALLQDPYFIQSPSTYSLSQRQIWALALTGPGAPSSLTSQKTLHPLRGPGFLPPVMAGAPPPLPVAVVQAILEGKGSFSPEGPRNAQQPEPGDPREIPDRGPLGLESGDRSPESLLPPMLLQPPQESVEPAGPLD

SEQ ID NO: 6707 - protein, 793 aa, Rhodobacter blasticus
MRPRSNAGSSPPDPEEQEHAQVPSFSSTLEQAIHAALALANARRHELATLEHLLLALIDEPDAARVMKACSVDLEDLKKTLTDFIDDDLSTLVTSVEGSEAVPTAAFQRVIQRAAIHVQSSGRTEVTGANVLVAIFAERESNAAYFLQEQDMTRYDAVNFIAHGVAKDPSYGESRPVQGADEPQETPKAEAGEAKESALSKYCVDLNIKARKGDVDPLIGREAEVERAIQVLCRRRKNNPLLVGDPGVGKTAIAEGLAWKIIKKEVPEVLSGATIFSLDMGALLAGTRYRGDFEERLKAVVKELEDHPDAILFIDEIHTVIGAGATSGGAMDASNLLKPALQGGKLRCMGSTTYKEFRQHFEKDRALSRRFQKIDVNEPSVPDAIKILMGLKPHFEEHHELRYTADAIKSAVELASRYINDRKLPDSAIDVIDEAGAAQHLVSDSKRKKVLGTKEIEAVVAKIARIPPRNVSKDDAETLRDLERTLKRLVFGQDKAIEALSASIKLARAGLREPEKPIGNYLFTGPTGVGKTEVAKQLAATLGVELLRFDMSEYMEKHAVSRLIGAPPGYVGFDQGGMLTDGVDQHPHCVLLLDEIEKAHPDVYNILLQVMDHGKLTDHNGRAVDFRNVILIMTSNVGAADMAKEAIGFGRERRTGEDTAAVERTFTPEFRNRLDAVISFAPLGREIILQVVEKFVLQLEAQLIDRNVHIELTPEAAAWLGEKGYDDKMGARPLGRVIQEHIKKPLAEELLFGKLTKGGLVKVGVKDDAIVLEVQEPQKPRLTGQKPPLLTAE

SEQ ID NO: 6708 - protein, 628 aa, Rhodospirillum rubrum
GAMVAGAKFRGEFEERLKAMLTEVSAAEGEIILFIDEMHTLIGAGAGEGAMDASNLLKPALARGDLHCVGATTLNEYRKHVEKDAALARRFQPVFVSEPGVADTISILRGIKEKYELHHGVRIADNALVAAATLSNRYITDRFLPDKAIDLMDEAASRLRMEVDSKPEALDELDRRIIQLKIEREALRKEKDIASEARLSDLEKELADLESQSATLTEDWKREKEGLAGSTRIKEQLEQARGDLDIAKRQANWARAGELEYGVIPDLERRLGEVESGDGLAHRQGGKLVNEVVTAETIASVVSRWTGIPVDKMLAGEREKLLGMEKVLASRVVGQREAVVAVSNAVRRSRAGLQDPNRPMGSFLFLGPTGVGKTELTKALAAFLFDDEQAMVRIDMSEYMEKHAVSRLIGAPPGYVGYDEGGALTEAVRRRPYQVILFDEVEKAHPDVFNVLLQVLDDGRLTDGQGRTVDFRNTLIVLTSNLGADILANQPEGDDSGAVRGAVMEMVRAAFRPEFLNRLDEILLFHRLFRENMAGIVSIQLGRLADRLRDRKMTLDLDDAARDWLAERGYDPVYGARPLKRVIQRSLENPLATLVLDGRIKDGDVIRITVEGGKLVVNGEALSLDTAA

SEQ ID NO: 6709 - protein, 679 aa, Chloroflexus aurantiacus
MIGRDEEIRRVIQILSRRTKNNPVLIGEPGVGKTAIVEGLAQRIVRGDVPEALKNKRVIALDLGALIAGAKYRGEFEERLKAVLKEIQERDDIILFVDELHTVVGAGAAEGAMDAGNMLKPMLARGELHMVGATTLDEYRKHIEKDAALERRFQPVMVDPPSVEDTISILRGLKERYETHHGVRITDGALIAAAMLSDRYISDRFLPDKAIDLIDEAAARLRMEITSDPQELDDLKRRIMQLEIEREALRKEKDQASKERLEKLEQELANLREQRSALEAQIQRERQELERIQQLKEKIEQTRAAIEQAQRQYDYNKAAELQYGTLVSLERELQAAEAQLGSQSRLLRQEVTETDIAEIISKWTGIPVTKLLEGELEKLVHMEERLHQRVVGQDEAVIAVSNAVRRARAGLQDPNRPLGSFLFLGPTGVGKTELARALAEFLFDDEQAMIRIDMSEYMEKHSVARLIGAPPGYVGYDEGGQLTEAVRRKPYSVVLFDEIEKAHPDVFNVLLQVLDDGRLTDGQGRIVNFKNTVIIMTSNIASTTIQELTRAGAGQSEIRAAVMEELRGVLRPEFLNRIDEVIVFSPLSREHIDRIVEIQLNRLRKLLADRKLNLVLTDAARAQLAAEGYDPVYGARPLKRVIQQRIQNPLALQLLQGAFPEGSTIVVDVENGTFVFRRS

SEQ ID NO: 6710 - protein, 872 aa, Chlamydophila pneumoniae AR39
MLGVNFMEKFSDAVSEALEKAFELAKSSKHTYVTENHLLLALLENTESLFYLVIKDIHGNPGLLNTAVKDALSREPTVVEGEVDPKPSPGLQTLLRDAKQEAKTLGDEYISGDHLLLAFWSSNKEPFNSWKQTTKVSFKDLKNLITKIRRGNRMDSPSAESNFQGLEKYCKNLTALAREGKLDPVIGRDEEIRRTIQVLSRRTKNNPMLIGEPGVGKTAIAEGLALRLIQGDVPESLKGKQLYVLDMGALIAGAKYRGEFEERLKSVLKDVESGDGEHIIFIDEVHTLVGAGATDGAMDAANLLKPALARGTLHCIGATTLNEYQKYIEKDAALERRFQPIFVTEPSLEDAVFILRGLREKYEIFHGVRITEGALNAAVLLSYRYIPDRFLPDKAIDLIDEAASLIRMQIGSLPLPIDEKERELAALIVKQEAIKREQSPSYQEEADAMQKSIDALREELASLRLGWDEEKKLISGLKEKKNSLESMKFSEEEAERVADYNRVAELRYSLIPQLEEEIKQDEASLNQRDNRLLQEEVDERLIAQVVANWTGIPVQKMLEGEAEKLLILEESLEERVVGQPFAVSAVSDSIRAARVGLNDPQRPLGVFLFLGPTGVGKTELAKALADLLFNKEEAMVRFDMSEYMEKHSISKLIGSSPGYVGYEEGGSLSEALRRRPYSVVLFDEIEKADKEVLNILLQVFDDGILTDGKKRKVNCKNALFIMTSNIGSPELADYCSKKGSELTKEAILSVVSPVLKRYLSPEFMNRIDEILPFVPLTKEDIVKIVGIQMRRIAQRLKARRINLSWDDSVILFLSEQGYDSAFGARPLKRLIQQKVVILLSKALLKGDIKPDTSIELTMAKEVLVFKKVETPS

SEQ ID NO: 6711 - protein, 866 aa, Chlamydophila pneumoniae CWL029
MEKFSDAVSEALEKAFELAKSSKHTYVTENHLLLALLENTESLFYLVIKDIHGNPGLLNTAVKDALSREPTVVEGEVDPKPSPGLQTLLRDAKQEAKTLGDEYISGDHLLLAFWSSNKEPFNSWKQTTKVSFKDLKNLITKIRRGNRMDSPSAESNFQGLEKYCKNLTALAREGKLDPVIGRDEEIRRTIQVLSRRTKNNPMLIGEPGVGKTAIAEGLALRLIQGDVPESLKGKQLYVLDMGALIAGAKYRGEFEERLKSVLKDVESGDGEHIIFIDEVHTLVGAGATDGAMDAANLLKPALARGTLHCIGATTLNEYQKYIEKDAALERRFQPIFVTEPSLEDAVFILRGLREKYEIFHGVRITEGALNAAVLLSYRYIPDRFLPDKAIDLIDEAASLIRMQIGSLPLPIDEKERELAALIVKQEAIKREQSPSYQEEADAMQKSIDALREELASLRLGWDEEKKLISGLKEKKNSLESMKFSEEEAERVADYNRVAELRYSLIPQLEEEIKQDEASLNQRDNRLLQEEVDERLIAQVVANWTGIPVQKMLEGEAEKLLILEESLEERVVGQPFAVSAVSDSIRAARVGLNDPQRPLGVFLFLGPTGVGKTELAKALADLLFNKEEAMVRFDMSEYMEKHSISKLIGSSPGYVGYEEGGSLSEALRRRPYSVVLFDEIEKADKEVLNILLQVFDDGILTDGKKRKVNCKNALFIMTSNIGSPELADYCSKKGSELTKEAILSVVSPVLKRYLSPEFMNRIDEILPFVPLTKEDIVKIVGIQMRRIAQRLKARRINLSWDDSVILFLSEQGYDSAFGARPLKRLIQQKVVILLSKALLKGDIKPDTSIELTMAKEVLVFKKVETPS

SEQ ID NO: 6712 - protein, 826 aa, Ralstonia metallidurans
  unsure (1)..(826): unsure at all Xaa locations
MVSSLRNVPPSVSLNRRSFPSRRFKGTNEVHVGRDVNNLLNATEKEAIKRNDQFIASELFLLAVSDDKGETGRIARENGLSRKSLEAAITAVRGGDTVNSADAESQREALKKYTVDLTERARAGKLDPVIGRDDEIRRAIQILQRRTKNNPVLIGEPGVGKTAIVEGLAQRIVNGEVPETLKNKRVLVLDMAGLLAGAKYRGEFEERLKAVLNDVAKDEGQTIVFIDEIHTMVGXRXXXKXXRXXXXXXXXXXXXXPXPXGYKPALARGELHCIGATTLNEYRKYIEKDAALERRFQKVLVDEPSVEATIAILRGLQEKYELHHKVEITDPAIVAAAELSHRYITDRFLPDKAIDLIDEAAARIKMEIDSKPEAMDKLERRTIQLKIEREAVKKETDEASRKRLELIEQEIIRLEKEYADLDEIWRAEKGAAQGAAALKEEIEKIKLDITRLQREGKLDKVAELQYGKLPELEGKLQAATKAEASEQKQQNKLLRTQVGAEEIAEVVSRATGIPVAKMMQGEREKLLKMEDRLHQRVVGQDEAVRLVSDAIRRSRAGLSDENKPYGSFLFLGPTGVGKTELCKALSEFLFDSEEHLIRIDMSEFMEKHSVSRLIGAPPGYVGYDEGGYLTEAVRRKPYAVILLDEVEKAHPDVFNVLLQVLDDGRLTDGQGRTVDFKNTVIVMTSNLGSHIIQSMAGEPQEAVKGAVWQEVRTHFRPEFLNRIDEVVVFHALDQKNIESIAKIQLKRLQVRLARMDMTLDVSERALEKIASAGYDPVFGARPLKRAIQQQIENPVAKAILEGRFAAKDVVPVDYVDGEFTFGRMVH

SEQ ID NO: 6713 - protein, 893 aa, Ralstonia metallidurans
MTTRDYSPFLRRLNDHCARALADAASLCETRAHRDIEVEHWLIKLMEQGDGDLLAILRRYELDVDGIWNGLLAAVDHLPHDLRGRPGLSQRLGQWLEAAWMRASLESTAPGVDRSIRSAHLLAALAETPHLLRAPDAWPLLSVSAAQIERLMPELDEISVEATSPITPSQGPATIATRRPAGQPDNSALSRFTTDVTQKARDGKIDPVFGRDVEIRQMVDILARRRKNNPILVGEPGVGKTALVEGLALKIAEEDVPTAIRDVTVLTLDMGLLQAGAGVKGEFEQRLKNVIEAVQQSPTPILLFIDEAHTLIGAGNTAGGADAANLLKPALARGELRTIAATTWSEYKQYFERDAALERRFQMVKVDEPDDENACLMLRGLKDRYAQHHNVHITDAAVAAAVRLSRRYLTGRQLPDKAVDLIDTAAARVRMSQEARPVAICTLEAERAALGVEYLALQQDQGATGEDKRNRLSAIETRLRELAIELGQLEFELAAQKDAADKLMVLRAQWQAATDASERHDLASSIQAAHQVLAAHGQATLLHAEVAETVVAQVIADWTGVPVDNLLSNELATLLELEARLGRVVVGQDEALAALGKSLRASKAGLKSEEAPLGVFLLVGPSGVGKTETARALADLMFGGERSLITINLSEYQEAHTVSQLKGSPPGYVGYGEGGILTEAVRQRPYSVVLLDEVEKAHRDVLNLFYQVFDRGFMRDGEGRVIDFRNTVILMTSNLGSEQILAATDATTEAGVEIPASALMETIRPLLIDRFQPALLARFQTIVYRPLAAEAMATIVGMKLAKVAERIERRFDVPLRCDDALVAELVRACLLPDSGARNIDSLLDQQILPVLSRELLIRMANRQVPASIRLSFSEEDGIGLDFDDAATTAEEYA

SEQ ID NO: 6714 - protein, 926 aa, Paracoccidioides brasiliensis
MNGTQLTDRANQALVDAHALAEQHAHPQLLPIHLAVSLLDPPVDESKDQQVTTHPSHQASSGSLFKRVVEKAHGDPQQLRRALNKSLVRLASQDPPPETISPSPAFAKVLRAASNLSKTQKDTYVAIDHLIAALAQDPTIQRALADANIPNVKMIDSAIQQIRGMKRVDSKTADTEEESENLKKFTVDMTAMAREGKIDPVIGREEEIRRVIRILSRRTKNNPVLIGEPGVGKTTVVEGLARRIVNADVPANLANCKLLSLDVGSLVAGSKYRGEFEERMKGVLKEIEESKETIVLFVDEIHLLMGAGSSGEGGMDAANLLKPMLARGQLHCIGATTLGEYRKYIEKDQAFERRFQQVLVKEPTVGETISILRGLKERYEVHHGVNILDGAIVSAANLASRYLTARRLPDSAVDLIDEAAAAVRVTRESQPEALDTLERRARQLQIEIHALAREKDAASKARLEAAKQEAANVNEELRPLREKYESEKQRSKDIQDAKIKLDLLKVKRDEATRSGDTQTASDLIYYAIPDVEKRIEQLEAERARQDAELSAQPGAGETLMADAVGPEQINEIVARWTGIPVTRLRTTEKDRLLHMESHLSKIVVGQKEAVQSVSNAIRLQRSGLSNPNSPPSFLFCGPSGTGKTLLTKALAEFLFDDPKAMIRFDMSEYQERHSLSRMIGAPPGYVGHDAGGQLTESLRRRPFSILLFDEVEKAAKEVLTVLLQLMDDGRITDGQGRIVDAKNCIVVMTSNLGAEFLQRPTASNGQIDPTTKELVMGALRNYFLPEFLNRISSIIIFNRLTRREIRKIVDVRLQEIQRRLEQNDRTVTIDCTDEVKDYLGNAGYSPVYGARPLSRLIEKEVLNRLAVLILRGAIKDGETARVVMQEGRITVLPNHVETESEDEEMIDESDTLAEMEEDMGERDLYE

SEQ ID NO: 6715 - protein, 792 aa, Paracoccidioides brasiliensis
MLLKTTSLTHTITIMDKHLLHTLTGVQVNAIDKALAVGPDWVLLGLSEVGATKSLLNSIGVSADSLRQVILKIRGDEKVMSNNHEDQRDSLNKYTVDLTERALAGKLDPVIGRDDEIRRTVQVLSRRTKNNPVLIGEPGVGKTAIVEGLAQRIVNGEVPESLKGKRVLSLDLGSLLAGAKYRGEFEERLKAVLKDLAKHEGEIILFIDELHTLVGAGKGDGAMDAGNMLKPALARGELRCVGATTLDEYRQYIEKDAALERRFQKVLVDEPSVEDTIAILRGLKERYEVHHGVKILDSAIIAAAKMSHRYITDRQLPDKAIDLIDEAASRIKMELDSKPEALDKLERRLIQLKLQLEAVKKDEDAGSRAEVSHLEKQIEDVQKDYNDLEEVWKSEKTLVEGTKQIQAQLDQARIALQKAQRENDLGEMSRLQYGVIPELEKQLAQDELVEEKEEPKLLRNKVTDNEIAEVVSAATGIPVAKMLQGEREKLLQMESFLHQRVVGQDEAVIAVSNAVRRSRAGLSDPNRPSGSFLFLGPTGVGKTELTKALANFLFDSDDAMIRIDMSEFMEKHSVSRLVGAPPGYVGYEEGGVLTEAVRRKPYSVVLFDEVEKAHPDVFNILLQVLDDGRLTDSQGRVVDFKNTVIVMTSNLGSSDVRELGDNPSRDDVRNVVMAAVSEHFRPEFINRIDELVVFHALEKAQIRGIADIQLDRLRARLADRDIKLTVDDSAFDQLIEAGFDPVYGARPLKRAIQQQVENNLAQKILAGDFQPGDTIVITADAGQLDFQKLKLN

SEQ ID NO: 6716 - protein, 859 aa, Neisseria meningitidis MC58
MRYDKLTAKFQQALAEAQSLALAADGSYLEAGFVLKALLDDQNSGAAALLAHAGVNVPQVKQRLQQHLNSLPKVSGQGGDILPSRELQAVLNLMDKAATKRSDAYIASELFLLALVQQNDATGKILKEAGATEQNINAAIDAVRGGQNVNDANAEDQRDALKKYTLDLTQRARDGKLDPVIGRDDEIRRAIQVLQRRTKNNPVLIGEPGVGKTAIVEGLAQRIVNGEVPESLRNKRLLVLDLAALIAGAKYRGEFEERLKGVLNDLAKDDGNTLIFIDEIHTLVGAGKTDGAMDAGNMLKPALARGELHCIGATTLDEYRQYIEKDAALERRFQKVLVGEPSVEDTIAILRGLQERYEIHHGIDITDPAIVAAAELSDRYITDRFLPDKAIDLIDEAASRVKMEKETKPEAMDKIDRRLIQLRMEKAHVEKEKDDASKKRLELIDEEINGLQKEYADLDEIWKAEKAISDGAANIKKQIDEVKIKIEQAKRQGDLALASKLMYEDLEHLEKQRAAAERADTDSTKPANKLLRNNVGAEEIAEVVSRMTGIPVSKMMEGERDKLLKMEEVLHRRVVGQDEAVRAVSDAIRRSRSGLADPNKPYGSFLFLGPTGVGKTELCKALAGFLFDSEDHLIRIDMSEYMEKHAVARLIGAPPGYVGYEEGGYLTEQVRRKPYSVILLDEVEKAHPDVFNILLQVLDDGRLTDGQGRTVDFKNTVIVMTSNIGSQHIQQMGIQDYEAVKEVVMEDVKEHFRPEMINRIDEVVVFHGLDQDNIRNIAKIQLKGLEKRLEKQNLRLAVSDAALDIIAKAGFDPIYGARPLKRAIQSEIENPLAKALLAGNYAPESEIRVEADGDRLKFA

SEQ ID NO: 6717 - protein, 859 aa, Neisseria meningitidis Z2491
MRYDKLTAKFQQALAEAQSLALAADSSYLEAGFVLKALLDDQNSGAAALLAHAGVNVPQVKQRLQQHLNSLPKVSGQGGDILPSRELQAVLNLMDKAATKRGDAYIASELFLLALVQQNDAAGKILKEAGATEQNINAAIDAVRGGQNVNDANAEDQRDALKKYTLDLTQRARDGKLDPVIGRDDEIRRAIQVLQRRTKNNPVLIGEPGVGKTAIVEGLAQRIVNGEVPESLRNKRLLVLDLAALIAGAKYRGEFEERLKGVLNDLAKDDGNTLIFIDEIHTLVGAGKTDGAMDAGNMLKPALARGELHCIGATTLDEYRQYIEKDAALERRFQKVLVGEPSVEDTIAILRGLQERYEIHHGIDITDPAIVAAAELSDRYITDRFLPDKAIDLIDEAASRVKMEKETKPEAMDKIDRRLIQLRMEKAHVEKEKDDASKKRLELIDEEINGLQKEYADLDEIWKAEKAISDGAANIKKQIDEVKIKIEQAKRQGDLALASKLMYEDLEHLEKQRAAAERADTDSTKPANKLLRNNVGAEEIAEVVSRMTGIPVSKMMEGERDKLLKMEEVLHRRVVGQDEAVRAVSDAIRRSRSGLADPNKPYGSFLFLGPTGVGKTELCKALAGFLFDSEDHLIRIDMSEYMEKHAVARLIGAPPGYVGYEEGGYLTEQVRRKPYSVILLDEVEKAHPDVFNILLQVLDDGRLTDGQGRTVDFKNTVIVMTSNIGSQHIQQMGIQDYEAVKEVVMEDVKEHFRPEMINRIDEVVVFHGLDQANIRSIAKIQLKGLEKRLEKQNLRLAVSDAALDIIAKAGFDPIYGARPLKRAIQSEIENPLAKALLAGNYAPESEIRVEADGDRLKFA

SEQ ID NO: 6718 - protein, 857 aa, secondary endosymbiont of Glycaspis brimblecombei
MRLDRLTNKFQQALADAQSLAIGQDNQFIEPVHLLIALLDQEGGTLRPLLTSIGVNISQLSNKLNYILNTLPQVHGTAGDIQPSNDLIRHLNLCDKLAQQRGDTFISSELFLLAIFDAKTSLADTLKTMGANKANIEKAIEQMRGGDNVNDQGAEEQRQALKKYTIDLTERAEQGKLDPVIGRDEEIRRTIQVLQRRTKNNPVLIGEPGVGKTAIVEGLAQRIVNGEVPEGLKNKRVLSLDMGALLAGAKYRGEFEERLKDVLNDLAKQEGSVILFIDELHTMVGAGKAEGAMDAGNMLKPALARGELHCVGATTLDEYRQYIEKDAALERRFQKVYVAEPTVEDTIAILRGLKERYELHHHVQITDPAIVAAASLSNRYISDRMLPDKAIDLIDEAGASLRMQMDSKPEALDRLERRVTQLKLEQQALKKESDDASKKRLKMLEEELTEKEREYSELEEEWKAEKAELTGTQHIKAELENARISMEQARRSGDLAKMSELQYGKIPELEKQLEAATKAESHSMKLLRNKVTDAEIAEILARWTGIPVSKMLESEREKLLHMEQDLHKRVIGQNEAVDAVSNAIRRSRAGLSDPNRPIGSFLFLGPTGVGKTELCKALANFLFDSDDAMVRIDMSEFMEKHTVSRLVGAPPGYVGYEEGGYLTEAIRRRPYSVILLDEIEKAHPDVFNILLQVLDDGRLTDGQGRTVDFRNTVVIMTSNLGSDLIQERFGSLGYDEMKELVMEVVSRSFRPEFINRIDEVVVFHPLDKEQITEIAQIQLSRLYKRMEEQGYKVKITPAALEKLGEAGFDPVFGARPLKRAIQQEIENPLAEQMLSGKLVPGKQVTLDIKKGVIVAKQ

SEQ ID NO: 6719 - protein, 875 aa, Deinococcus radiodurans
MTIGHSSFRMRAVKPCPHSGGFPLNPERFTEASAVAINAAQQLAQENHNQNLTHFHVLRTLLDNDTASRALTLAGGDLNTARAALDAEIAKLPKVQGSDGQLYLDPALNRAFQKADTLAAQLGDSFVAADTLLLALRGEYRGRGLPDEVSLNRAVTEQRKGKTVTNKTSEQQFDALNKYGTDLTQRARDGKFDPVIGRDEEIRRVMQILLRRSKNNPVLIGEPGVGKTAIAEGLAMRIVKGDVPEGLRDKKIVSLEMGSLLAGAKFRGEFEERLKGVIDEVVKSAGEIILFVDEIHTIVGAGKTEGSPDAGNMLKPALARGELHLIGATTLDEYREIEKDAALERRFQPVFVDEPSVEDTISILRGIKERYQVHHNVEITDPALVAAATLSNRYITDRQLPDKAIDLIDESAARLRMALESSPERIDQLSRRKLQLEIEREALKREKDVDSQNRLLDIENQLKTLTDELNEVRSRWEAERGEVAALREKREKLDAVRTQIEKARRDYDLEEAARLEYGELPALEKDVQDLEKKLKSAEFAHMEVTEEDIAAVVSRWTGIPVSKLMEGEREKLLHLEEQLHGRVIGQDRAIVSVSDAIRRARAGLNDPNRPLGSFMFLGPSGVGKTELAKALAEFLFDSSDAMVRIDMSEYMEKHTVARLIGAPPGYVGFEEGGQLTEAVRRRPYAVILFDEIEKAHPDVFNVLLQVLDDGRLTDGQGRTVDFRNTLIIMTSNIGSPLILEMQQRGEDAETIKSAVMDELRGEFRPEFLNRVDDIIVFDALTAKDLQSIVDIQLGGLRRRLAERRITLHLTEDAKDKLAELGYDPAYGARPLRRTISQYIETPLAREILGGQIQDGSVLNVDYGDGGFTFNSGSLN

SEQ ID NO: 6720 - protein, 377 aa, Streptococcus thermophilus
MDKIVLFDGSKKDFNSYIKKHGVEEYTPFMELIRQYNEKIRANDTSAVNEVGEVNKNAIENVVIYSDDFASVTDHVITNFPNIVILGHDIENLYIQNAPKRVKYSLEVEFDDIIKNRKSDYYEANSEDIIKFYNTLKNSNVVGQEEAKKKTCAGLYKSAVLKENQPLVLLYYGPSGVGKTELAKKISSFYDGKLTRIQFSMMQTDEAFKYIFGDTHGKPSLARDLLSRETNVVLIDEFDKVSPSLYNVFYQMFDEGEFEDINYKVDVSNCIFILTSNFNNEKNIAEVLGFPIFSRIDTKIKFKELTKAELSLVIEKIFESIYKKISTEDQKLIDGVELKNKYLESVDIFKNIRLLDKFIENDIFNVLFDSRIDKNHN

SEQ ID NO: 6721 - protein, 159 aa, Streptococcus mutans
NSGWQTSHWLFLFFGADSVGKTELAKALAEVLFDDESALIRFDMSEYMEKFAASRLNGAPPGYVGYEEGGELTEKVRNKPYSVLLFDEVEKAHPDIFNILLQVLDDGVLTDSRGRKVDFSNTIIIMTSNLGATAFVMIKPLVLELKAFPRIIRPWKVVF

SEQ ID NO: 6722 - protein, 130 aa, Streptococcus mutans
SFSQDYKAMESRILEELKKVYRPEFINRIDEKVVFHNLGQEDIRHVVKIMVAPLIAHLADQGITLKFQPSALKHLALAGYDAEMGARPLRRTLQTEVEDKLAELILSGKLASGQTLKIGIQKEKLKFDIV

SEQ ID NO: 6723 - protein, 122 aa, Streptococcus mutans
MESRILEELKKVYRPEFINRIDEKVVFHNLGQEDIRHVVKIMVAPLIAHLADQGITLKFQPSALKHLALAGYDAEMGARPLRRTLQTEVEDKLAELILSGKLASGQTLKIGIQKEKLKFDIV

SEQ ID NO: 6724 - protein, 623 aa, Enterococcus faecium
MIAGAKFRGEFEERLKAVLKEVKKSDGRILLFIDEIHNIVGAGKTEGSMDAGNLLKPMLARGELHLIGATTLDEYRQYMEKDKALERRFQKVLVKEPTVEDTISILRGLKERFEIHHGVNIHDNALVAAATLSDRYITDRFLPDKAIDLIDEASATIRVEMNSMPTELDQVTRRLMQLEIEEAALKKESDDASKKRLKNLQEELAELREEANAMKMQWETEKEEVNSVSAKRAEIDKAKHELEDAENNYDLERAAVLRHGTIPQLEKELKELEAKAKDSEIKMVQESVTENEIAQVVGRLTGIPVTKLVEGEREKLIKLNETLHKRVIGQDEAVDAVSDAVIRSRAGLQDPNRPLGSFLFLGPTGVGKTELAKALAENLFDSEDHMVRIDMSEYMEKHAVSRLVGAPPGYVGYEEGGQLTEAVRRNPYTIVLLDEIEKAHPDVFNILLQVLDDGRLTDSKGRVVDFKNTVLIMTSNIGSQLLLEGVTADGTIPEAVAEQVNTLLRGNFKPEFLNRIDDTILFTPLSLDNVKGIVDKMVAQLAQRLEHQEILLTISDEAKTWIAENAYEPAYGARPLKRFITKEVETPLAKEIVAGHVMPKSKVTITLLDGQLHFKTEELEEIV

SEQ ID NO: 6725 - protein, 816 aa, Lactococcus lactis
MKFENVKYTPTLDRIFEKAAEYAHQYQYGTIESAHLLAAMATTSGSIAYSILAGMNVDSSDLLIDLEDLSSHVKVKRSELRFSPRAEEVVTVASFLAVHNNAEAVGTEHLLYALLQVEDGFGLQLLKLQKINIVSLRKEIEKRTGLIVPENKKAVTPMSKRKMAKGVAENSSTPTLDSVSSDLTEAARSGKLDPMIGREAEVDRLIHILSRRTKNNPVLVGEPGVGKSAIIEGLAQRIVNGQVPIGLMNSRIMALNMATVVAGTKFRGEFEDRLTAIVEEVSADPDVIIFIDELHTIIGAGGGMDSVNDAANILKPALARGDFQMVGATTYHEYQKYIEKDEALERRLARINVDEPSPDEAIAILQGLREKFEDYHQVKFTDQAIKSAVTLSVRYMTSRKLPDKAIDLLDEAAARVKILLKTKKQNVFELEKDFVKAQEELAEAVIKLDVKASRIKEKAVEKISDKIYKFSIKEEKRQEVTDQAVIAVASTLTGVPITQMTKSESDRLINLEKELHKRVVGQEEAISAVSRAIRRARSGVADSRRPMGSFMFLGPTGVGKTELAKALADSVFGSEDNMIRVDMSEFMEKHSTSRLIGAPPGYVGYDEGGQLTERVRNKPYSVVLLDEVEKAHLDVFNIMLQILDDGFVTDTKGRKVDFRNTIIIMTSNLGATALRDDKTVGFGAKNITADYSAMQSRILEELKRHYRPEFLNRIDENIVFHSLESQEIEQIVKIMSKSLIKRLAEQDIHVKLTPSAIKLIAEVGFDPEYGARPLRKALQKEVEDLLSEQLLSGEIKAGNHISIGASNKKIKIAQIV

SEQ ID NO: 6726 - protein, 185 aa, Lactococcus lactis
GEPGVGKTAIVEGLAQRIVRKDVPENLKDKTIFSLDMGALIAGAKYRGEFEERLKAVLNEVKKADGQIILFIDELHTIVGAGKTEGSMDAGNLLKPMLARGELHLIGATTLDEYRKYMETDKALERRFQKVLVTEPTVEDTISILRGLKECFEIHHGVTIHDNALVAAATLSNRYITDRFLPDKA

SEQ ID NO: 6727 - protein, 867 aa, Lactococcus lactis subsp. cremoris
MDIEKMTTTMQEALGSAQQIAQVRHHQVIEVPHLWRIFVQPNSFGANFYKDLGIDLDDFTNLIEKEIDKINSVEGSNITYGQNLSPDLFQVFTEADKIAQKMGDEYLSTEIILLALFELKQNPLTEYLVSHGLTKAKAQAAIEKLRGGDKVTSQNAEETYKALEKYGVDLVAQVKSGNQDPVIGRDEEIRDVIRVLSRKTKNNPVLIGEPGVGKTAIVEGLAQRIVRKDVPENLKDKTIFSLDMGALIAGAKYRGEFEERLKAVLNEVKKADGQIILFIDELHTIVGAGKTEGSMDAGNLLKPMLARGELHLIGATTLDEYRKYMETDKALERRFQKVLVTEPTVEDTISILRGLKERFEIHHGVTIHDNALIAAATLSNRYITDRFLPDKAIDLIDEASATIRVEMNSLPTELDQANRRLMQLEIEEAALKKERDDASKKRLEIIRGEIAELREENNQLKAQWEAEKKEVGNISEKRNELEHARHELEEAQNEGNLEKAAALRYGKIPEIEKELKAIEEKAKSDDLSLVQESVTEEQIAEVVGRMTGIPITKLVEGEREKLLHLPETLHQRVVGQDEAVEAVSDAIIRARAGIQDPNRPLGSFLFLGPTGVGKTELAKALAENLFDSEEHMVRIDMSEYMEKHSVSRLVGAPPGYVGYDEGGQLTEAVRRNPYTIILLDEIEKAHPDVFNILLQVLDDGRLTDSKGVLVDFKNTVLIMTSNVGSQYLLDNVGENGEISEETTENVMSQLRAHFKPEFLNRIDDTILFKPLALEDIKNIILKMTSQLAHRLEEMEVELELSEEVKVWIAENAYEPAYGARPLKRYLTKVIENPLAKLIIGGKIPPKSKVIVRLIDNKVDFDVQSIAE

SEQ ID NO: 6728 - protein, 867 aa, Lactococcus lactis subsp. lactis
MDIEKMTTTMQEALGSAQQIAQVRHHQVIEVPHLWRIFVQPNSFGANFYKDLGIDLDDYTNLIEKEIDKINSVEGSNITYGQNLSPDLFQIFTEADKIAQKMGDEYLSTEIILLALFELKQNPLTSYLVSHGLTKAKAQAAIEKLRGGDKVTSQNAEETYKALEKYGVDLVAQVKSGKQDPVIGRDEEIRDVIRVLSRKTKNNPVLIGEPGVGKTAIVEGLAQRIVRKDVPENLKDKTIFSLDMGALIAGAKYRGEFEERLKAVLNEVKKSDGQIILFIDELHTIVGAGKTEGSMDAGNLLKPMLARGELHLIGATTLDEYRKYMETDKALERRFQKVLVTEPTVEDTISILRGLKERFEIHHGVTIHDNALVAAATLSNRYITDRFLPDKAIDLVDEASATIRVEMNSLPTELDQANRRLMQLEIEEAALKKERDDASKKRLEIIRGEIAELREENNQLKAQWEAEKKEVGNISEKRNELEHARHELEEAQNEGNLEKAAALRYGKIPEIEKELKAIEEKAKSDDLSLVQESVTEEQITEVVGRMTGIPITKLVEGEREKLLHLPETLHQRVVGQDEAVEAVSDAIIRARAGIQDPNRPLGSFLFLGPTGVGKTELAKALAENLFDSEEHMVRIDMSEYMEKHSVSRLVGAPPGYVGYDEGGQLTEAVRRNPYTIILLDEIEKAHPDVFNILLQVLDDGRLTDSKGVLVDFKNTVLIMTSNVGSQYLLDNVGENGEISEETTENVMSQLRAHFKPEFLNRIDDTILFKPLALEDIKNIIVKMTSQLSHRLEEMDVQLELSEEVKVWIAENAYEPAYGARPLKRYLTKVIENPLAKLIIGGKIPPKSKVIVTLVENKIDFDIQTIAE

SEQ ID NO: 6729 - protein, 845 aa, Chlamydophila pneumoniae J138
MFETFTNRAKQVIKLAKKEAQRLNHNYLGTEHILLGLLKLGQGVAVNVLRNLGIDFDTARQEVERLIGYGPEIQVYGDPALTGRVKKSFESANEEASLLEHNYVGTEHLLLGILHQSDSVALQVLENLHIDPREVRKEILKELETFNLQLPPSSSSSSSSSRSNPSSSKSPLGHSLGSDKNEKLSALKAYGYDLTEMVRESKLDPVIGRSSEVERLILILCRRRKNNPVLIGEAGVGKTAIVEGLAQKIILNEVPDALRKKRLITLDLALMIAGTKYRGQFEERIKAVMDEVRKHGNILLFIDELHTIVGAGAAEGAIDASNILKPALARGEIQCIGATTIDEYRKHIEKDAALERRFQKIVVHPPSVDETIEILRGLKKKYEEHHNVFITEEALKAAATLSDQYVHGRFLPDKAIDLLDEAGARVRVNTMGQPTDLMKLEAEIENTKLAKEQAIGTQEYEKAAGLRDEEKKLRERLQSMKQEWENHKEEHQVPVDEEAVAQVVSLQTGIPSARLTEAESEKLLKLEDTLRRKVIGQNDAVTSICRAIRRSRTGIKDPNRPTGSFLFLGPTGVGKSLLAQQIAIEMFGGEDALIQVDMSEYMEKFAATKMMGSPPGYVGHEEGGHLTEQVRRRPYCVVLFDEIEKAHPDIMDLMLQILEQGRLTDSFGRKVDFRHAIIIMTSNLGADLIRKSGEIGFGLKSHMDYKVIQEKIEHAMKKHLKPEFINRLDESVIFRPLEKESLSEIIHLEINKLDSRLKNYQMALNIPDSVISFLVTKGHSPEMGARPLRRVIEQYLEDPLAELLLKESCRQEARKLRATLVENRVAFEREEEEQEAALPSPHLES

SEQ ID NO: 6730 - protein, 409 aa, Bacillus anthracis
GVGKTAIVEGLAQRIVKKDVPEGLKDRTIFALDMSALVAGAKFRGEFEERLQAVLNEIKKSEGRILLFIDELHTIVGAGKTEGAMDAGNMLKPMLARGELHCIGATTLDEYRKYIEKDPALERRFQQVLAEEPTVEDTISILRGLKERFEIYHGVNIHDRAIVAASVLSDRYISDRFLPDKAIDLVDEACATIRTEIDSMPTELDEVTRRIMQLEIEEAALGKEKDFGSQERLKTLQRELSDLKEVASSMRAKWEKEKEDIHKVRDLREHLERLRRELEEAEGNYDLNRAAELRHGKIPAIEKELKEAEEMGANNKQENRLLREEVSEEEIADIVSRWTGIPVAKLVEGEREKLLRLEQILSERVIGQEEAVSLVSDAVLRARAGIKDPNRPIGSFIFLGPTGVGKTEL

SEQ ID NO: 6731 - protein, 344 aa, Bacillus anthracis
GVGKTAIAEGLAQQIVNNEVPETLRDKRVMTLDMGTVVAGTKYRGEFEDRLKKVMDEIRQAGNIILFIDELHTLIGAGGAEGAIDASNILKPSLARGELQCIGATTLDEYRKYIEKDAALERRFQPIHVDEPSLDESTQILKGLRDRYEAHHRVSITDDAIDAAVKLSDRYITDRFLPDKAIDLIDEAASKVRLRSYTTPPNLKELEVKLEEIRKEKDAAVQSQEFEKAASLRDMEQRLREKLEDTKRQWKEQQGKENSEVTVEDIVNVVSTWTRIPVSKLAQTETDKLLNLESILHDRVIGQDEAVVAVAKAVRRARAGLKDPKRPIGSFIFLGPTGVGKTEL

SEQ ID NO: 6732 - protein, 177 aa, Bacillus subtilis
GVGKTAIAEGLAQQIINNEVPEILRDKRVMTLDMGTVVAGTKYRGEFEDRLKKVMDEIRQAGNIILFIDELHTLIGAGGAEGAIDASNILKPSLARGELQCIGATTLDEYRKYIEKDAALERRFQPIQVDQPSVDESIQILQGLRDRYEAHHRVSITDDAIEAAVKLSDRYISDRFL

SEQ ID NO: 6733 - protein, 904 aa, Magnetococcus sp. MC-1
MMKKQSLYHIPQPFLLYWCAPLAFAHRHPYLLSDSPITPEEETMKQEQLTSKSAEALNSAVGLAAERNHQFVEPEHLLLAMLEQKDGVIPALLIKMNTPLPALQQATSVAVENLPRVHGGGAAQTLPSRRLQSLWQDAEREAATLRDDYTSTEHFLLAMTEHKEGALPSLLRPFTITRTRVLEALKTVRSGQRVTSKEPEGTFQALEKYARDLTALAKSGKLDPVIGRDEEIRRTIQVLSRRTKNNPVLIGEPGVGKTAIVEGLALRMERGDVPESLKGVRVVALDMGALVAGAKYRGEFEERLKAVIKEVQEAQGKIILFIDEMHTIVGAGQSEGAMDAGNLLKPALARGDLHCVGATTLDEYRKHVEKDPALERRFQPVQVREPSVEATISILRGIKDKYELHHGVRITDAAIVAAATLAHRYISDRFLPDKAIDLVDEAAARIRMEITSKPQVLDSLDRQILQLQIEQSALSKEKDSASRERLTKLEAELADLKENAHAMTIRWEQERLNIKQVGILKETLESTRLQLEQAERSGNLEKAGELRYGTLPKLEQELQKAQELAAQSRENPLLKELVDEEEIATVVARWTGIPVARMLEGEKDKLLKMEERLGHQVVGQERALQAIARAVRRARAGLQDNNRPIGSFFFLGPTGVGKTELSKALAQFLFNDESAMVRLDMSEYMEKHTVARLIGAPPGYVGYEEGGQLTEQVRRRPYSVVLLDEVEKAHPDLFNTLLQVLDEGRLTDGHGRTVDFRNTVLIMTSNIGSHLMAEGGPTAQVEHRVMELLKQTFRPEFLNRLDEIIPFHALQREHMGAIVDIQLKRLHKLLDKLNIRLELEPAARAALAEEGYDPIYGARPLKRVMQRLVQDPLAEAMLSGHLHEGDRVVIHFDGEQFVINPVHR

SEQ ID NO: 6734 - protein, 869 aa, Staphylococcus aureus subsp. aureus Mu50
MDINKMTYAVQSALQQAVELSQQHKLQNIEIEAILSAALNESESLYKSILERANIEVDQLNKAYEDKLNTYASVEGDNIQYGQYISQQANQLITKAESYMKEYEDEYISMEHILRSAMDIDQTTKHYINNKVEVIKEIIKKVRGGNHVTSQNPEVNYEALAKYGRDLVEEVRQGKMDPVIGRDEEIRNTIRILSRKTKNNPVLIGEPGVGKTAIVEGLAQRIVKKDVPESLLDKTVFELDLSALVAGAKYRGEFEERLKAVLKEVKESDGRIILFIDEIHMLVGAGKTDGAMDAGNMLKPMLARGELHCIGATTLNEYREYIEKDSALERRFQKVAVSEPDVEDTISILRGLKERYEVYHGVRIQDRALVAAAELSDRYITDRFLPDKAIDLVDQACATIRTEMGSNPTELDQVNRRVMQLEIEESALKNESDNASKQRLQELQEELANEKEKQAALQSRVESEKEKIANLQEKRAQLDESRQALEDAQTNNNLEKAAELQYGTIPQLEKELRELEDNFQDEQGEDTDRMIREVVTDEEIGDIVSQWTGIPVSKLVETEREKLLHLSDILHKRVVGQDKAVDLVSDAVVRARAGIKDPNRPIGSFLFLGPTGVGKTELAKSLAASLFDSEKHMIRIDMSEYMEKHAVSRLIGAPPGYIGHDEGGQLTEAVRRNPYSVILLDEVEKAHTDVFNVLLQILDEGRLTDSKGRSVDFKNTIIIMTSNIGSQVLLENVKETGEITESTEKAVMTNLNAYFKPEILNRMDDIVLFKPLSIDDMSMIVDKILTQLNIRLLEQRISIEVSDDAKAWLGQEAYEPQYGARPLKRFVQRQIETPLARMMIKEGFPEGTTIKVNLNSDNNLTFNVEKIHE

SEQ ID NO: 6735 - protein, 828 aa, Brachyspira hyodysenteriae
MFQFHLTSKAKKVIELYAQEEAKRLNHDMVTPEHILLGLLYESEALATRVLMRLKIDLDRLKLELESAMVKSSTTKVFGTLPTAPRVQKLISRSAEEARALSHNYIGTEHLLLGLLREESGTAYNVLTSMGLELTILRQEILKMLGVAGSNISSMEQTSQEDNVKKVKTPTLDQFARDLTKMARDKALDRVIGRENEVMRVVQILSRRKKNNPILLGEPGVGKTAIVEGLAEKIVAADVPDILLKKRVLTLDLSSVVAGTKYRGEFEERIKNIVLEIKKASNIIIFIDELHTLIGAGGAEGALDAANMLKPALSRGEIQCIGATTINEYKKYIEKDGALVRRFQPINVEEPSIEDTIEILNGIKGKYEEHHKVKYTDEAINAAAVLSKRYIFERHLPDKAIDLIDEAGSRARLLNMTRPQEFKDLEKKIEELNQQKKRVVESQNFEDAAKIRDEITSLQEELSKKEEKCREEREKIETFIEEDDIRHVISEITNIPIKRLLNSESKRLIGMEEELHQKVVGQKEAISSISKAIRRSRAGLKTSKRPLGSFIFLGPTGVGKTALAKVLSEFMFGDSDALIRIDMSEFMEKFAVSRLIGAPPGYVGYEEGGGLTEKVRRKPYSLILFDEIEKAHPDVTNILLQVLEEGQLTDNFGRKVDFSNTIIIITSNLGARDIVKGSSLGFNAVGSEKDANDIKNFALEELKQNFNPEFLNRIDDIIVFHTLSKEDLKDIINIMLKELNEAIKERNIVINLSEEAKNYIIDKGFDKKYGARSLRRAIQKEIEDYVSTEILFGNIEDGDTINVDRNDGSLIFSYDKSVKTENKELSKS

SEQ ID NO: 6736 - protein, 763 aa, Lactobacillus gasseri
REEIERYTGYGSSPKATYMEMSPRLSLVLNFAKQKSDELGTPQIETKHILLGLLASDQILASLILKNIGVEPRDLSQDINDSFMDDSGEANNIFDVSSATRTKKGKSLTPNLDKVSVNLNKRAREGAIDPVIGRDKEIKRVIQILSRRTKNNPVLVGEPGVGKTAVAQGIASAIVNREVPDNLAKKRVMALDMGSLIAGTKYRGEFEDRMKKILKEIQRDGSVILFVDEMHTLIGAGGAEGAIDASNILKPSLARGDIQMIGATTFDEYQKYIEKDQALARRFQQVKIGEPSKEETVDILKGLRPKYEKFHNVKIEDEAIKDAVEFSTRYIANRFLPDKAIDLIDEASAAVKIQAVGKADPRLTKLDTQINDVIHQKEEAAENQNFVQAAKLRDEENKLTQDRDKLIARVENKNSKKSIVDSNKIAQIVSEWTGVPVTRMKKSETKRLAHLESILHERVIGQDKAISAVSRAIRRSRSGIKDENRPIGSFLFLGPTGVGKTELAKALAAAVFGSERNIIRVDMSEYMDQVATSKLIGSAPGYVGYEEGGQLSERVRRNPYSVILLDEVEKAHPDVFNLLLQVLDEGFLTDSKGRKVDFRNTIIIMTSNLGSRSLQEDKTVGFAADNEDKNKLQQEKVTAAVKQFFRPEFLNRIDETVVFDSLTKKQLREIVSLMTSHLISRLARKEVTLKISPAALDVLAKDGFDPEMGARPLRRAIQHELEDVIAEDLISEKIKAGQTVKVGAHQGKLKFTIVDKDKPLVKN

SEQ ID NO: 6737 - protein, 722 aa, Lactobacillus gasseri
MLCDNCHERPASIHLYTNVNGQDREISLCQQCYQELKNQQGQINNMNNNNAFFGDFDDLLNALNNSNNEQNNSQDRDPRMRMGGGRRGGNNGGQKSLLDQYGTDLTNLAKKGKIDPVIGRDKEIARVIEILNRRTKNNPVLIGEAGVGKTAVVEGLAQQIVDGSVPAKLQNKRIISLNMVSMVQGTGIRGQFEQRMQQLIKELEQNDNIILFIDEIHELVGTGNAEGGMDAGNIIKPALARGDFQLIGATTIKEYRNIEKDSALARRFQPVEVKEPTTEETVKILQGIRKRYEDYHHVHYTDEAIQAAVALSSRYIQDRFLPDKAIDLLDEAGSRMNLTIPYVDSEKIKERLDAAENLKQEALKNEDYEKAAYYRDQIEKYEKLKDQKVDPDQTPKITEKIMNKIVEEKTNIPVGDLQKQEETQLKNLSTDLKNNVIGQNKAVETVARAIRRNRVGFNKSGRPIGSFLFVGPTGVGKTELAKQLAKQIFGTEDAMIRFDMSEYMEQYSVSKLIGSAPGYVGYEEAGQLTERVRHNPYSLILFDEIEKAHPDVLHLFLQILDDGRLTDSQGRTVSFKDTIIIMTSNAGQGIKEANVGFAAENSHQEQFKNALGQYFKPEFLNRLDDIVEFNSLDKKDLIKIVDLMLANTNNMVKDQGLHIEVTPEAKELLVEKGYDPSMGARPLRRTIQEEIEDKVADYKLDNPAAKDLKADVVDNAIVISEN

SEQ ID NO: 6738 - protein, 709 aa, Lactobacillus sakei
MNNLFTPSAKNVLMLAQEQAKKFNHHALGTEHLLLALVLESEGIAGNALRELGVTPTDVLEEIERLTGYGDSIVAMGVGGYLPYSPKAKQVLDLARVESQQANSVKIGTAHLLLALLRDDDIIAARILLNLGLSLAKTRQLLLQKMGIDAATAKKRAKASAKKVDQEGTPTLNQLARDLTQMARENQIDPVVGRDSEVKRLVQILARRSKNNPVLIGEPGVGKTAIAEGFAQRIINGDVPSDMQQKRLMMLDMGSLVAGTKYRGEFEDRLKKIIEEIHEDGQVILFIDELHTLIGAGGAEGAIDASNILKPALARGELQLIGATTLDEYQKYIEKDAALERRFATVTVDEPTPEDAEQILRGLRPRYEEHHGITISDEALHEAVVLANRYITNRFLPDKAIDLMDEAAAKVRLDAVNQKSPIDRLETELQSLAKEKEVAVGAQDFEKAAAIHEKEIIAKAKMAKRQAAEQENGVRTDIQVQPEDIAQVVAQWTGVPVTQLQRKESERLLQLEKVLHERVVGQEEAISAVARAIRRARSGLKDPKRPIGSFMFLGPTGVGKTELAKALAEAMFGSEDNLIRVDMSEYMERYSTSRLVGAAPGYVGYDEGGQLTEKVRNKPYSVVLFDEVEKAHPDVFNILLQVLDDGYLTDSKGRKVDFRNTIMIMTSNLGATALRDDKSVGFGVKDVTADYKAMQGRILEELKKLFRPE

SEQ ID NO: 6739 - protein, 878 aa, Treponema pallidum
MNTDRYTVKASEALNDAISLAEAENHGQVEEEHLLHALLSQKDGIISPLIEKIGAKPDFLYDELLQCLRRKPRVTGPAAQTRCAPTLSKACARAERLALKNQDEYVSCEHLLLAISETDSNTARLLHSQGITSKTISAALKDIRGSKRVTSQDPESTFQCLEKYCRDLTTLAREEKIDPVIGRDEEIRRVMQVLSRRTKNNPVLIGEPGVGKTAIVEGLARRIVSGDVPESLKGKRLLSLDLGALVAGAKFRGEFEERLKAVIEAVQKSDGGVILFIDELHTLVGAGASEGSMDASNLLKPALARGELRSIGATTLNEYRKYIEKDAALERRFQQVYCVQPTVEDTIAILRGLQEKYEVHHGVRIKDEALVAATVLSDRYITNRFLPDKAIDLVDEAASRLKMEIESQPVELDQVERKILQLNIEKASLLKESDPASKERLEKLEKELAGFLERRAAMQVQWQNEKGRIEESRRYKEELERLRIEETMFSREGDLNKAAELRYGKIPELEKKIMLLTAEVEKKSGLEGQLLREEVCEEDIAKIISMWTGIPVSKMMASEQQKYLQLESVLMQRVVGQDEAVRVISDAIRRNKAGLSDTRRPLGSFLCVGPTGVGKTELARTLADFLFNDERALTRIDMSEYMEKHAISRLIGAPPGYVGYDEGGQLTEAVRRRPYSVLLFDEVEKAHQDVFNIFLQILDDGRLTDGQGRVVDFRNTIIIMTSNIGSEHILSARESRTHTSDLPVPETQSTEEQTLPEQIRGLLHTYFRPEFLNRIDEVLIFKRLTRKHIRLITDIQLQMVVERLESRHIKLRVRDAAKAYLAERGYDDTFGARPLKRAIQTELENALAREILSGRFRGGSTIVVDMCKDALCFTEQTS

SEQ ID NO: 6740 - protein, 854 aa, Pseudomonas putida KT2440
MRIDRLTSKLQLAISDAQSLAVGMDHPAIEPVHLLQALLEQQGGSIKPLLMQVGFDINGLRQGLVKELDQLPKIQNPTGDVNMSQDLARLLNQADRLAQQKGDQFISSELVLLAAMDENSKLGKLLLSQGVSKKALENAINNLRGGAAVNDANAEESRQALDKYTVDLTKRAEEGKLDPVIGRDDEIRRTVQVLQRRTKNNPVLIGEPGVGKTAIAEGLAQRIINGEVPDGLKGKRLLALDMGALIAGAKYRGEFEERLKSLLNELSKQEGQIILFIDELHTMVGAGKGEGAMDAGNMLKPALARGELHCVGATTLNEYRQFIEKDAALERRFQKVLVEEPSEEDTIAILRGLKERYEVHHKVAITDGAIIAAAKLSHRYITDRQLPDKAIDLIDEAASRIRMEIDSKPEVLDRLDRRLIQLKVESQALKKEEDEAAKKRLEKLTEEIERLEREYSDLEEIWASEKAEVQGSAQIQQKIEQSRQELEAARRKGDLNRMAELQYGVIPDLERSLQMVDQHGKTDNQLLRNKVTEEEIAEVVSKWTGIPVAKMLEGEREKLLKMEELLHQRVIGQSEAVTAVANAVRRSRAGLSDPNRPSGSFLFLGPTGVGKTELCKALAEFLFDTEEAMVRIDMSEFMEKHSVARLIGAPPGYVGYEEGGYLTEAVRRKPYSVVLLDEVEKAHPDVFNVLLQVLEDGRLTDSHGRTVDFRNTVIVMTSNLGSAQIQELVGDREAQRAAVMDAVGAHFRPEFINRIDEVVVFEPLGREQIAGITEIQLGRLRSRLLERELSLSLSPEALDKLIAVGYDPVYGARPLKRAIQRWIENPLAQLILAGKFLPGTAITAKVEGDEIVFG

SEQ ID NO: 6741 - protein, 760 aa, Streptococcus pyogenes M1 GAS
MLCQNCNLNESTIHLYTSVNGKQRQVDLCQNCYQIMKSDPANSILNGLTPGYRAQDRSTSPFFDDFFGDLNNFRAFGNLPNTPPTQAGQNGNGGGRYGGNYNGQRPAQPQTPNQQAKGLLEEFGINVTDIARNGNIDPVIGRDEEITRVIEILNRRTKNNPVLIGEPGVGKTAVVEGLAQKIIDGTVPQKLQGKQVIRLDVVSLVQGTGIRGQFEERMQKLMEEIRNRKDVILFIDEIHEIVGAGSAGDGNMDAGNILKPALARGELQLVGATTLNEYRIIEKDAALERRMQPVKVDEPSVEETITILKGIQPKYEDYHHVKYSPAAIEAAAHLSNRYIQDRFLPDKAIDLLDEAGSKMNLTLNFVDPKEIDKRLIEAENLKAQATRDEDYERAAYFRDQITKYKEMQAQKVDEQDIPIITEKTIEAIVEQKTNIPVGDLKEKEQSQLVNLANDLKAHVIGQDDAVDKIAKAIRRNRVGLGTPNRPIGSFLFVGPTGVGKTELSKQLAIELFGSTNNMIRFDMSEYMEKHAVAKLVGAPPGYIGYEEAGQLTEQVRRNPYSLILLDEVEKAHPDVMHMFLQVLDDGRLTDGQGRTVSFKDTIIIMTSNAGTGKSEASVGFGAAREGRTSSVLGELSNFFSPEFMNRFDGIIEFKALSKEHLLHIVDLMLEDVNERLGYNGIHLDVTQKVKEKLVDLGYDPKMGARPLRRTIQDYIEDAITDYYLEHPTEKQLRALMTNSENITIKAVKEGDSFLNEESLD

SEQ ID NO: 6742 - protein, 699 aa, Streptococcus pyogenes M1 GAS
MTHFSGKDPFVNMDDIFNQLMANMGGYRSENPRYLVNGREITPEEFQHYRQTGQLPVATTKATNSQMLTPKADSVLTQLGTNLTQEARQGHLDPVIGRNKEIQDTAEILARRTKNNPVLVGDAGVGKTAVIEGLAQAIVNGDVPAAIKNKEIVSIDISSLEAGTQYRGSFEETIQNLIQEVKEAGNIILFFDEIHQIVGAGATSSDSGSKGLADILKPALSRGELTLIGATTQDEYRNTILKNAALARRFNEVKVNAPSAEDTFHILMGIRNLYEQHHHITLPDNVLKAAVDYSIQYIPQRSLPDKAIDLLDMTAAHLAAQHPVTDLKTLETEIAKQKESQEKAVAKEDFEKALAAKTRIETLQKQIEQHNQSQNVTATVNDIAESVERLTGIPVSNMGTNDLERLKGISSRLKSHVIGQDEAVAAVARAIRRNRAGFDDGKRPIGSFLFVGPTGVGKTELAKQLALDLFGSKDAIIRLDMSEYNDRTAVSKLIGTTAGYVGYDDNNNTLTERVRRNPYAIVLLDEIEKADPQIITLLLQVLDDGRLTDGQGNTINFKNTVIIATSNAGFGQQDTETSESNIMDRIAPYFRPEFLNRFNSIIKFNHLQKESLEEIVDLMLAEVNQTTAKKGISLTITDDAKAHLIDLGYNHAMGARPLRRIIEQEIRDRITDYYLDHPEVKKLQAILKEGQLVIRQNDQ

SEQ ID NO: 6743 - protein, 814 aa, Streptococcus pyogenes M1 GAS
MIMYSTKMQDIFRQAQFQAARFDSHCLETWHVLLAMVAVDNSLANMILSEYDAQVAIEEYEAAAILAMGKTPKEQLSRVDFRPQSKTLTNLLAFAQAISQITRDQEVGSEHVLFAILLNPDIMASRLLEIAGYQIKDNGNGQPRLADLRKAIERHAGYSKEMIKAIHELRKPKKTKTQGTFSDMMKPPSTAGELSDFTRDLTEMARQGLLESVIGRDQEVSRMIQVLSRKTKNNPVLVGDAGVGKTALAYGLAQRIANGAIPYELKEMRVLELDMMSVVAGTRFRGDFEERMNQIIDDIEADGQIILFVDELHTIMGSGSGIDSTLDAANILKPALSRGTLHMVGATTQEEYQKHIEKDAALSRRFAKILIEEPNTEDAYQILMGLKLSYETYHNVSISNEAVKTAVKMAHRYLTSKNLPDSAIDLLDEASAAVQNMVKKSAPETLTPIDQALINGDMKKVSRLLAKEAKGQMRKPTPVTEDDILATLSKLSGIPLEKLTQADSKKYLNLEKELHKRVIGQDAAVTAISRAIRRNQSGIRTGKRPIGSFMFLGPTGVGKTELAKALAEVLFDDEAALIRFDMSEYMEKFAASRLNGAPPGYVGYDEGGELTQKVRNKPYSVLLFDEVEKAHPDIFNVLLQVLDDGILTDSRGRKVDFSNTIIIMTSNLGATALRDDKTVGFGVKDIHQDHQAMEKRILEELRKTYRPEFINRIDEKVVFHSLTQDNMRDVVKIMVQPLITTLAEKGITLKIQPLALKHLSEVGYDEHMGARPLRRTLQTEIEDKLSELILSRELTSGHTLKIGLSHGKLTFHIA

SEQ ID NO: 6744 - protein, 752 aa, Streptococcus pneumoniae TIGR4
MLCQNCKINDSTIHLYTNLNGKQKQIDLCQNCYKIIKTDPNNSLFKGMTDLNNRDFDPFGDFFNDLNNFRPSSNTPPIPPTQSGGGYGGNGGYGSQNRGSAQTPPPSQEKGLLEEFGINVTEIARRGDIDPVIGRDDEIIRVIEILNRRTKNNPVLIGEPGVGKTAVVEGLAQKIVDGDVPHKLQGKQVIRLDVVSLVQGTGIRGQFEERMQKLMEEIRKREDIILFIDEIHEIVGAGSASDGNMDAGNILKPALARGELQLVGATTLNEYRIIEKDAALERRMQPVKVDEPTVDETITILKGIQKKYEDYHHVQYTDAAIEAAATLSNRYIQDRFLPDKAIDLLDEAGSKMNLTLNFVDPKVIDQRLIEAENLKSQATREEDFEKAAYFRDQIAKYKEMQKKKITDQDTPSISEKTIEHIIEQKTNIPVGDLKEKEQSQLIHLAEDLKSHVIGQDDAVDKIAKAIRRNRVGLGTPNRPIGSFLFVGPTGVGKTELSKQLAIELFGSADSMIRFDMSEYMEKHSVAKLVGAPPGYVGYDEAGQLTEKVRHNPYSLILLDEVEKAHPDVMHMFLQVLDDGRLTDGQGRTVSFKDAIIIMTSNAGTGKTEASVGFGAAREGRTNSVLGELGNFFSPEFMNRFDGIIEFKALSKDNLLQIVELMLADVNKRLSSNNIRLDVTDKVKEKLVDLGYDPKMGARPLRRTIQDYIEDTITDYYLENPSEKDLKAVMTSKGNIQIKSAKKAEVKSSEKEK

SEQ ID NO: 6745 - protein, 701 aa, Streptococcus pneumoniae TIGR4
MNNNFNNFNNMDDLFNQLMGGMRGYSSENRRYLINGREVTPEEFAHYRATGQLPGNAETDVQMPQQASGMKQGGVLAKLGRNLTAEAREGKLDPVIGRNKEIQETSEILSRRTKNNPVLVGDAGVGKTAVVEGLAQAIVNGDVPAAIKNKEIISIDISGLEAGTQYRGSFEENVQNLVNEVKEAGNIILFFDEIHQILGAGSTGGDSGSKGLADILKPALSRGELTVIGATTQDEYRNTILKNAALARRFNEVKVNAPSAENTFKILQGIRDLYQQHHNVILPDEVLKAAVDYSVQYIPQRSLPDKAIDLVDVTAAHLAAQHPVTDVHAVEREIETEKDKQEKAVEAEDFEAALNYKTRIAELERKIENHTEDMKVTASVNDVAESVERMTGIPVSQMEASDIERLKDMAHRLQDKVIGQDKAVEVVARAIRRNRAGFDEGNRPIGNFLFVGSTGVGKTELAKQLALDMFGTQDAIIRLDMSEYSDRTAVSKLIGTTAGYVGYDDNSNTLTERVRRNPYSIILLDEIEKADPQVITLLLQVLDDGRLTDGQGNTVNFKNTVIIATSNAGFGYEANLTEDADKPELMDRLKPFFRPEFLNRFNAVIEFSHLTKEDLSKIVDLMLAEVNQTLAKKDIDLVVSQAAKDYITEEGYDEVMGVRPLRRVVEQEIRDKVTDFHLDHLDAKHLEADMEDGVLVIREKV

SEQ ID NO: 6746 - protein, 810 aa, Streptococcus pneumoniae TIGR4
MNYSKALNECIESAYMVAGHFGARYLESWHLLIAMSNHSYSVAGATLNDYPYEMDRLEEVALELTETDYSQDETFTELPFSRRLQVLFDEAEYVASVVHAKVLGTEHVLYAILHDSNALATRILERAGFSYEDKKDQVKIAALRRNLEERAGWTREDLKALRQRHRTVADKQNSMANMMGMPQTPSGGLEDYTHDLTEQARSGKLEPVIGRDKEISRMIQILSRKTKNNPVLVGDAGVGKTALALGLAQRIASGDVPAEMAKMRVLELDLMNVVAGTRFRGDFEERMNNIIKDIEEDGQVILFIDELHTIMGSGSGIDSTLDAANILKPALARGTLRTVGATTQEEYQKHIEKDAALSRRFAKVTIEEPSVADSMTILQGLKATYEKHHRVQITDEAVETAVKMAHRYLTSRHLPDSAIDLLDEAAATVQNKAKHVKADDSDLSPADKALMDGKWKQAAQLIAKEEEVPVYKDLVTESDILTTLSRLSGIPVQKLTQTDAKKYLNLEAELHKRVIGQDQAVSSISRAIRRNQSGIRSHKRPIGSFMFLGPTGVGKTELAKALAEVLFDDESALIRFDMSEYMEKFAASRLNGAPPGYVGYEEGGELTEKVRNKPYSVLLFDEVEKAHPDIFNVLLQVLDDGVLTDSKGRKVDFSNTIIIMTSNLGATALRDDKTVGFGAKDIRFDQENMEKRMFEELKKAYRPEFINRIDEKVVFHSLSSDHMQEVVKIMVKPLVASLTEKGIDLKLQASALKLLANQGYDPEMGARPLRRTLQTEVEDKLAELLLKGDLVAGSTLKIGVKAGQLKFDIA

SEQ ID NO: 6747 - protein, 752 aa, Streptococcus pneumoniae R6
MLCQNCKINDSTIHLYTNLNGKQKQIDLCQNCYKIIKTDPNNSLFKGMTDLNNRDFDPFGDFFNDLNNFRPSSNTPPIPPTQSGGGYGGNGGYGSQNRGSAQTPPPSQEKGLLEEFGINVTEIARRGDIDPVIGRDDEIIRVIEILNRRTKNNPVLIGEPGVGKTAVVEGLAQKIVDGDVPHKLQGKQVIRLDVVSLVQGTGIRGQFEERMQKLMEEIRKREDIILFIDEIHEIVGAGSASDGNMDAGNILKPALARGELQLVGATTLNEYRIIEKDAALERRMQPVKVDEPTVDETITILKGIQKKYEDYHHVQYTDAAIEAAATLSNRYIQDRFLPDKAIDLLDEAGSKMNLTLNFVDPKVIDQRLIEAENLKSQATREEDFEKAAYFRDQIAKYKEMQKKKITDQDTPIISEKTIEHIIEQKTNIPVGDLKEKEQSQLIHLAEDLKSHVIGQDDAVDKIAKAIRRNRVGLGTPNRPIGSFLFVGPTGVGKTELSKQLAIELFGSADSMIRFDMSEYMEKHSVAKLVGAPPGYVGYDEAGQLTEKVRHNPYSLILLDEVEKAHPDVMHMFLQVLDDGRLTDGQGRTVSFKDAIIIMTSNAGTGKTEASVGFGAAREGRTNSVLGELGNFFSPEFMNRFDGIIEFKALSKDNLLQIVELMLADVNKRLSSNNIRLDVTDKVKEKLVDLGYDPKMGARPLRRTIQDYIEDTITDYYLENPSEKDLKAVMTSKGNIQIKSAKKAEVKSSEKEK

SEQ ID NO: 6748 - protein, 701 aa, Streptococcus pneumoniae R6
MNNNFNNFNNMDDLFNQLMGGMRGYSSENRRYLINGREVTPEEFAYYRATGQLPGNAESDVQMQQQASGMKQDGVLAKLGRNLTAEAREGKLDPVIGRNKEIQEASEILSRRTKNNPVLVGDAGVGKTAVVEGLAQAIVNGDVPAAIKNKEIVSIDISGLEAGTQYRGSFEENVQNLVNEVKEAGNIILFFDEIHQILGAGSTGGDSGSKGLADILKPALSRGELTVIGATTQDEYRNTILKNAALARRFNEVKVNAPSAENTFKILQGIRDLYQQHHNVILPDEVLKAAVDYSVQYIPQRSLPDKAIDLVDVTAAHLAAQHPVTDVHAVEREIETEKDKQEKAVEAEDFEAALNYKTRIAELERKIENHTEDMKVTASVNDVAESVERMTGIPVSQMGASDIERLKDMAHRLQDKVIGQDKAVEVVARAICRNRAGFDEGNRPIGNFLFVGSTGVGKTELAKQLALDMFGTQDAIIRLDMSEYSDRTAVSKLIGTTAGYVGYDDNSNTLTERVRRNPYSIILLDEIEKADPQVITLLLQVLDDGRLTDGQGNTVNFKNTVIIATSNAGFGYEANLTEDADKPELMDRLKPFFRPEFLNRFNAVIEFSHLTKEDLSKIVDLMLAEVNQTLAKKDIDLVVSQAAKDYITEEGYDEVMGVRPLRRVVEQEIRDKVTDFHLDHLDAKHLEADMEDGVLVIREKV

SEQ ID NO: 6749 - protein, 762 aa, Streptococcus pneumoniae R6
MNYSKALNECIESAYMVAGHFGARYLESWHLLIAMSNHSYSVAGATLNDYPYEMDRLEEVALELTETDYSQDETFTELPFSRRLQILFDEAEYVASVVHAKVLGTEHVLYAILHDGNALATRILERAGFSYEDKKDQVKIAALRRNLEERAGWTREDLKALRQRHRTVADKQNSMANMMGMPQTPSGGLEDYTHDLTEQARSGKLEPVIGRDKEISRMIQILSRKTKNNPVLVGDAGVGKTALALGLAQRIASGDVPAEMAKMRVLELDLMNVVAGTRFRGDFEERMNNIIKDIEEDGQVILFIDELHTIMGSGSGIDSTLDAANILKPALARGTLRTVGATTQEEYQKHIEKDAALSRRFAKVTIEEPSVADSMTILQGLKATYEKHHRVQITDEAVETAVKMAHRYLTSRHLPDSAIDLLDEAAATVQNKAKHVKADDSDLSPADKALMDGKWKQAAQLIAKEEEVPVYKDLVTESDILTTLSRLSGIPVQKLTQTDAKKYLNLEAELHKRVIGQDQAVSSISRAIRRNQSGIRSHKRPIGSFMFLGPTGVGKTELAKALAEVLFDDESALIRFDMSEYMEKFAASRLNGAPPGYVGYEEGGELTEKVRNKPYSVLLFDEVEKAHPDIFNVLLQVLDDGVLTDSKGRKVDFSNTIIIMTSNLGATALRDDKTVGFGAKDIRFDQENMEKRMFEELKKAYRPEFINRIDEKVVFHSLSSDHMQEVVKIMVKPLVASLAEKGIDLKLQASALKLLANQGYDP

SEQ ID NO: 6750 - protein, 869 aa, Staphylococcus epidermidis ATCC 12228
MDINQMTYAVQGALQKAVAYSKEYELQNIEVEALLKAAMNENDSLFKSILERANIDVDQLIKAYDNQLSHYPTVQGDNVQYGQYISAKTNELLDKAEKYMKSYEDEFISMEHILRAAIDTDETTQKWVGNKVEVIKEIITKVRGGNHVTSQNPEVNYEALEKYGRDLVEEVRQGKMDPVIGRDEEIRNTIRILSRKTKNNPVLIGEPGVGKTAIVEGLAQRIVRKDVPESLLDKTIFELDLSALVAGAKYRGEFEERLKAVLKEVKESEGRIILFIDEIHMLVGAGKTDGAMDAGNMLKPMLARGELHCIGATTLNEYREYIEKDSALERRFQKVGVSEPDVEDTISILRGLKERYEVYHGVRIQDRALVAAAELSDRYITDRFLPDKAIDLVDQACATIRTEMGSNPTELDQVNRRVMQLEIEESALKNESDNASKHRLEELQEELSNEKEKQSSLKSRVEQEKEKIAKVQEKRAELDSSRQALEDAQTEGNLEKAAELQYGTIPQLEKELQEFEEAFQDETGEDSERMIREVVSDEEIGDIVSQWTGIPVSKLVETEREKLLSLSDILHKRVVGQDKAVDLVSDAVVRARAGIKDPNRPIGSFLFLGPTGVGKTELAKSLASSLFDSEKHMIRIDMSEYMEKHAVSRLIGAPPGYVGHDEGGQLTEAVRRNPYSVILLDEVEKAHSDVFNVLLQILDEGRLTDSKGRSVDFKNTIIIMTSNIGSQVLLENVKDAGEISDDTEKAVMDSLHAYFKPEILNRMDDIVLFKPLSVNDMSMIVDKILTQLNMRLLDQHISIEVTEEAKKWLGEEAYEPQFGARPLKRFVQRQIETPIARMMIKESLPEGTIIKVDLNDNKELDFKVVKPTS

SEQ ID NO: 6751 - protein, 877 aa, Mycobacterium bovis
MGKIERNRLNIDGVEQPDKHFERTPNGGVVDSFNPTTKTQAALTAALQAASTAGNPEIRPAHLLMALLTQNDGIAAPLLEAVGVEPATVRAETQRLLDRLPQATGASTQPQLSRESLAAITTAQQLATELDDEYVSTEHVMVGLATGDSDVAKLLTGHGASPQALREAFVKVRGSARVTSPEPEATYQALQKYSTDLTARAREGKLDPVIGRDNEIRRVVQVLSRRTKNNPVLIGEPGVGKTAIVEGLAQRIVAGDVPESLRDKTIVALDLGSMVAGSKYRGEFEERLKAVLDDIKNSAGQIITFIDELHTIVGAGATGEGAMDAGNMIKPMLARGELRLVGATTLDEYRKHIEKDAALERRFQQVYVGEPSVEDTIGILRGLKDRYEVHHGVRITDSALVAAATLSDRYITARFLPDKAIDLVDEAASRLRMEIDSRPVEIDEVERLVRRLEIEEMALSKEEDEASAERLAKLRSELADQKEKLAELTTRWQNEKNAIEIVRDLKEQLEALRGESERAERDGDLAKAAELRYGRIPEVEKKLDAALPQAQAREQVMLKEEVGPDDIADVVSAWTGIPAGRLLEGETAKLLRMEDELGKRVIGQKAAVTAVSDAVRRSRAGVSDPNRPTGAFMFLGPTGVGKTELAKALADFLFDDERAMVRIDMSEYGEKHTVARLIGAPPGYVGYEAGGQLTEAVRRRPYTVVLFDEIEKAHPDVFDVLLQVLDEGRLTDGHGRTVDFRNTILILTSNLGSGGSAEQVLAAVRATFKPEFINRLDDVLIFEGLNPEELVRIVDIQLAQLGKRLAQRRLQLQVSLPAKRWLAQRGFDPVYGARPLRRLVQQAIGDQLAKMLLAGQVHDGDTVPVNVSPDADSLILG

SEQ ID NO: 6752 - protein, 848 aa, Mycobacterium leprae
MDSFNPTTKMQVALTSALQAASSAGNPEIRPVHLLLAMLMQNDGIAAPLLETVGVEPDIVRNEAQRLLERLPQASGCSSQPQLSRESLAAITTAQQLATEMDDEYVSTEHLMLGLAMGDSDVAKLLTGHGASPQVLREAFVKIRGSARVTSSDPEFTYQALEKYSTDLTAQSGEGKLDPVIGRDNEIRRVVQVLSRRTKNNPVLIGEPGVGKTAIVEGLAQRIVAGDVPESLRDKTLVALDLGSMVAGAKYRGEFEQRLKVVLDDIKFSAGQIITFIDELHTIVGAGATGESAMDAGNMIKPMLARGELRLVGATTLDEYRRYIEKDAALERRFQQIFVGEPSVEDTVGILRGLKDRYEVHHGVRITDSALVAAAALSDRYITARFLPDKAIDLVDEAASRLRMEIDSRPVEIDEVERLVRRFEIEEMALVNEEDEASKERLETLRAELADQKERLAELTARWQNEKNAIDVVRELKEQLETLRGESERAERDGDLAKAAELRYGRIPEVEKKLEAAVPTAQAREDVMLKEEVGPDDIANVVSAWTGIPAGRLLEGETAKLLRMEDELGKRVVGQKKAVHAVSDAVRRSRAGVADPNRPTGSFLFLGPTGVGKTELAKALADFLFDDQRAMVRVDMSEYGEKHSVARLVGAPPGYIGHDQGGQLTEAVRRRPYTVVLFDEVEKAHSDVFDVLLQVLDEGRLTDGQGRTVDFRNTIPILTSNLGSGGSEEQVMAAVRSVFKPEFINRLDDVLIFDGLNPEELVRIVDIQLEQLGKRLAQRRLQLEVSLPAKRWLAQHGFDPVYGARPLRRLVQQAIGDQLAKMLLAGEVHDGDTLPVNVRPDGEALILG

SEQ ID NO: 6753 - protein, 561 aa, Anopheles gambiae str. PEST
MKAIMSELEKNRDVILFIDELHTIVGAGSSTGSLDASNMFKPALARGEIQCIGATTLDEYRQYIEKDGALERRFQKVMVEPTTIEESIQILNQIKDKYEEYHNVTYTDDAIKACVNLTARYITDRFLPDKAIDALDEAGSRVYIKNMKVPTEIIEYEKAIEEVKEQKQKAVKAQDYLEARKLKDEEERLQIELNLAQENWDKEVKEKKEVVTEENVAEVVSMMSGVPVTKVGKNELDKLSQMDAMLNGKVIGQEDAVRKVVKAIQRNRAGLKDPNRPIGTFIFLGTTGVGKTELAKVMARELFDSDEALIRIDMSEYMEKFAVSRLVGAPPGYVGYEEGGQLTEAVRRKPYAVVLLDEIEKAHPDVFNILLQILDEGHVTDSLGRKVDFRNTIIILTSNIGTRDLKDFGDGVGFGTSAKKSTSDTRARSTIENALKKAFAPEFLNRIDDIIIFNSLEKDDIKKIINLELGKLYSRLEKLDYHVELSDDATEFIAEKGWDKDFGARPLKRAIQKYIEDLLAEMLVNKQMKEGDKITLKVNEAKDALEAEKTPKKKEKEPKTS

SEQ ID NO: 6754 - protein, 351 aa, Rhodococcus erythropolis
MPYITDMLRDRNSAATPPAEERSEPVPVGAFDARRLSKALSSKIVGQQAAVDAVVRAISIAHVGATDPTRPLANILLVGPTGVGKTELVRRVAAELRSGPDDLCRIDMNALAQEHYAASFSGAPPGYAGSKESFTLFDKNTVEGDPYTPGIVLFDEVEKADPTVLRALLQVLDNGELRLANGQQKISFRNSYVFLTSNLGSAAVAERRRSHLRQLADRVRIDRPRHGHHLVQRALEKFFDPEFFNRIDETVILDEFDDQTAEQVTRLEIELITTRLARRGIDVEVDDSAVALLQRRGFDPVYGARGLRRTIRNVLADPVAGAVLDLRPVGTQPLALQARAVGDQIQVKKAP

SEQ ID NO: 6755 - protein, 882 aa, Giardia lamblia ATCC 50803
MPADKKYTNDLQKVMTESIRVSQRHGHSLVNQYHIAAALFADDDSISSKAVQKCSGDVSAIRRAIETGLKKTPSVTPVPDTPSPAGGYLGIINKMSAYAEEGRDEYLSTFHLAKAAAQDTDLARCLREGRVTSNRFVEEIEKMKKGRSMNSEFAEDTCEALEKYCVEMVAKAEEGKYDPLIARDNELRRIVEILSRRTKNNPVLTGPAGVGKTAILEGLAQRIVRADVPQNIRNARIYALDLGALIAGAQYRGQFEERLKAILDELKKSEGNSILFIDEIHTLIGAGGSKGTSDAANLLKPALARGEIRCIGATTTEEYRNHIASDRAFERRFAEVFVAEPNVEDTISILRGLSGRYQSHHQIRITDGALVAAAQLANRYVRAMGRHNPDAAIDLLDEAGASVRVTLDSQPAQLDALNRKKLRLQIEEEALRRESEARNADSSISKRLADIIKEISNIDMQIKPLEEQYNRERSSIDKISNIKARITALEDKLEVYTTRGEVSKAADLQYGAIPELRDELRRLEKEQEAASYAHHDEKAMLSAVVTEMEVANVVSKWTGIPVNKLTRTDREKLLSLEQTISSKVIGQEPAVKAVCSSILRARAGLSRPTQPLGSFLFLGSSGVGKTYLAKTIAEELYDSVDSMIHIDMSEYTEQHSVSRLIGAPPGYVGYEQAGQLTEAVSRKRYAVVLFDEIEKAHPKILTILLQILDEGRLTDGKGNCVDFTNTVIMLTSNLGSRELLQCYHSNVSASQAKQAKEHVIGVVRSTLPPELINRLDDLIVFNPLTKDALVKIFRSLCGQLEERLQHESGLRLRVDDAVADIALRDSDMVYGARPLRRFIEREITTAVARKLIEVPSDARSNREKRRCVHVSAKDDGIFVTIV

SEQ ID NO: 6756 - protein, 760 aa, Streptococcus pyogenes MGAS8232
MLCQNCNLNESTIHLYTSVNGKQRQVDLCQNCYQIMKSDPANSILNGLTPGYRAQDRSTSPFFDDFFGDLNNFRAFGNLPNTPPTQAGQNGNGGGRYGGNYNGQRPAQPQTPNQQAKGLLEEFGINVTDIARNGNIDPVIGRDEEITRVIEILNRRTKNNPVLIGEPGVGKTAVVEGLAQKIIDGTVPQKLQGKQVIRLDVVSLVQGTGIRGQFEERMQKLMEEIRNRKDVILFIDEIHEIVGAGSAGDGNMDAGNILKPALARGELQLVGATTLNEYRIIEKDAALERRMQPVKVDEPSVEETITILKGIQPKYEDYHHVKYSPAAIEAAAHLSNRYIQDRFLPDKAIDLLDEAGSKMNLTLNFVDPKEIDKRLIEAENLKAQATRDEDYERAAYFRDQITKYKEMQAQKVDEQDIPIITEKTIEAIVEQKTNIPVGDLKEKEQSQLVNLANDLKAHVIGQDEAVDKIAKAIRRNRVGLGTPNRPIGSFLFVGPTGVGKTELSKQLAIELFGSTNNMIRFDMSEYMEKHAVAKLVGAPPGYVGYEEAGQLTEQVRRNPYSLILLDEVEKAHPDVMHMFLQVLDDGRLTDGQGRTVSFKDTIIIMTSNAGTGKSEASVGFGAAREGRTSSVLGELSNFFSPEFMNRFDGIIEFKALSKEHLLHIVDLMLEDVNERLGYNGIHLDVTQKVKEKLVDLGYDPKMGARPLRRTIQDYIEDAITDYYLEHPTEKQLRALMTNSENITIKAVKEGDSFLNEESLD

SEQ ID NO: 6757 - protein, 699 aa, Streptococcus pyogenes MGAS8232
MTHFSGKDPFVNMDDIFNQLMANMGGYRSENPRYLVNGREITPEEFQHYRQTGQLPVATTKATNSQMLTPKADSVLTQLGTNLTQEAHQGHLDPVIGRNKEIQDTAEILARRTKNNPVLVGDAGVGKTAVIEGLAQAIVNGDVPAAIKNKEIVSIDISSLEAGTQYRGSFEETIQNLIQEVKEAGNIILFFDEIHQIVGAGATSSDSGSKGLADILKPALSRGELTLIGATTQDEYRNTILKNAALARRFNEVKVNAPSAEDTFHILMGIRNLYEQHHHITLPDNVLKAAVDYSIQYIPQRSLPDKAIDLLDMTAAHLAAQHPVTDLKTLETEIAKQKESQEKAVAKEDFEKALAAKTRIETLQKQIEQHNQSQNVTATVNDIAESVERLTGIPVSNMGTNDLERLKGISSRLKSHVIGQDEAVAAVARAIRRNRAGFDDGNRPIGSFLFVGPTGVGKTELAKQLALDLFGSKDAIIRLDMSEYNDRTAVSKLIGTTAGYVGYDDNNNTLTERVRRNPYAIVLLDEIEKADPQIITLLLQVLDDGRLTDGQGNTINFKNTVIIATSNAGFGQQDTETSESNIMDRIAPYFRPEFLNRFNSIIKFNHLQKENLEEIVDLMLAEVNQTTAKKGISLTIADDAKAHLIDLGYNHAMGARPLRRIIEQEIRDRITDYYLDHPEVKKLQAILKEGQLVIRQNDQ

SEQ ID NO: 6758 - protein, 814 aa, Streptococcus pyogenes MGAS8232
MIMYSTKMQDIFRQAQFQAARFDSHCLETWHVLLAMVAVDNSLANMILSEYDAQVAIEEYEAAAILAMGKTPKEQLSRVDFRPQSKTLTNLLAFAQAISQITRDQEVGSEHVLFAILLNPDIMASRLLEIAGYQIKDNGNGQPRLADLRKAIERHAGYSKEMIKAIHELRKPKKTKTQGTFSDMMKPPSTAGELSDFTRDLTEMARQGLLESVIGRDQEVSRMIQVLSRKTKNNPVLVGDAGVGKTALAYGLAQRIANGAIPYELKEMRVLELDMMSVVAGTRFRGDFEERMNQIIDDIEADGQIILFVDELHTIMGSGSGIDSTLDAANILKPALSRGTLHMVGATTQEEYQKHIEKDAALSRRFAKILIEEPNTEDAYQILMGLKLSYETYHNVSISNEAVKTAVKMAHRYLTSKNLPDSAIDLLDEASAAVQNMVKKSAPETLTPIDQALINGDMKKVSRLLAKEAKGQMRKPTPVTEDDILATLSKLSGIPLEKLTQADSKKYLNLEKELHKRVIGQDAAVTAISRAIRRNQSGIRTGKRPIGSFMFLGPTGVGKTELAKALAEVLFDDEAALIRFDMSEYMEKFAASRLNGAPPGYVGYDEGGELTQKVRNKPYSVLLFDEVEKAHPDIFNVLLQVLDDGILTDSRGRKVDFSNTIIIMTSNLGATALRDDKTVGFGVKGIHQDHQAMEKRILEELRKTYRPEFINRIDEKVVFHSLTQDNMRDVVKIMVQPLITTLAEKGITLKIQPLALKHLSEVGYDEHMGARPLRRTLQTEIEDKLSELILSRELTSGHTLKIGLSYGKLTFHIA

SEQ ID NO: 6759 - protein, 616 aa, Methanothermobacter thermautotrophicus str. Delta H
MAVWQDNLKRLLNQKEVLIIHGNIRDTAYLTEEGNLVRGLTDLINRTGRELGYDKTVSWGSFFDHEGRGHSPMWSLERITPLNGDQPEIRETESQDRVSDVLHRWLEDEITSIDEKKIFIINYIDKITGYAPDGMYSEPTAELVTLIQKIIENISENNRLIMIALRDTMIPVEYYTNSPRVAVMEIPLPDRAERHLYYSTTLASASIPSDQIDLLSNITEGLYMKDLENILSDVLEEIDENQEVSSSMLRKIVNRYRIGTEEDPWSRIPLTGPPKGLLDSAENWFLERVVGQDHAVREIVNAIKKARSGVVGLSSGGQSKPKATFFFAGPTGVGKTFLAKKLAEYLFDTEEAFLRFDMSEFKEEHTVSKLIGSPPGYVGYEQGGQLTNAIKNRPFSVILFDEIEKAHPKIMDIFLQILDDGRLTDSRGQTVFFTESVIIFTSNIGTRTVDSRGNTTSEQRKLDEIINDSDLSDSERERRVREHFTRSVREFFMHEISRRELLNRIGSHIIAFNYLKKSDYQVNIIENKLKDISENFRDKFAGRGHRLHLSGELTGYFLEKYGDSISEFGGRGLVNALEDEIGNIVADQLLLAEERGMSDINFEVYVDGDVIRCRRS

SEQ ID NO: 6760 - protein, 719 aa, Magnetospirillum magnetotacticum
MDRRGRCLLRDDRAAAQRMRAKMDFEKFTERCKGFIQNAQTLALRSGHQRLTPEHLAQVLLADKEGLAANLIRAAGGDPIRALKAVETLLDKLPKVEGPGAGGVHLSPELARLLDQAVQLADKAGDSFVTAERLLLALTLATGTPSAKALAEAGVTPQGLNAAIEDVRKGRKANSASAEDSYDALKKYARDLTQAARDGKLDPVIGRDEEIRRTIQVLSRRTKNNPVLIGEPGVGKTAIVEGLASRIINGDVPETLKNKRLMVLDLGALVAGAKFRGEFEERLKAVLTEVTAANGEVVLFIDEMHTLIGAGAAEGSMDASNLLKPALARGELHCIGATTLNEYRKHVEKDAALARRFQPVFVTEPGVEDTVSILRGLKEKYELHHGVRIADGALVSAATLSNRYITDRFLPDKAIDLVDEAASRLRMQIDSKPEALDELDRRIVQLKIEREALKKESDAGSRDRLGKIEVELTQLERESFDMSERWRAEKSQLADSTKVKEQLEEARIELANAERAANWGRAGELKFGVIPELEKRIEGGDGTGQRMLTESVTEEHIASVVSRWTGIPVEKMLQGERDKLLGMESRLKTRVVGQSEALVAVSNAVRRARAGLQDPNRPIGSFLFLGPTGVGKTELTKALAEFMFDDETAMVRMDMSEYMEKHSVARLIGAPPGYVGYEEGGALTEAVRRRPYQVILFDEVEKAHPDVFNVLLQVLDDGR

SEQ ID NO: 6761 - protein, 860 aa, Leptospira interrogans serovar lai str. 56601
MKLDKLTSKLNEAIYNAQASAEKLGNPEISEEHILKEVLSQPDGLVPLLISKLNLSPKSFLESTENALGKQPKVGGNTSADVGFSRSAVSLLKAADEVRKELKDEYLSTDHILLGLMKNGTGSLKTEFLKLGLEYHKLLKITLENRKGKTIMDDSPEGKTDALAKYAKNLNELAKQGKLDPVIGRDEEIRRTIQVLSRRTKNNPVLIGEPGVGKTAIVEGLANKIVQGEVPEGIKNKTLYTLDLGSMIAGAKYRGEFEDRLKALLDEVKSSDGEVILFIDEIHTLVGAGATEGALDASNMLKPMLARGELRCIGATTLKEYQKYIEKDAALERRFQPVYVKEPSVEETVTILRGLKGRYELHHGIRILDSALIAAATLSNRYISDRFLPDKAVDLIDEASSKMRIEIDSMPEELDRANKRIQSLKIEREALKKEQDTASKERLKTLERDLSEQEQNFQTLKARWDLEKSKIGRLKQIKEEIEKYKNLEAEAERRGEINRVAEIRYGKLVDLQKELESANEELKKQESASRLLKEEVSEEDIANIVSRWTGIPVSKMLQGERAKLLLMEDVLKTKVIGQDHALRLVSEAVQRSRAGIADPNRPIGTFLFLGPTGVGKTETAKALAEFLFDDVNAMTRIDMSEYMEAHSVARLIGAPPGYVGYDEGGQLTEAVRRRPYSLILFDEIEKANPEVFNIFLQILDEGRLTDGKGRNVDFKNTVIILTSNIGSEVLGSSEYTSEEKERLVEQRLKKHFKPEFLNRIDEVILFHSITDSVIHKIADIQLEGLRQKAKENGLDVSFTNELKDYVSKAGFDAEYGARPLKRLIQREVGNALSRYILDGKFTNGQNVTVDYRQGKVVVVV

SEQ ID NO: 6762 - protein, 853 aa, Streptomyces coelicolor
INAASNRAVTEGNADLTPAHLLLALLQGQDNENITDLLAAVEADLAAVRTGAERIVAGLPSVTGSTVAPPQPSREMLAVVADAQARAKELGDEYLSTEHLLLGIAAKGGAAGEVLEGQGASAKKLQEAFRKARGGRRVTTADPEGQYKALEKFGTDLTAAARDGKLDPVIGRDQEIRRVVQVLSRRTKNNPVLIGEPGVGKTAVVEGLAQRIVKGDVPESLKDKRLVALDLGAMVAGAKYRGEFEERLKTVLAEIKDSDGQVVTFIDELHTVVGAGAGGDSAMDAGNMLKPMLARGELRMVGATTLDEYRERIEKDPALERRFQQVLVAEPTVEDSIAILRGLKGRYEAHHKVQIADSALVAAASLSDRYITSRFLPDKAIDLVDEAASRLRMEIDSSPVEIDELQRSVDRLKMEELAIGKETDAASLERLERLRRDLADKEEELRGLTARWEKEKQSLNRVGELKEKLDELRGQAERAQRDGDFDTASKLLYGEIPDLERDLEAASEAEEEVARDTMVKEEVGADDIADVVASWTGIPAGRLLEGETQKLLRMEDELGKRLIGQTQAVRAVSDAVRRSRAGIADPDRPTGSFLFLGPTGVGKTELAKALADFLFDDERAMVRIDMSEYSEKHSVARLVGAPPGYVGYEEGGQLTEAVRRRPYTVVLLDEVEKAHPEVFDILLQVLDDGRLTDGQGRTVDFRNTILVLTSNLGSQYLVDPTTGEAEKKQQVLEVVRSSFKPEFLNRLDDLVVFSALSQEELSRIARLQINGLARRLAERRLTLEVTDEALAWLAEEGNDPAYGARPLRRLVQTAIGDRLAREILSGEIKDGDTVRVDRFGDELIVGPASGKTL

SEQ ID NO: 6763 - protein, 864 aa, Fusobacterium nucleatum subsp. nucleatum ATCC 25586
MLGGFIMMNPNQFTENTISAINLAVDISKGNMQQSIKPEALALGLLMQNNGLIPRVIEKMGLNLQYIISELEKEMNNYPKVEVKVSNENISLDQKTNSILNRAEKIMNEMEDSFLSVEHIFKAMIEEMPIFKRFGISLEKYMEVLMNIRGNRKVDNQNPEATYEVLEKYAKDLVELAREGKIDPIIGRDSEIRRAIQIISRRTKNDPILIGEPGVGKTAIVEGLAQRILNGDVPESLKNKKIFSLDMGALVAGAKYKGEFEERMKGVLKEVEESNGNIILFIDEIHTIVGAGKGEGSLDAGNMLKPMLARGELRVIGATTIDEYRKYIEKDPALERRFQTILVNEPNVDDTISILRGLKDKFETYHGVRITDTAIVEAATLSQRYISDRKLPDKAIDLIDEAAAMIRTEIDSMPEELDQLTRKALQLEIEIKALEKETDDASKERLKVIEKELAELNEEKKVLTSKWELEKEDISKIKNIKREIENVKLEMEKAEREYDLTKLSELKYGKLATLEKELQEQQNKVDKDGKENSLLKQEVTADEIADIVSRWTGIPVSKLTETKKEKMLHLEDHIKERVKGQDEAIKSVADTMLRSVAGLKDPNRPMGSFIFLGPTGVGKTYLAKTLAYNLFDSEDNVVRIDMSEYMDKFSVTRLIGAPPGYVGYEEGGQLTEAIRTKPYSVILFDEIEKAHPDVFNVLLQVLDDGRLTDGQGRIVDFKNTLIIMTSNIGSHFILEDPNLSEDTREKVADELKARFKPEFLNRIDEIITFKALDLPAIKEIVKLSLKDLENKLKPKHITLEFSDKMVDYLANNAYDPHYGARPLRRYIQREIETSLAKKILANEVHEKSNVLIDLDNNHIVFKEV

SEQ ID NO: 6764 - protein, 721 aa, Bacillus anthracis str. A2012
  unsure (1)..(721): unsure at all Xaa locations
MDLNQMTTKTQEAIMSAQSLAVSHHHQEVDTVHLLFTLLEEQDGLAVRIFQKMNVDIEALKQGVENLIKKKPSVTGSGAEAGKLYITGALQQLLVRAGKEAEKLQDDYISVEHVLLAFTEEKGDISQLFTRFHITKDNLLQSLMTVRGNQRVTSQNPEATYEALEKYGRDLVAEVKAGKIDPVIGRDSEIRRVIRILSRKTKNNPVLIGEPGVGKTAIVEGLAQRIVKKDVPEGLKDRTIFALDMSALVAGAKFRGEFEERLQAVLNEIKKSEGRILLFIDELHTIVGAGKTEGAMDAGNMLKPMLARGELHCIGATTLDEYRKYIEKDPALERRFQQVLAEEPTVEDTISILRGLKERFEIYHGVNIHDRAIVAASVLSDRYISDRFLPDKAIDLVDEACATIRTEIDSMPTELDEVTRRIMQLEIEEAALGKEKDFGSQERLKTLQRELSDLKEVASSMRAKWEKEKEDIHKVRDLREHLERLRRELEEAEGNYDLNRAAELRHGKIPAIEKELKEAEEMGANNKQENRLLREEVSEEEIADIVSRWTGIPVAKLVEGEREKLLRLEQILSERVIGQEEAVSLVSDAVLRARAGIKDPNRPIGSFIFLGPTGVGKTELAKTLAQSLFDSEEQMIRIDMSEYMEKHAVSRLIGAPPGXVGYEEGGQLTEAVRRKPYSVILLDEIEKAHPEVFNILLQMLDDGRITDSQGRTVDFKIQLLL

SEQ ID NO: 6765 - protein, 857 aa, Campylobacter jejuni subsp. jejuni NCTC 11168
MANIQDFLTDNMLSNLESAASLAIHSKNNEVVPLHLLWALSVDSTSILNQILNKLNISKEALELEIKSRISKLATSSNVNRENIRFSNELINSLENAKGLMSANGDSYLSVDTWLISESQKSPIKEILAQFLDLREFQKELESLRAGRKMDSKTSDETLDSLNKFGIDLTLKASEGKLDPVIGREEEIERLMQILIRKTKNNPILLGEPGVGKTAIVEALAQRIIKKDVPKSLQNKKVIALDMSALIAGAKYRGEFEDRLKAVVNEVIKSENIILFIDEIHTIVGAGASEGSMDAANILKPALARGELHTIGATTLKEYRKYFEKDAALQRRFQPVNVGEPSVNEALAMLRGIKEKLEIHHNVTINDSALVAAAKLSKRYIADRFLPDKAIDLIDEAAAELKMQIESEPSSLRKVRKDIETLEVENEALKMENDEKNQKRLDEIAKELANLKEKQNALNSQFENEKSVFDGISAKKKEIDLLKNEASLAKARGEFQKAAELEYGKIPSLEKEVEILEDKWKKMSENGVLLKNQVDEDLVAGILSKWTGISVQKMLTSEKQKFLEVEKHLKESVIGQDKALSALARAIKRNKAGLNADNKPIGSFLFLGPTGVGKTQSAKALAKFLFDDEKAMIRFDMSEFMEKHSVSRLLGAPPGYIGHEEGGELTEAVRRKPYSVLLFDEVEKAHKDVFNVLLGILDDGRATDSKGVTVDFKNTIIILTSNIASNAIMNLSGKEQEDAVKNELKNFFKPEFLNRLDDIITFNPLGKDEAYEIVKLLFKDLQMSLENKGIKASLSENAALLIAKDGFDPDFGARPLRRAIYDLIEDKLSDMILADELHENDSIIIDAKDDEIIIKKA

SEQ ID NO: 6766 - protein, 854 aa, Chlorobium tepidum TLS
MEGNFSNRVQDVIRLSREEALRLGHDYIGTEHLLLGLIREGEGIGAKILKNLKVDLFQLKQKIEENTHPKVPATQMGNVPLTKQAEKVLKITYLEAKICKSTIIGTEHLLLSILKGDDNIAAQILEQFGVTYDQVRDELMTITTGRSEAYEPPMEGSYSSGSGSPARPSKKSETKRGERTKTPVLDNFGRDITRLAMEDKLDPIIGREKEIERVAQVLSRRKKNNPVLIGEPGVGKTAIAEGLALKIVQRKVSRVLYDKRVVALDLAALVAGTKYRGQFEERMKALMNELERSRDVILFIDELHTIIGAGGASGSLDASNIFKPALARGELQCIGATTLDEYRQYIEKDGALDRRFQKIMVEPTSVEETIQILNNIKNKYEAHHHVHYSEDAIEKAVKLSERYITDRFLPDKAIDVMDEAGARVHLSNIHVPQEILELEKSIEEIKSEKNKVVKMQNFEEAARLRDKEKNMLEALDHAKQEWEEQSMESVYDVTEADITSVIAMMTGIPVAKVAQSESKKLLTMEAELKKEVIGQDEAIKKITKAIQRTRAGLKDPSRPIGSFIFLGPTGVGKTELAKALTRYLFDSEDALIRADMSEYMEKFSVSRLVGAPPGYVGYEEGGQLTEKVRRKPYSVVLIDEIEKAHPDVFNILLQVLDEGVLTDGLGRKVDFRNTIIIMTSNIGAKEIKSFSTGGGMGFAPPSDATGDYKAMKSTIEDALKRVFNPEFLNRIDDTIVFHQLEKSDIFKIIDITAGKLFKRLKEMGIEVEIDEKAKEFLVEKGYDQKYGARPLKRALQKYVEDPLAEEMLKGRFTEGSVIQITFDEKEKELRFLDGASSAEPTPKKSKKEETLDKE

SEQ ID NO: 6767 - protein, 442 aa, Chlorobium tepidum TLS
MHFDPNKFTVKAQEALQAASMLASSKQNQQIEPEHLLSVMLGDHDNIACQIARKLETPVDTLLSVVDREIDRIPKVTGASATGQYISSDLGKVFDTALKEAEQLKDEYISSEHLFIAMSEAGVKVSKLLKDAGIDRNAILKVLTSFRGSQRVTSQNAEESYQSLKKYSRNLNDLVIKGKLDPVIGRDDEIRRVLQILSRRTKNNPVLIGEPGVGKTAIVEGIAQRIVGGDVPENLKSKQIAALDIAALVAGTKFRGEFEERLKALVKEVQASDGEVILFIDELHLLVGAGSAEGSMDAANILKPALARGELRCIGATTLDEYRKHIEKDAALERRFQTVIVDQPSVEDTVSILRGLKEKYEIHHGVRIKDAALVAAAELSNRYIADRFLPDKAIDLIDEACSRLRLEIDSEPEELDRINRELRRLEIEREALKRELEATGSV

SEQ ID NO: 6768 - protein, 857 aa, Streptomyces albus G
MDAELTNRSRDALNAATTRAVSAGNPDLTPAHLLLALLEGQDNENLVDLLAAVERRPGGGSARAPSASLGSLPGVTGSTVAPPQPNRDLLAVIADAGRRAKDLGDEFLSTEHLLIGIRPTARPPRCSPGRAPTPEKLLEAFQNTRGGRRVTTPRPEGQYKALEKFGTDFTAAARERKLDPVIGRDQEIRRVVQVLSRRTKNNPVLIGEPGVGKTAVVEGLAQRIVKGDVPESLKDKRLVSLDLGAMVAGAKYRGEFEERLKTVLSEIKESDGQIVTFIDELHTVVGAGAADSAMDAGNMLKPMLARGELRMVGATTLDEYRERIEKDPALERRFQQVLVAEPSVEDSIAILRGLKGRYEAHHKVQIADSALVAAATLSDRYITSRFLPDKAIDLVDEAASRLRMEIDSSPLEIDELQRSVDRLKMEELALDRETDPASRQRLEKLRRDLADRERSCAAHRPWEKEKQSLNRVGELKERLDELRGQAERAQQHGDFDTASKLLYGEIPTLERDLRWRPAEEEAAKDTMVKEEVGPDDIADVVGSWTGIPAGRLLEGETQKLLRMEAELGRRLIGQSEAVQAVSDAVRTRAGIADPDRPTGSFLFLGPTGVGKTELAKALADFLFDDERAMIRIDMSEYGEKHSVARLVGAPPGYVGYEEGGQLTEAVRRRPYSVVLLDEVEKAHPGVFDILLQVLDDGRLTDGQGRTVDFRNTILVLTSNLGSQYLVGSAPEEEKRRQVMEVVRSSFKPEFLNRLDDLVIFSALDEDELARIAGLQIAGLARRLADRRLSLDVTPEALAWLAKEGFDPAYGARPLRRLIQTAIGDRLAKEILAGEVRDGDTVRVDRVEDGLLVGRAEG

SEQ ID NO: 6769 - protein, 869 aa, Staphylococcus aureus subsp. aureus MW2
MDINKMTYAVQSALQQAVELSQQHKLQNIEIEAILSAALNESESLYKSILERANIEVDQLNKAYEDKLNTYASVEGDNIQYGQYISQQANQLITKAESYMKEYEDEYISMEHILRSAMDIDQTTKHYINNKVEVIKEIIKKVRGGNHVTSQNPEVNYKALAKYGRDLVEEVRQGKMDPVIGRDEEIRNTIRILSRKTKNNPVLIGEPGVGKTAIVEGLAQRIVKKDVPESLLDKTVFELDLSALVAGAKYRGEFEERLKAVLKEVKESDGRIILFIDEIHMLVGAGKTDGAMDAGNMLKPMLARGELHCIGATTLNEYREYIEKDSALERRFQKVAVSEPDVEDTISILRGLKERYEVYHGVRIQDRALVAAAELSDRYITDRFLPDKAIDLVDQACATIRTEMGSNPTELDQVNRRVMQLEIEESALKNESDNASKQRLQELQEELANEKEKQAALQSRVESEKEKIANLQEKRAQLDESRQALEDAQTNNNLEKAAELQYGTIPQLEKELRELEDNFQDEQGEDTDRMIREVVTDEEIGDIVSQWTGIPVSKLVETEREKLLHLSDILHKRVVGQDKAVDLVSDAVVRARAGIKDPNRPIGSFLFLGPTGVGKTELAKSLAASLFDSEKHMIRIDMSEYMEKHAVSRLIGAPPGYIGHDEGGQLTEAVRRNPYSVILLDEVEKAHTDVFNVLLQILDEGRLTDSKGRSVDFKNTIIIMTSNIGSQVLLENVKETGEITESTEKAVMTSLNAYFKPEILNRMDDIVLFKPLSIDDMSMIVDKILTQLNIRLLEQRISIEVSDDAKAWLGQEAYEPQYGARPLKRFVQRQIETPLARMMIKEGFPEGTTIKVNLNSDNNLTFNVEKIHE

SEQ ID NO: 6770 - protein, 852 aa, Corynebacterium glutamicum ATCC 13032
MSSFNPTTKTNEAMQAALQQASSAGNPDIRPAHLLAAILEQTDGVAAPVLMATGVDPKEILAEAKKLVASYPKASGANMANPNFNRDALNAFTAAQELAGELGDEYVSTEVLLAGIARGKSDAADLLTNKGATYDAIKEAFPSVRGSQRVTTQDPEGQFQALEKYSTDLTKLAREGKIDPVIGRDQEIRRVVQVLSRRTKNNPVLIGEPGVGKTAIVEGLARRIVAGDVPESLKGKTLISLDLGSMVAGAKYRGEFEERLKAVLDEIKGANGEVVTFIDELHTIVGAGASGESAMDAGNMIKPLLARGELRLVGATTLNEYRKYIEKDAALERRFQQVYVGEPTVEDAIGILRGLKERYEVHHGVRIQDSALVAAAELSNRYITSRFLPDKAIDLVDEAASRLRMEIDSSPQEIDELERIVRRLEIEEMALSKESDAASKERLEKLRSELADEREKLSELKARWQNEKTAIDDVREMKEELEALRSESDIAERDGNYGRVAELRYGRIPELEKQIEDAESKVEVNENAMLTEEVTPDTIADVVSAWTGIPAGKMMQGETEKLLNMERVLGNRVVGQLEAVTAVSDAVRRSRAGVADPNRPTGSFLFLGPTGVGKTELAKAVAEFLFDDDRAMIRIDMSEYGEKHSVARLVGAPPGYVGYDQGGQLTEAVRRRPYTVVLFDEVEKAHPDVFDILLQVLDEGRLTDGQGRTVDFRNTILILTSNLGAGGTREQMMDAVKMAFKPEFVNRLDDVVIFDRLSPEQLTSIVDIQIKQLTDRLAGRRLNLRVSDSAKAWLAERGYDPAYGARPLRRLIQQAIGDTLAKELLAGNVRDGDGVLVDVADGGQKLDVSRAV

SEQ ID NO: 6771 - protein, 857 aa, Campylobacter jejuni
MANIQDFLTDNMLSNLESAASLAIHSKNNEVVPLHLLWALSVDNASILNQILNKLNISKEALELEIKSRISKLATSSNVNRENIRFSNELINSLENAKGLMSANGDSYLSVDTWLISESQKSPIKEILAQFLDLREFQKELESLRAGRKIDSKTSDETLDSLNKFGIDLTLKASEGKLDPVIGREEEIERLMQILIRKTKNNPILLGEPGVGKTAIVEALAQRIIKKDVPKSLQNKKVIALDMSALIAGAKYRGEFEDRLKAVVNEVIKSENIILFIDEIHTIVGAGASEGSMDAANILKPALARGELHTIGATTLKEYRKYFEKDAALQRRFQPVNVGEPSVNEALAMLRGIKEKLEIHHNVTINDSALVAAAKLSKRYITDRFLPDKAIDLIDEAAAELKMQIESEPSSLRKVRKDIETLEVENEALKMENDEKNQKRLDEIAKELANLKEKQNALNSQFENEKSVFDGISAKKKEIDLLKNEASLAKARGEFQKAAELEYGKIPSLEKEVEILEDKWKKMSENGVLLKNQVDEDLVAGILSKWTGISVQKMLASEKQKFLEVEKHLKESVIGQDKALSALARAIKRNKAGLNADNKPIGKLLFLGPTGVGKTQSAKALAKFLFDDEKAMIRFDMSEFMEKHSVSRLLGAPPGYIGHEEGGELTEAVRRKPYSVLLFDEVEKAHKDVFNVLLGILDDGRATDSKGVTVDFKNTIIILTSNIASSAIMNLSGKEQEDAVKNELKNFSKPEFLNRLDDIITFNPLGKDEAYEIVKLLFKDLQMSLENKGIKASLSENAALLIAKDGFDPDFGARPLRRAIYDLIEDKLSDMILADELHENDSIIIDAKDDEIIIKKA

SEQ ID NO: 6772 - protein, 760 aa, Streptococcus pyogenes MGAS315
MLCQNCNLNESTIHLYTSVNGKQRQVDLCQNCYQIMKSDPANSILNGLTPGYRAQNRSTSPFFDDFFGDLNNFRAFGNLPNTPPTQAGQNGNGGGRYGGNYNGQRPAQPQTPNQQAKGLLEEFGINVTDIARNGNIDPVIGRDEEITRVIEILNRRTKNNPVLIGEPGVGKTAVVEGLAQKIIDGTVPQKLQGKQVIRLDVVSLVQGTGIRGQFEERMQKLMEEIRNRKDVILFIDEIHEIVGAGSAGDGNMDAGNILKPALARGELQLVGATTLNEYRIIEKDAALERRMQPVKVDEPSVEETITILKGIQPKYEDYHHVKYSPAAIEAAAHLSNRYIQDRFLPDKAIDLLDEAGSKMNLTLNFVDPKEIDKRLIEAENLKAQATRDEDYERAAYFRDQITKYKEMQAQKVDEQDIPIITEKTIEAIVEQKTNIPVGDLKEKEQSQLVNLANDLKAHVIGQDDAVDKIAKAIRRNRVGLGTPNRPIGSFLFVGPTGVGKTELSKQLAIELFGSTNNMIRFDMSEYMEKHAVAKLVGAPPGYVGYEEAGQLTEQVRRNPYSLILLDEVEKAHPDVMHMFLQVLDDGRLTDGQGRTVSFKDTIIIMTSNAGTGKSEASVGFGAAREGRTSSVLGELSNFFSPEFMNRFDGIIEFKALSKEHLLHIVDLMLEDVNERLGYNGIHLDVTQKVKEKLVDLGYDPKMGARPLRRTIQDYIEDAITDYYLEHPTEKQLRALMTNSENITIKAVKEGDSFLNEESLD

SEQ ID NO: 6773 - protein, 814 aa, Streptococcus pyogenes MGAS315
MIMYSTKMQDIFRQAQFQAARFDSHCLETWHVLLAMVAVDNSLANMILSEYDAQVAIEEYEAAAILAMGKTPKEQLSRVDFRPQSKTLTNLLAFAQAISQITRDQEVGSEHVLFAILLNPDIMASRLLEIAGYQIKDSGNGQPRLADLRKAIERHAGYSKEMIKAIHELRKPKKTKTQGTFSDMMKPPSTAGELSDFTRDLTEMARQGLLESVIGRDQEVSRMIQVLSRKTKNNPVLVGDAGVGKTALAYGLAQRIANGAIPYELKEMRVLELDMMSVVAGTRFRGDFEERMNQIIDDIEADGQIILFVDELHTIMGSGSGIDSTLDAASILKPALSRGTLHMVGATTQEEYQKHIEKDAALSRRFAKILIEEPNTEDAYQILMGLKLSYETYHNVSISNEAVKTAVKMAHRYLTSKNLPDSAIDLLDEASAAVQNMVKKSAPETLTPIDQALINGDMKKVSRLLAKEAKGQMRKPTPVTEDDILATLSKLSGIPLEKLTQADSKKYLNLEKELHKRVIGQDAAVTAISRAIRRNQSGIRTGKRPIGSFMFLGPTGVGKTELAKALAEVLFDDEAALIRFDMSEYMEKFAASRLNGAPPGYVGYDEGGELTQKVRNKPYSVLLFDEVEKAHPDIFNVLLQVLDDGILTDSRGRKVDFSNTIIIMTSNLGATALRDDKTVGFGVKGIHQDHQAMEKRILEELRKTYRPEFINRIDEKVVFHSLTQDNMRDVVKIMVQPLITTLAEKGITLKIQPLALKHLSEVGYDEHMGARPLRRTLQTEIEDKLSELILSRELTSGHTLKIGLSHGKLTFHIA

SEQ ID NO: 6774 - protein, 878 aa, Escherichia coli CFT073
MTGNHPAALLRRLNPYCARALDAAASLCQTRAHAEITIEHWLLKLLEQGEGDITVIARRYEWDIDTLWQSLLAHLDTLPRPVRERPQLSEPLAALIRQAWLIASLEGDDPQIRSQHLLMALTEKPMLPACNDLWVLLSLSRVQLERLRPLLDAQSDECPARQPQVTEPLTSALPETATADAPAKTLTEKQDDALLAVLNRFTEDVTEKARSGRIDPVFGRDTEIRQMVDILSRRRKNNPILVGEPGVGKTALVEGLALRITEGNVPDSLKTVHIRTLDLGLLQAGAGVKGEFEQRLKNVIDAVQKSPEPVLLFIDEAHTIIGAGNQAGGADAANLLKPALARGELRTIAATTWSEYKQYFERDAALERRFQMVKVDEPDDDTACLMLRGLKARYAQHHGVHMLDSAIQTAVRLSRRYLTGRQLPDKAVDLLDTAGARVRMSLDTLPEPLTQLHVRLAALDIEREAIEQDSVFYPEASPERLAELTDLRDELQAEAGHLEAQYQQEKALAQQIMTLRQEGTDSTELQQQLRTHQGFAPLLALDVDARAVATVVADWTGIPLSSLLKDEQSDLLSMEQSLENRVVGQSPALCAIAQRLRAAKTGLTPENGPQGVFLLTGPSGTGKTETALTLADTLFGGEKSLITINLSEYQEPHTVSQLKGSPPGYVGYGQGGVLTEAVRKRPYSVVLLDEVEKAHRDVMNLFYQVFDRGFMRDGEGREIDFRNTVILMTANLGSDHIMQLLEEKPDATDADLHELLYPLLREHFQPALMARFQTVIYRPLGQEAMRAIVEMKLAQVARRLHQHYGLETEISNSLYDALTAACLLPDTGARNIDSLLNQQILPVLSQQLLAQQAVHHKPARLRLDWDDEDGIVLEFDEK

SEQ ID NO: 6775 - protein, 763 aa, Escherichia coli CFT073
MGEVPMLNQELELSLNMAFARAREHRHEFMTVEHLLLALLSNPSAREALEACSVDLVALRQELEAFIEQTTPVLPASEEERDTQPTLSFQRVLQRAVFHVQSSGRNEVTGANVLVAIFSEQESQAAYLLRKHEVSRLDVVNFISHGTRKDEPTQSSDPGSQPNSEEQAGGEERMENFTTNLNQLARVGGIDPLIGREKELERAIQVLCRRRKNNPLLVGESGVGKTAIAEGLAWRIVQGDVPEVMADCTIYSLDIGSLLAGTKYRGDFEKRFKALLKQLEQDTNSILFIDEIHTIIGAGAASGGQVDAANLIKPLLSSGKIRVIGSTTYQEFSNIFEKDRALARRFQKIDITEPSIEETVQIINGLKPKYEAHHDVRYTAKAVRAAVELAVKYINDRHLPDKAIDVIDEAGARARLMPVSKRKKTVNVADIESVVARIARIPEKSVSQSDRDTLKNLGDRLKMLVFGQDKAIEALTEAIKMARAGLGHEHKPVGSFLFAGPTGVGKTEVTVQLSKALGIELLRFDMSEYMERHTVSRLIGAPPGYVGFDQGGLLTDAVIKHPHAVLLLDEIEKAHPDVFNILLQVMDNGTLTDNNGRKADFRNVVLVMTTNAGVRETERKSIGLIHQDNSTDAMEEIKKIFTPEFRNRLDNIIWFDHLSTDVIHQVVDKFIVELQVQLDQKGVSLEVSQEARNWLAEKGYDRAMGARPMARVIQDNLKKPLANELLFGSLVDGGQVTVALDKEKNELTYGFQSAQKHKAEAAH

SEQ ID NO: 6776 - protein, 867 aa, Thermobifida fusca
MDYKLTRKSQEALSAAIRRATADGNPQVEPVHLLSALIGQAEGVVRPLLKEVGADPGRLSTKVEEEIARLPRASGSTVNAPASSRQLIISLNTAAQRAKQMEDEYVSTEHLLVGLAADGGTAATLLREAGATPEALLDAFSRVRGSARVTSETPEDTYQALEKYGVDLTQRAREGKLDPVIGRDAEIRRVIQVLSRRTKNNPVLIGEPGVGKTAVVEGLAQRIVAGDVPESLRDKRLISLDLPAMVAGAKYRGEFEERLKAVLNEIKQSEGQIITFIDELHTVVGAGAAEGAMDAGNMLKPMLARGELRMVGATTLDEYRERIEKDPALERRFQQVMVNEPSAADTIAILRGLKGRYEAHHKVQIADSALVAAATLSDRYITARFLPDKAIDLIDEAASRLRMEIDSQPVEIDELQRVVDRLKMEEMALSKESDAASKQRLERLRADLADKEEQLNALIARWEQEKAGLNRVGELKEKLDELRGQAERAQRDGDFEEASRLMYGEIPQLERQLEEALSEEDSAEHATMVKEEVGADDVADVVSSWTGIPVGRLMEGESAKLLRMEEEIGKRLIGQRRAVAAVSDAVRRARAGISDPDRPTGSFLFLGPTGVGKTELAKALAEFLFDDERAIVRLDMSEYSEKHSVARLVGAPPGYVGYEEGGQLTEAVRRRPYTVVLLDEVEKAHIEVFDTLLQVLDDGRLTDGQGRQVDFRNTLLILTSNLGSQFLIDPTLDDAQRHEKVMQVVRNTFKPEFLNRLDDVIVFDALSTDDLTKIVDLQVDRLARRLADRRLKLEVTPAAREWLALAGYDPVYGARPLRRLVQTAIGDPLARELLAGNLVEGDTVRVDVDESKDSLTVGPVKEPASAA

SEQ ID NO: 6777 - protein, 826 aa, Leuconostoc mesenteroides subsp. mesenteroides ATCC 8293
MDNNYTPSAQNVLVLAQEQAKYFKHQAVGTEHLLLALAIEKEGIASKILGQFNVMDDDIREEIEHFTGYGITSRYDKNIYLPYSPKAADILHQANEELRALAQSKVGTEHILLALLQDESILSSRILLALDVNLQDMRRAILRKLGITDVRKQMKQQEKQQASAGTPTLDGLARDLTQMARDNKIDPVIGRPKEVRRVIQILSRRTKNNPVLIGEPGVGKTAIAEGLAQKIVDGEVPENLAKKRLMALDMGSLVAGTKYRGEFEDRLKKIIEEIYNDGEVILFIDELHTLIGAGGAEGAIDASNILKPALARGELQTLGATTFDEYQKYVESDAALERRFASVTVDEPTQDDAIAILKGIRSHFEKHHQVQIDDAAIEAAVKLSARYISDRFLPDKAIDLMDEAGAKVRIDATGKATPISKAKVRFAEVQAEKEAAITSLDFEKAAQLRTEEMKLKQKLAKSEAKDTQNNQKENAERYSLHVTEEDIAEVISQQTGVPVMQMEKNEQQRLVNLESVLGRRVIGQKTAISAVARAIRRARSGLKDPSRPIGTFMFLGPTGVGKTELAKALAEAIFGSEDNLIRIDMSEYQERWSSSRLIGSAPGYVGYDEGGQLTEQVRNHPYSVVLLDEAEKAHQDIFNLMLQVFDDGYLTDSKGRKVDFKNTIIIMTSNLGATRLRDEKSVGFGAVDLKDDHEAVAAKIRETLKETFRPEFINRLDEAIVFESLTKPELHEIVKLMSRSVLQRVAEQGISVKITPAAIDVVASAGFDPEYGARPIRRALQTKVEDALSEELLRGNITTDDAVTIGAKNGEIRISTKPLKKDTTKA

SEQ ID NO: 6778 - protein, 684 aa, Leuconostoc mesenteroides subsp. mesenteroides ATCC 8293
MAQQDSFGFGNLDEMFRAMNEQMAQAQGQQNTQAQKNNNGNKKRRLLDEFGINLTKQARDGKLDPVIGRDNEVARTIEILNRRTKNNPVLIGEPGVGKTAIVEGLAQAIVAGKVPEKLQHKEVIRLEMSALVQGTSMRGQFEARMRELMKEVTNSDDVILFIDEIHEIMGAGNAEGGMDAGNILKPALARGEFQLIGATTLNEYRKIEKDGAIARRFQPVQVEEPSKEETITILEGISERYEKYHYVTFSDSALQAAVELSDRYIPERFLPDKAIDLLDEAGSRKNLTMKVADPKTIQVNIEAADKLKQEAIDKEDFEKASYWRDQVNQLESQKAQVEAHPEMSKPQTVTEQDILKIVEDKTDIPVGALKENEANQLKDLDKNLSKHVIGQDEAVEKLAKAIRRNRIGLTKSGRPIGSFLFVGPTGVGKTETAKQLAKEMFGSKDAMIRFDMSEYMEKHTVSKMIGAPAGYVGYEEAGQLTEQVRRRPYSLVLFDEVEKAHPDVMNMFLQILDDGRLTDAQGHIVSFKDTVIIMTSNAGSTDTGNTPVGFAQVDQQNRLMQRLENYFRPEFLNRLDDIIDFQPLSQDHLLKIVDLLLTDMNENLSDNDLHIDLSTAAKQKLVELGYDPAMGARPLRRVMQDKIADGIADFYLEHPDVHHLQADIVHNEFVISEVKPEPVTVNKI

SEQ ID NO: 6779 - protein, 716 aa, Leuconostoc mesenteroides subsp. mesenteroides ATCC 8293
MANNDFFNDPFGSDMNDIFNNMMGNMNGMNSENRRYLINGREVTPEEFVQYRQTGKLPQGLQAANATNGQPVAQQAGQPGQVKQEGMLAKLGRNLTKEARDGLLDPVIGRNKEIQETAEILGRRTKNNPVLVGDAGVGKTAVVEGLAQAIVNGDVPAAIKDKEIYSIDISSLEAGTQFRGAFEENIQNLLKEVKQAGNVILFFDEIHQILGAGSTGGEDGGKGLADIIKPALSRGEISLIGATTQDEYRNTIMKNAALARRFNEVTVNAPSPKDTLEILKGIAKLYEKHHHVSLPENVLKAAVDYAVQYIPQRSLPDKAIDLLDMTAAHLSAKNPVTDKVSLEKQMSDAKAKQEKAVADEDYEAALKYKNQIADLEKKVGSADEAKKVEATPNDVAESVERLTGIPVAQMGASDIERLKTIGDRLAGKVIGQDEAVSMVAKAIRRNRAGFDEGNRPIGSFLFVGPTGVGKTELAKQLALDMFGSKDNIVRLDMSEYSDLTAVSKLIGTTAGYVGYDDNSNTLTEKVRRNPYSIILLDEIEKANPQVLTLLLQVMDDGRLTDGQGNVVNFKNTVIIATSNAGFGHNSSDADQDLMAKLAPYFRPEFLNRFNGVIEFSTLTKDDLKQIVDLMLDDVNKTLAKKDLTLHVSDEVKDHLIEDGYDEALGARPLRRVIEQQIRDQVTDFYLDNPGEKSLSADLVDGKVVISAVVEKTAVTN

SEQ ID NO: 6780 - protein, 632 aa, Leuconostoc mesenteroides subsp. mesenteroides ATCC 8293
MIELKQNNTTPYLDRYTTDISAKVMSAPEKYHAYERESITRRIMVSLMKQIQNAPLLVGLPGVGKTAIVEDLARQLLSTSVSSLKGKHLVQISLANLMKSSDGESFAHKFQAIIDELIANKDTVIAFIDEIHQIVGTGAETSGSSLDAGNIIKPALSRDDLQIIGATTTKEFHEYVARDGALMRRFDLIEVPELSFEQTKNVLSKVALQLNNGIEVPETVQDRIMALSQRYITDRYFPEKAIMLLDGALSVARLDNRPTLSNQDVATIIHDDYHVPEYVINQTTDERLLNLLPRLKSQVIGQDTALEKVAMKLTNREAGLADTSKPESFLFMGPTGVGKTETAKQLALNLFGNKQNFIRFDMSEFKFAGTSLERFKDQLTTRVRHTPYAVLLLDEIEKADPEVMDLLLQVLDDGRLSDEYGRVINFKDLIIVMTTNSGATAVMNRDAKSDAVKEDKKRQANFEEQLEIALQSDGYRPEFIARIGAIIVFDVLKMADMVRIVELKLSRLNQKAQESGFNIVFDTQEVARYIPSFDLGFEYLNGTQEVSSPIANYIADVGYKPSRGVRPIDDTIATYVSDPVSAAIIQKRQGLGQDFDTFIFRAIGNPPSLTSPYGEWQVVVSTAKEAADNEAI

SEQ ID NO: 6781 - protein, 517 aa, Leuconostoc mesenteroides subsp. mesenteroides ATCC 8293
MNYFTLYTYKNLTELRKIQQQNNVTTFIFEETLELLKEEQDVCIDITSLVHMLRQNQGNIYSAGINLREINEDSKIIIEESLAEIAIDFFPHIFSSHISLLNKDEVVTESQIPKTFVHYRRSLYTYYANEDLSAIIDYANENNISITTFSYANENLSTEIKKFNLNSKLAIVDLTSAIYAIEDNKNLIYMIESFLNQFSNVNVIGLASQSDQILKYFSLYIEGVESLKKILPDLKIKYSNEIVSKEVKKITSFSEHELDSLFTSFNHKLIGHDYFKRKLKYLLNNFIKLNKAKEQKVFSVFLFGSSGIGKTEVARLLANELQENSYLAKINFQNYSSQDALNTLIGSPAGYVGYGEGELRKKVNKSKVGLVLLDEFEKTTKPVFSFFLDLLEEGTFTDSMTREHDLDGYVLIFTSNIQNETEYKKIIPPELQTRFDLVCEFQIPSINEKRRFLELLFEQAQRKFVDQFSKIKCTEEDKEELFAFDYSEVNAFRDLKRHFNNRLMDFFTSKNVDIDMK

SEQ ID NO: 6782 - protein, 876 aa, Microbulbifer degradans 2-40
MRIDRLTNQLQVALSDAQSLAVGRDHSQIESIHLMQAMLDQQGGAVRPLLARAGFDVPGLRNELTKQLEALATVTNPTGDVNMSQELGRLLNLADKYAQKVGDKFISSEAVLFAGISDKASNLGKLLNTYGQPDRLKQAIAAVRGGETVDDPEAEGNRQALEKFTVDLTARAEAGKLDPVIGRDDEIRRTIQVLQRRTKNNPVLIGEPGVGKTAIVEGLAQRIINGEVPEGLKNKRLLSLDLGSLLAGAKFRGEFEERLKAVLNELSKQEGRIILFVDELHTMVGAGKADGAMDAGNMLKPALARGELHCVGATTLDEYRQYIEKDAALERRFQKVQVDEPNEEDTIAILRGLKERYEVHHGVNITDSAIIAAAKLSQRYITDRQLPDKAIDLIDESASRIRMEIDSKPEEMDKLERRLIQLKIEREAVKKDEDIASKERLKKIDSQINEIEKSFADLDEIWRAEKAALQGSQEIKSHLEKARLDLEAARRAGDLGRMSELQYGIIPDLEKQLDMAAQADMHEMKLLRNKVTEEEIAEVVSKWTGIPVSKMLEGERDKLLRMEDDLHKRVIGQHESVVAVSNAVRRSRAGLSDPNRPNGSFLFLGPTGVGKTELCKALAEFLFDSQDAMVRIDMSEFMEKHSVARLIGAPPGYVGYEEGGYLTEAVRRKPYSLVLLDEIEKAHPDVFNILLQVLEDGRLTDGQGRTVDFRNTVVVMTSNLGSSAIQDIAQNKSFDTISFDNESGAEEQNQYRYQAMKDAVMEVVTGHFRPEFINRIDEAVVFHPLAQQQIAGIADIQLETLRKRLAERDLRLNVTPEVMAKLAEAGFDPVYGARPLKRAIQQLVENPLAQHILKGEFIAGDTISATLEEGEITFRK

SEQ ID NO: 6783 - protein, 897 aa, Microbulbifer degradans 2-40
MTLLDNLKEMTMEFEKLVKNLSNESKELFEKSIALASSRSHFYIDVEHWLTEALAEEQREIIAILKHFNVDVDRVHADLDLALENTKTGNDGFPKISPDIVRLLFEAWMIASSQYASVQVLPVHILLALVDSAGLKTKIGKISKQFEAISGEEIRTQCETLLRGEALQDQGEATNKKLTKTPSLDQFTTNLTQQAKDGKIDSILGRDDEIRQIIDVLCRRKQNNPILTGEAGVGKTAVVEGLAVKIAQGDVPTAIENVEIRSLDLGLLQAGAGVKGEFENRLKNVIKEVQQSVQSIILFIDEAHTLIGAGNQAGSGDAANLLKPALARGELRTIAATTWAEYKKYFESDAALTRRFQVVKVEEPSVDKAIIMLRNAAPTLEQHHKVVILDAAVSASVNLSHRYIPGRQLPDKCVSLLDTACARVNLSQNTTPARIVQYSQEIKNIEFEIERLNQEAEKGYEHSASIVELEVKKVGITERYQSLCARWEQEKQIINQINSAREKAEEKVQDSDNEESATDLTNTLIAELRVKLKSISGSQPLIYECVDEQVVAEVVADWTGIPVGRMQSDEIQNVLSLEQTMEKRVIGQSHGLKLISKAVQTARAKLSDPKRPLGVFMLVGPSGVGKTETALTLAEQLYGSEQNMTVINMSEFKEEHKVSMLMGSPPGYVGYGEGGVLTEAVRRKPYSVVLLDEMEKAHPGVQDIFYQVFDKGILRDGEGRDIDFKNTVIIMTSNTASAQIEQLCIDPETKPEPKALLEAIEGTLRETYKPAFLGRINLIPYYPLDEQCLSEIAVMQLHAIQQRVETNYKVELNYSDKLVEHVVSLCAQSDTGARKISALLNNTLLPVLAEKILTEIALDKALESVEVDVSEEGEFVVKINSKKENTDDMKIKKTVTG

SEQ ID NO: 6784 - protein, 823 aa, Oenococcus oeni MCW
MDNQYTASAKNVLLLAQEQAKYFKHEIVGSEHLLSALTLEKDGLASKVLQDYNVTDDDIRNEIEQFTGYGTHTNIKAGFLAYSPKAQEILKNAALQAQSLGARQIGTEHLLLALLTDESILSSRILASLDVRLQDLTRAIFKRIGVDPNQQKPKSKQQGQANQQGTPTLDSMSRDLTALASAGQIDPVVGRDQEVHRVIQILSRRTKNNPVLIGEPGVGKTAIAEGLAHKIATGQVPFDLANKRLMALDMGALIAGTKYRGEFEDRLKKIINEIHQDGQVILFIDELHTLIGAGGAEGALDASNLLKPALARGELQTIGATTFDEYQKYIESDQALERRFASVTIDEPSQEDSVEILKGLRPRYEEHHRVNISDEAINAAVKLSSRYIADRFLPDKAIDLMDEAAAKVRIDTVQPEDKKVDLERQLNGLRDQLDDAVSSGDFDQATKIRQQEIKIRKELAVVETDNLINGTKDHKYQLTVREKDITDVVGQQTGIPVTQLQKSESERLLHLEEILHRRVIGQNEAISAVSRAIRRARSGIKDPSRPIGTFLFLGPTGVGKTELAKALAEAMFDSEDNMIRVDMSEYQESYSASRLIGSAPGYVGYDEGGQLTERVRNHPYSVVLLDEAEKAHPDIFNLLLQVFDDGYMTDSKGRKVDFRNTIIIMTSNLGATRIRDNKHVGFGAIEPQDSYKAMSSEIQTALKERFRPEFINRIDETIIFHSLSKPELHKIVELMSHGILQRVAEQGVSIKMNKAAIDLVAQVGFDPEYGARPIRRAFQNQVEDKVSDALLSKDIRPGDSVTVGSRKGKIDLMIHHQIEKSTK

SEQ ID NO: 6785 - protein, 726 aa, Oenococcus oeni MCW
MTPMFEIFLYLTEEKMADYNDDPFVFGNFNVDDIFRQLNGQMANMQQANNGSAQARPGNTGGNNNKKKNGLLEQFGINITEQARKGKLDPVIGRGKEVERVIEILNRRTKNNPVLIGEPGVGKTAVVEGLAQAIVAKKVPDKLMNKEVIRLDMVSLVQGTSMRGQFEARMQQLMKEVESRDEVILFIDEIHEIMGAGNAEGGMDAGNILKPALARGEFQLIGATTLKEYRNIEKDGAVSRRFQEVMVEEPSRIEAVEILKGLRPKYEDFHHVKYPDDVLETAVDLSDRYIPERFLPDKAIDLIDEAGSRKNLHLEFVSSEEIQQKINNAEAMKQQAIEKEDYEKASYWRDQVDNLQKQKKIAEENPENVANAATVTVSDIAKIIEEKTKIPVGDLKKNEASQLKDLDTHLRAHVIGQNEAVERVSRAVRRNRIGLTKSGRPIGSFLFVGPTGVGKTETAKQLSKEMFGSEESMIRFDMSEYMEPQSISKLIGAPAGYVGYEEAGQLTEQVRRHPYSLILLDEIEKAHRDVMNMFLQILDDGRLTDSQGHVVSFKDTIVIATSNAGSGDVGNNPVGFAAETAEDSAEHRLVEKLKNYFKPEFLNRFDAIVEFKELGKSELSKITDLMLNQMNSMLADNNLHVDVDKATKDKLVELGFNPEMGARPLRRVVQEQIEDKVADFYLDNPNAHQLRATLNKDGKIVLVPKKINAPAKTVPSDVPATNQKDN

SEQ ID NO: 6786 - protein, 720 aa, Oenococcus oeni MCW
MANNDYFNNSNNDPFNSMDDIFNNLMGRMNGINSESRYLINGQEVSPEEFAAYRQSGKMPINGQFQEVGSQAQPGQLGTAVSQKNGQSKKTGILEKLGRNLTEEARQGKLDPVIGRNKEIQETAEILSRRTKNNPVLVGDAGVGKTAVVEGLAQAIINGNVPAAIKGKEIYSIDISALEAGTQYRGSFEENIQKLISEVKSAGNVILFFDEIHQILGAGNTGEESGSNGMADILKPALSRGEVSVIGATTQDEYRNTIMKNAALARRFNEVTVNAPSPEDTLAILKGVRSLYEKHHHVKFPDDALKAAVDYSVQYIPQRSLPDKAIDLVDMTAAHLSAQHPVTDKVSLENDLKNAKTEQDQSAAKEDFEKAAAAKKRVEELEDKLKNVSSENKKEEVVVKPNDIAQSVERLTGIPVAKMGANDIERLKGIAGRLKGKVIGQNEAVEAVARAVRRNRAGFDEGNRPIGSFLFVGPTGVGKTELAKQLALDMFGSKDAIIRLDMSEYSDLTASSKLIGTSAGYVGYNDNQNTLTEKVRRNPYSIVLLDEIEKANPQIITLLLQVLDDGRLTDGQGNVVNFKNTVVIATSNAGFGNESDNKKDQDKSIIERLEPYFRPEFLNRFNAIVEFSHLSKENLKQIVELMLTEVNQTLAKKGIKLEVTQAAKDYLMNQGYDEAMGARPLRRVIEQQIRDKVTDFYLDNLNAKNLKADIDNGTIKITGK

SEQ ID NO: 6787 - protein, 705 aa, Tropheryma whipplei str. Twist
MCGGSFMSESQSELDKYGTNLTKTAATNKLDPVIGRDAEIRRVCQILSRRTKNNPVLIGSAGVGKTAIVEGLAQRIVAGDVPESLRNKEIVSLDLSALLAGASYRGEFEKRVKNLLEEIQKSKVIIFIDEVHTLMSAGAAEGAIAAGNMLKPLLARGELRLIGATTLDEYREHLEKDPALERRFQQVFVGEPNLEDCIAIMRGLKERYEAHHKVSISDTALVTAVELSSRYITGRQLPDKAIDLLDEAASSLRMEIDSSPVELDQLRREVDRLRLEELALKSENDPTSEQRLRSITNQLSGKQEMLNTLQASWNSERARLNQIGALKEQIDIAKQSADIAQREGRLEDASRLLYATIPQLQKNLAEKLEEQDSAPLVSDQVMPEDIASVVEGWTGIPVKKLMQKDAKQLLHLEEDLSKSVIAQKVAIGVIADAVRRSRAGLSDPNRPSGTFLFLGPTGVGKTQLVKALASLLYDGEIVRIDMSEYSEKFSISRLIGAPPGYIGHESAGQLTESVRRRPYSVVLFDEAEKAHPEVFDILLQVLDEGRLTDSHGRTVDFRNTIIVLTSNIGSRYLSDISLEATTAHEYVNDEVRRTFRPEFLNRLDEIVIFEPLSQSDICQIVDLNIESLNKRIKDRRIVVTVSEDLRRWLSKSGYDVIYGARPLRRLIQREIEDRLAKLIIEGLIHDGQTASFDLSGGAVNAQVCS

SEQ ID NO: 6788 - protein, 790 aa, Pseudomonas syringae pv. syringae B728a
MRIDRLTSKLQLALSDSQSLAVGLDHPAIEPAHLMQALLEQQGGSIKPLLLQVGFDINSLRKELSAELDRLPKIQNPTGDVNMSQDLARLLNQADRLAQQKGDQFISSELVLLAAMDENSKLGKLLLGQGVSKKALENAINNLRGEGAVNDPNVEESRQALDKYTVDLTKRAEEGKLDPVIGRDDEIRRTIQVLQRRTKNNPVLIGEPGVGKTAIAEGLAQRIINGEVPDGLRGKRLLSLDMGALIAGAKYRGEFEERLKSLLNELSKQEGQIILFIDELHTMVGAGKGEGSMDAGNMLKPALARGELHCVGATTLNEYRQYIEKDAALERRFQKVLVDEPSEEDTIAILRGLKERYEVHHKVAITDGAIIAAAKLSHRYITDRQLPDKAIDLIDEAASRIRMEIDSKPEVLDRLERRLIQLKVEAQALKKEKDEAAIKRLEKLQGEIERLELEYADLEEIWTSEKAEVTGSAQIQQKIEQSRQELEAARRRGDLNRMAELQYGIIPDLERSLQMVDQHGKPENQLLRSKVTEEEIAEVVSKWTGIPVSKMLEGERDKLLRMETLLHNRVIGQEEAVVAVSNAVRRSRAGLSDPNRPSGSFMFLGPTGVGKTELCKALAEFLFDTEEAMVRIDMSEFMEKHSVARLIGAPPGYVGYEEGGYLTEAVRRKPYSLILLDEVEKAHSDVFNILLQVLEDGRLTDSHGRTVDFRNTVIVMTSNLGSAQIQELVGDREAQRAAVMDAVGTHFRPEFVNRIDEVVIFEPLARDQIAGITDIQLAACASVWPSASCR

SEQ ID NO: 6789 - protein, 867 aa, Pseudomonas syringae pv. syringae B728a
MNLKSLFAKLNETSRTATESAAALCLSENHYDVEVEHLLLQLLDNNDNDLPVILRHYDVVPDRLQAQLVTALGTFKKGNTRTPALSPHITRMIEQAWVLASIEFGQSQIRTGHLVQALLDDDALRRVVIGSAPELEKINADDLRLNMSALVEGSPETKLSKPLANADASTGATTKGNGKTPALDQYTVNLTQSARDGRIDPVLGREFEVRQMVDILTRRRQNNPILTGEAGVGKTAVVEGLALRIVQGDVPSVLKGVAIHTLDLGLLQAGAGVKGEFENRLKSVIEETKRSLHPIILFIDEAHTLIGSGGQAGQNDAANLLKPALARGELRTIAATTWAEYKKYFEKDAALARRFQVVKVEEPDEDKAIHMLRGLLAKMQEHHKVTVMDEALVQAVRLSNRYITGRQLPDKAVSVLDTACARVALGQSAQPGALEDCKRHIDNLNAEITVLEQETAKGSDHARRLTALHEELQAEQETRESLEQQWKRELELVEKLGALSVPQSGEPDAGQIAAVRAELASVQGEQPLVHALVDGGTIGEVISGWTGIPLGKMLRDEIDTVQSLPALLGERVLGQDHALEEIGKRIKISRARMEDPNKPIGVFLLLGPSGVGKTETALALADTLYGGERNVITINMSEYQEAHTVSSLKGSPPGYVGYGEGGVLTEAVRRKPYSVVLLDEVEKAHPDVLELFFQVFDKGVLDDGEGREINFRNTVIILTSNTGTDRIMQWCLNTEQKPTPDDIVEGLRDELNQVFKPAFLGRLTIVPYYPVQDAILERIVGLKLERIRKRFERNHQAVLRYDEALIKAIASRCTEVDSGARNIDNILSKTLMPELAQRVLERMAQDKPIQSLTIDLGSDGDFAYTLT

SEQ ID NO: 6790 - protein, 854 aa, Pseudomonas fluorescens PfO-1
MRIDRLTSKLQLALSDAQSLAVGHDHPAIEPAHLMQAMLEQQGGSIKPLLMQVGFDVNSLRKELTKELDQLPKIQNPTGDVNMSQDLARLLNQADRLAQQKGDQFISSELVLLAAMDENSKLGKLLLGQGVSKKALENAINNLRGGEAVNDANHEESRQALDKYTVDLTKRAEEGKLDPVIGRDDEIRRTIQVLQRRTKNNPVLIGEPGVGKTAIAEGLAQRIINGEVPDGLRGKRLLSLDMGALIAGAKYRGEFEERLKALLNELSKQEGQIILFIDELHTMVGAGKGEGSMDAGNMLKPALARGELHCVGATTLNEYRQYIEKDAALERRFQKVLVDEPSEEDTIAILRGLKERYEVHHKVAITDGAIIAAAKLSHRYITDRQLPDKAIDLIDEAASRIRMEIDSKPEVLDRLERRLIQLKVESQALKKESDDAAKKRLEKLQEEIDRHEREYSDLEEIWNSEKAEVQGSAQIQQKIEQSRQELEAARRKGDLNRMAELQYGVIPDLERSLQMVDQHGKSENQLLRSKVTEEEIAEVVSKWTGIPVSKMLEGERDKLMKMESLLHQRVIGQDEAVVAVANAVRRSRAGLSDPNRPSGSFMFLGPTGVGKTELCKALAEFLFDTEEAMVRIDMSEFMEKHSVARLIGAPPGYVGYEEGGYLTEAVRRKPYSVILLDEVEKAHPDVFNILLQVLEDGRLTDSHGRTVDFRNTVIVMTSNLGSMQIQELVGDREAQRAAVMDAISTHFRPEFINRVDEVVIFEPLARDQIAGITEIQLGRLRNRLAERELKLELSPEAMDKLIAVGYDPVYGARPLKRAIQRWIENPLAQLILSGRFMPGETATGVVENDEITFN

SEQ ID NO: 6791 - protein, 885 aa, Pseudomonas fluorescens PfO-1
MINVDLQQLIQALDAETRRDLERSAERCVARGGSKILVEDLLLGLLERPNGLLSRALQDADVDAGELSAALQSRVEHSASRNPVFAPELVQWLQDALLVANLELGQTSVEDAALILALLRNPMRYAGSRYQPLLAKLNIDRLKEFALSQQPQAAANGKPAAQGESLLERFTHNLTQQARDGKLDPVLCRDGAIRQMVDILARRRKNNPIVVGEAGVGKTAIVEGLASRIAAGEVPQVLKGVELLSLDMGLLQAGASVKGEFERRLKGVIDEVKASPKPIILFIDEAHTLIGAGGNAGGSDAANLLKPALARGELRTIAATTWAEYKKYFEKDPALARRFQPVQLHEPTVSEAVTILRGLAQVYEKSHGIYLRDDAVVSAAELSARYLAGRQLPDKAVDVLDTACARVRISLAAAPESLERLRGELAEGGRQRQALRRDAEAGLLIDHEALEALEARLDEAEAEMVALETQWTEQKQLAERLLELRQQLAKAREAAAVEPVVTVEEDAEGTVIETHAAEVDEALSVEALEAQLNETHSALTAAQVKERLVSFEVCPRLVAEVISAWTGVPLAQLAREHNAKVASFATDLRTRIRGQEQAVHALDRSMRATAAGLNKPDAPVGVFLLVGPSGVGKTETALALADLLYGGDRFITTINMSEFQEKHTVSRLIGAPPGYVGYGEGGMLTEAVRQKPYSVVLLDEVEKADPDVLNLFYQIFDKGVANDGEGREIDFRNTLILMTSNLGSDKISDLCEDGARPTAEVLEETIRPVLSKHFKPALLARMKVVPYYPVGGPVLRELIEIKLGRLGERLNRRQLDFTWCQNLVDHLSERCTQSESGARLIDHLLDQHVLPLVADRLLDAMATGESLKRVHATLDGEASVTCEFA

SEQ ID NO: 6792 - protein, 871 aa, Pseudomonas fluorescens PfO-1
MACNGRPAWPCNGSKPACVSWRSPEMELASLIGRLNPDNRRALERAAQRCLQRGHHFVEIEHLLLELLDIEGGDFAFLLPRFGLERDALTAEINKALDLFKTGSTRTPALSSHTLGLLEDAVVQASVLGIDSIRSGLLLLALIDRDERRSLLLNSASSLLRIPKEALRANLLEWTENSREHVGPRSVSSGSPTPRQDSVLDQYTQDLTADAHAGRIDPIVGRDGEIRQCIDILLRRRQNNPILVGAPGVGKTAVVEGLALRIAAGDVPPSLQEVSLRVLDLGLLQAGAGVKGEFEQRLKGVIDTVRSADKPIILFIDEAHTLIGAGGTEGGSDAANLLKPALARGELRTLAATTWMEYKKYFEKDPALARRFQLVQVEEPDEITAVEMLRGVAAKLEQHHGVQVLDAAIHEAVKLSHRYISGRQLPDKAISVLDTACARVALGQHDVPPPLESLRHRQQSLKEEVERLRREQATGLDHRERITLLESESKTNVQAIRELETRWSEERVAVRELLDTRRELLALSESADSDKPDEAIDSRIDHLAAELLRLEAGLDAIRQDDPLVPEQVDGKTVAAVIAGWTGIPVGKMLADEAHAVRTLGTRMGQRVMGQSTALNTIAQRLQAYRAGLTDPQKPVGVFLLVGPTGVGKTETAYALADALYGGERNLISINLSEYQEAHTVSQLKGAPPGYVGYGSGGVLTEAVRRKPYSVVLLDEIEKAHPDVLEAFYNVFDKGLMEDGTGLVVDFKNTVMLATSNVGAELLLDTPTAQLGSEAFNEALHKVLLQAFRPAFLARMTVVAYRPLDEQTLEGIVLAKLEKLRGRYKAATGKQFEFDSGIVKAVLAKCSAAGARDVENVLMTQVTGKLAEWVLE

SEQ ID NO: 6793 - protein, 753 aa, Streptococcus agalactiae 2603V/R
MLCQNCKLNESTIHLYTNVNGKQKQVDLCQNCYQIIKTDPNNPLFSGLNHVSHAPGGINPFFDDFFGDLNNFRAFNGQDLPNTPPTQSGGNRGGGNGNGRNNNRNQTATPSQAKGILEEFGINVTEIARHGDIDPVIGRDSEIIRVIEILNRRTKNNPVLIGEPGVGKTAVVEGLAQKIVDGNVPHKLQGKQVIRLDVVSLVQGTGIRGQFEERMQKLMEEIRQRQDVILFIDEIHEIVGAGTAGEGSMDAGNILKPALARGELQLVGATTLNEYRIIEKDAALERRMQPVKVDEPSVEETITILKGIQKKYEDYHHVKYNNDAIEAAAVLSNRYIQDRFLPDKAIDLLDEAGSKMNLTLNFVDPKEIDQRLIEAENLKAQATREEDYERAAYFRDQIAKYKEMQQQKVDDQDTPIITEKTIEHIIEEKTNIPVGDLKEKEQSQLINLADDLKQHVIGQDDAVVKIAKAIRRNRVGLGSPNRPIGSFLFVGPTGVGKTELSKQLAIELFGSADSMIRFDMSEYMEKHAVAKLVGAPPGYVGYEEAGQLTEKVRRNPYSLILLDEIEKAHPDVMHMFLQVLDDGRLTDGQGRTVSFKDTIIIMTSNAGSGKTEASVGFGASREGRTNSVLGQLGNFFSPEFMNRFDGIIEFKALDKENLLNIVDIMLSDVNARLAINGIHLDVTDKVKEKLVDLGYDPKMGARPLRRTIQEHIEDAITDYYLENPSEKELRAIMTSNGNIIIKSSKKTEESTKG

SEQ ID NO: 6794 - protein, 702 aa, Streptococcus agalactiae 2603V/R
MANNNFYNRDPFGNMDDIFNSLMGNMGGYNSENKRYLINGREVTPEEFSQYRQTGKLPGQELNNQNTPTNQVSADSVLTKLGTNLTDQARQHLLDPVIGRNKEIQETAEILARRTKNNPVLVGDAGVGKTAVIEGLAQAIINGDVPAAIKNKEIISIDISSLEAGTQYRGSFEENIQNIIKEVKETGNIILFFDEIHQILGAGSTGGDSGSKGLADILKPALSRGELTVIGATTQDEYRNTILKNAALARRFNEVKVNAPSAQDTFNILMGIRNLYEQHHNVVLPDSVLKAAVDLSIQYIPQRSLPDKAIDLIDMTAAHLAAQHPVTDLKSLEKEIAEQRDKQEKAVNTEDFEEALKVKTRIEELQNQIDNHTEGQKVTATINDIAMSIERLTGVPVSNMGASDIERLKELGNRLKGKVIGQNDAVEAVARAIRRNRAGFDDGNRPIGSFLFVGPTGVGKTELAKQLAFDMFGSKDAIVRLDMSEYNDRTAVSKLIGATAGYVGYDDNSNTLTERIRRNPYSIVLLDEIEKADPQVITLLLQVLDDGRLTDGQGNTINFKNTVIIATSNAGFGNEAFTGDSDKDLKIMERISPYFRPEFLNRFNGVIEFSHLSKDDLSEIVDLMLDEVNQTIGKKGIDLVVDENVKSHLIELGYDEAMGVRPLRRVIEQEIRDRITDYYLDHTDVKHLKANLQDGQIVISER

SEQ ID NO: 6795 - protein, 815 aa, Streptococcus agalactiae 2603V/R
MSHYSIKLQEVFRLAQFQAARYESHYLESWHLLLAMVLVHDSVAGLTFAEYESEVAIEEYEAATILALGRAPKEEITNYQFLEQSPALKKILKLAENISIVVGAEDVGTEHVLLAMLVNKDLLATRILELVGFRGQDDGESVRMVDLRKALERHAGFTKDDIKAIYELRNPKKAKSGASFSDMMKPPSTAGDLADFTRDLSQMAVDGEIEPVIGRDKEISRMVQVLSRKTKNNPVLVGDAGVGKTALAYGLAQRIANGNIPYELRDMRVLELDMMSVVAGTRFRGDFEERMNQIIADIEEDGHIILFIDELHTIMGSGSGIDSTLDAANILKPALARGTLRTVGATTQEEYQKHIEKDAALSRRFAKVLVEEPNLEDAYEILLGLKPAYEAFHNVTISDEAVMTAVKVAHRYLTSKNLPDSAIDLLDEASATVQMMIKKNAPSLLTEVDQAILDDDMKSASKALKASYKGKKRKPIAVTEDHIMATLSRLSGIPVEKLTQADSKKYLNLEKELHKRVIGQDDAVTAISRAIRRNQSGIRTGKRPIGSFMFLGPTGVGKTELAKALAEVLFDDESALIRFDMSEYMEKFAASHLNGAPPGYVGYDEGGELTEKVRNKPYSVLLFDEVEKAHPDIFNVLLQVLDDGVLTDSRGRKVDFSNTIIIMTSNLGATALRDDKTVGFGAKDISHDYTAMQKRIMEELKKAYRPEFINRIDEKVVFHSLSQDNMREVVKIMVKPLILALKDKGMDLKFQPSALKHLAEDGYDIEMGARPLRRTIQTQVEDHLSELLLANQVKEGQVIKIGVSKGKLKFDIAKS

SEQ ID NO: 6796 - protein, 854 aa, Pseudomonas aeruginosa PAO1
MRIDRLTSKLQLALSDAQSLAVGHDHPAIEPVHLLSALLEQQGGSIKPLLMQVGFDIAALRSGLNKELDALPKIQSPTGDVNLSQDLARLLNQADRLAQQKGDQFISSELVLLAAMDENTRLGKLLLGQGVSRKALENAVANLRGGEAVNDPNVEESRQALDKYTVDMTKRAEEGKLDPVIGRDDEIRRTIQVLQRRTKNNPVLIGEPGVGKTAIVEGLAQRIINGEVPDGLKDKRLLALDMGALIAGAKFRGEFEERLKAVLNELGKQEGRVILFIDELHTMVGAGKAEGAMDAGNMLKPALARGELHCVGATTLDEYRQYIEKDAALERRFQKVLVDEPSEEDTIAILRGLKERYEVHHGVSITDGAIIAAAKLSHRYITDRQLPDKAIDLIDEAASRIRMEIDSKPEELDRLDRRLIQLKIEREALKKEDDEATRKRLAKLEEDIVKLEREYADLEEIWKSEKAEVQGSAQIQQKIEQAKQEMEAARRKGDLESMARIQYQTIPDLERSLQMVDQHGKTENQLLRNKVTDEEIAEVVSKWTGIPVSKMLEGEREKLLRMEQELHRRVIGQDEAVVAVSNAVRRSRAGLADPNRPSGSFLFLGPTGVGKTELCKALAEFLFDTEEALVRIDMSEFMEKHSVARLIGAPPGYVGFEEGGYLTEAIRRKPYSVVLLDEVEKAHPDVFNILLQVLEDGRLTDSHGRTVDFRNTVVVMTSNLGSAQIQELAGDREAQRAAVMDAVNAHFRPEFINRIDEVVVFEPLAREQIAGIAEIQLGRLRKRLAERELSLELSQEALDKLIAVGFDPVYGARPLKRAIQRWIENPLAQLILAGKFAPGASISAKVEGDEIVFA

SEQ ID NO: 6797 - protein, 495 aa, Mycoplasma capricolum
IHHNALVSAAKLSSRYITDRYLPDKAIDLVDEACASIKTELASIPIELDQVNRKVMQLEIETSALEKEKDDKSKERWQEAKKELDSLKIEQATLNKKWEKEKEELSKINLVKSSIENLKQELETAQNDGNYKRAGEIKYSLLPSLEKSLALFETQTGAKMISEEVTEQEIAKVVSKSTGILVDKLISSEKERLLNLEDLLKKYVKGQDQAIKAVTSAIMRSRSGIKNPDKPIGSFLFFGPTGVGKTEVARSLADILFNSPKKMIRLDMSEYMEKHSVAKLIGAPPGYVGYEEGGRLTEAVRRNPYSIILFDEIEKAHSDVFNILLQILDDGRLTDSLGKTIDFKNTIIVMTSNIASQYLLTSDDFVQIDDQKIQAELNQTFRPEFLNRIDNIVYFNALSVQTIGEIVDKLLDELITRLQDEQNYFINFSEEARNKIINEGYDRLFGARLLKDILKKIIETLIAHYIISGLISESTRYLIDVKNNQFILEEFKQFN

SEQ ID NO: 6798 - protein, 714 aa, Mycoplasma genitalium
MNINFTPAGENRNFLQEIGRNINDEVLKNKVDPIIGRDNEIRRLIEILSRKSKNNPVLIGEPGVGKTAIVEGFVRRVVSNDVPLNLRDVEIYELSLSGLIAGTKFQGEFEKRINTILKQVKESNGRIILFIDEIHQIVGLGRNSSSGAMDIANILKPMLARGEIKVIGATTLKEYREYIEKDGALERRFQKILINEPSSQEALTIMRGLKTRWELFHNITIFDSALVAAVEMSTRYINERNLPDKAIDLIDEAAAKIKTEMSSEPVAIDSLKREIINLETEYAALKQDKENDNKQSKKEYLEKLKKQLDALKQKRDSLINEWKKEKADFENINKLKKEIEEFQTKLETYQSEGNYESASKILYSDIPRLKKELESAQQKYATSKHDLFKTEVSENEIAEVISQTTGIPLKKLLESEKDKLLHLGDEIKKRVKGQDEAIDAVVNTVIRGRVNINDPNKPIGSFIFLGSTGVGKTELAKSLAEVLFDNEKALIRFDMSEYMEKHSVAKLIGAPPGYIGYEQSGLLTEAVRRKPYSVLLFDEIEKAHPDVTNVLLQVLDDGTLKDSQGRVVNFKNTLIIMTSNLGSNFLLEGKKDLAIQSLKKHFRPEFINRIDEIVFFNVLEKDTVLSIINSLLAQLSKRLNKQNLFFNFDSNLTEFIYKSSFDQQFGARPIKRFIDHSVATLIAKYILQGKIKKGVGYNIAVVKDNITITQNNKS

SEQ ID NO: 6799 - protein, 214 aa, Mycoplasma hominis
MNYLPEPLEKINYQIARLEIEKAALTNDSETKQTAIKNKERILEIDKELNTLKLQKVDLEKRWKQEKEDIQKFSSIKENIEELNRKLPLLQSEGKYVEASKIMYVLVPELIKTRDELEQKIQSRKNRLIKEVVDAEEVADIVSKWTNIPVNRLLENQKQKILNLSETLKKRVKGQDQAIELISDAIKRSKANINDPNRPIGSFLFLGPTGAGKS

SEQ ID NO: 6800 - protein, 858 aa, Fusobacterium nucleatum subsp. vincentii ATCC 49256
MMNPNQFTENTISAINLAVDISKGNMQQSIRPEALALGLLMQNNGLIPRVIEKMGLNLQYIISELEKEMNNYPKVEVKVSNENISLDQKTNSILNRAEKIMNEMGDSFLSVEHIFKAMIEEMPIFKKLGINLEKYMEVLMNIRGNRKVDNQNPEATYEVLEKYAKDLVELAREGKIDPIIGRDSEIRRAIQIISRRTKNDPILIGEPGVGKTAIVEGLAQRILNGDVPESLKNKKIFSLDMGALVAGAKYKGEFEERMKGVLKEVEESNGNIILFIDEIHTIVGAGKGEGSLDAGNMLKPMLARGELRVIGATTIDEYRKYIEKDPALERRFQTILVNEPNIDDTISILRGLKDKFETYHGVRIADAAIVEAATLSQRYITDRKLPDKAIDLIDEAAAMIRTEIDSMPEELDQLTRKALQLEIEIKALQKETDDASKERLKVIEKELAELNEEKKVLTSKWELEKEDISKIKNIKREIENVKLEMDKAEREYDLTKLSELKYGKLATLEKELQEQQNKIDRDGKDDSLLKQEVTADEIADIVSRWTGIPVSKLTETKKEKMLHLEDHIKERVKGQDEAVKAVADTMLRSVAGLKDPNRPMGSFIFLGPTGVGKTYLAKTLAYNLFDSEDNVVRIDMSEYMDKFSVTRLIGAPPGYVGYEEGGQLTEAIRTKPYSVILFDEIEKAHPDVFNVLLQVLDDGRLTDGQGRIVDFKNTLIIMTSNIGSHLILEDPALSESTREKVTDELKARFKPEFLNRIDEIITFKALDLPAIKEIVKLSLKDLENKLKPKHITLEFSDKMVDYLANNAYDPHYGARPLRRYIQKEIETSLAKKILANEIHEKSDVLIDLDNNHIVFKEK

SEQ ID NO: 6801 - protein, 856 aa, Helicobacter pylori
MNLFEKMTDQLHEALDSALALALHHKNAEVTPLHMLFAMLNNSQGILIQALQKMPVDIEALKLSVQSELNKFAKVSQINKQNIQLNQALIQSLENAQGLMAKTGDSFIATDVYLLANMSLFESVLKPYLDTKELQKTLESLRKGATIQGKNDDSNLESLEKFGIDLTQKALENKLDPVIGRDEEIIRMMQILIRKTKNNPILLGEPGVGKTAVVEGLAQRIVNKEVPKTLLNKRVIALDLSLLVAGAKYRGEFEERLKKVIEEVKKSANVILFIDEIHTIVGAGASEGGMDAANILKPALARGELHTIGATTLKEYRKYFEKDMALQRRFQPILLNEPSINEALQILRGLKETLETHHNITINDSALIASAKLSSRYITDRFLPDKAIDLIDEGAAQLKMQMESEPAKLSSVKRSIQRLEMEKQALEMEKKESNHKRMQEILKELSDLKEEKIQLEAQFENEKEAFKEISRLKMEMESLKKEAERFKRNGDYQQAGEIEYSKIPENKKKEEELQRKWEAMQQNGALLQNALTENNIAEIVSQWTHIPVQKMLQSEKNRVLNIESELQKRVVGQEKAIKAIAKAIKRNKAGLSDSNKPIGSFLFLGPTGVGKTESAKALAQFLFDSDKNLIRIDMSEYLEKHAITRLIGPAPGYVGYEEGGQLTEAVRRKPYSVVLLDEVEKAHPDVFNLLLQVLDEGHLTDSKGVRVDFKNTILILTSNVASGALLEENLSEADKQKAIKESLRQFFKPEFLNRLDEIISFNALGSHAVINIVGILFENIQKKALERGINITLDEEAKELIAEAGFDRFYGARPLKRALYEMVEDKLAELILEDKIKENGSVAFVVENNEIVPKIK

SEQ ID NO: 6802 - protein, 860 aa, Streptococcus mutans UA159
MIDKMTQLVEDSLEEAKELAIAHRNYQLDIPHLWAVLVKPDQFAFQFYQSLEINTNQLIEIINKEIDKIPVLSSTEKSSYARLYSQRLKNLLDDAHQEMIDLKDQVLTVEHLILALFNQQRNPITVFLLEQGLNKEKLYQKMHRIRKGKPAISSSQETIYDALEKYAVNLNQRALDEPVNKIIGRQDEMNDIIRILSRKNKNNAVLVGHSGVGKTAIIEGFVQRLVKNQVPKNLQGKVIYSLDIGALLAGTKYRGEFEERFKALLNDIIDSNGQIILFIDEIHSIVSAGRTEGSVDAASILKPLLARGKIRIIGSTTHAEYRESIEYDRALERRFQRILVHEPDLDYTMEILKGLKPIYENFHGVRLEEDGLEAAASLSKRYISDRFLPDKALDLIDEACAAKRLASHAYPVQMTNLSQQLISEKIRLLRLTDSDTDDKFKLNNHLEQLEEQKSQLLANWQRERELLDQVQELRSHLTALEEQANLALENNQVADYVRLEDEEIRKCHQKMTALEKERLDSQKIINVTVTREDIAAVVERLTGIKVQGVMENERDRLLHLEELLHQKIVGQDQAVQKVSQAIIRSRAGIQNPKRPIGSFLFLGPTGVGKTALAKRLAEVLFGSELEMVRLDMSEYMEKHAVSRLVGPPPGYVGYEEGGQLTEAVRQRLYSIVLLDEIEKAHPDVFNTLLQVLDEGRLTDSKGRTIDFKNTILIMTSNIGSTNILQSLQDSGCITSEVRYKVLDELNHSFRPEFLNRIDETVLFNALSEKDMTGVVKVMVSDLQARLLEQDIHLTLTESVYILLAKEGFDAAFGARPMQRTIMQKLENPLALYLIQNQKNKEKETFVTVSVKDKKLKFTFS

SEQ ID NO: 6803 - protein, 753 aa, Streptococcus mutans UA159
MLCQNCKLNEATIHLYANVNGQQKQIDLCQNCYQIMKTDPENGPLNHLSQQNSSSINPFFDDFFGDLNNFRAFNNQDLPNTPPTQAGGGNGNGGNNRRPGGPQQQASQKPNGLLEEFGINLTDIARKGEIDPVIGRDEEITRVIEILNRRTKNNPVLIGEPGVGKTAVVEGLAQKIVDGDVPQKLHGKNVIRLDVVSLVQGTGIRGQFEERMQKLMEEIRQRQDVILFIDEIHEIVGAGSAGDGNMDAGNILKPALARGELQLVGATTLNEYRIIEKDAALERRMQPVKVDEPSVAETITILKGIQPKYEDYHHVKYTDEAIEAAANLSNRYIQDRFLPDKAIDLLDEAGSKMNLTLNFVDPKEIDHRLIEAENLKAQATRDEDYEKAAYFRDQIAKYKEMQSAKLDKENTPVITEKNIEVIVEQKTNIPVGELKEKEQSQLIHLADDLKTRVIGQDAAVDKIAKAIRRNRVGLGTPNRPIGSFLFVGPTGVGKTELSKQLAIELFGSEDSMIRFDMSEYMEKHAVAKLVGAPPGYVGYEEAGQLTEKVRRNPYSLILLDEVEKAHPDVMHMFLQVLDDGRLTDGQGRTVSFKDTIIIMTSNAGTGKSEANVGFGASREGRTNSVLGELGNFFSPEFMNRFDGIIEFQALSKDNLLQIVSLMLDDVNQRLAVNAIHLDVTDKVKEKLVDLGYDPKMGARPLRRTIQEHIEDAITDFYLEHPEQKELKAIMTSNGKIVIKASNKVETVTKATSD

SEQ ID NO: 6804 - protein, 701 aa, Streptococcus mutans UA159
MANFNGRDPFGNMDDIFNQLMGNMGGYNSENRRYLINGREVSPEEFAQYRQTGKLPGNPEIQQAQAAARTPKEDSILTKLGNNLTEEARQGNLDPVIGRNKEIQETAEILARRTKNNPVLVGDAGVGKTAVVEGLAQAIVNGDVPASIKNKEVISIDISGLEAGTQYRGAFEENIQNLVKEVKEAGNIILFFDEIHQILGAGSTGGDSGSKGLADIIKPALSRGELTVIGATTQDEYRNTIMKNAALARRFNEVKVNAPSAEDTYEILKGISALYEQHHNVILPKEVLKAAVDLSVQYIPQRSLPDKAIDLVDMTAAHLAAQHPATDVKTLEKEIQTEKDKQQAAAEKEDYEEALKSKTKIDKLQAQIDNHTEGQKVTATINDVAEAVERLTGIPVSQMGSSDIERLKEMNSRLKGKVIGQDEAVEAVSRAIRRNRAGFDEGNRPIGSFLFVGPTGVGKTELAKQLALDMFGSKDSIIRLDMSEYSDRTAVSKLIGTTAGYVGYDDNSNTLTERVRRNPYSIVLLDEIEKADSQVITLLLQVLDDGRLTDGQGNTINFKNTVIIATSNAGFGNEALTGQEDKDMKIMDRIAPYFRPEFLNRFNAVIEFSHLSKEDLDEIVNLMLSEVNTTLAKKGIDLVVSDSAKAHLIEEGYDEAMGVRPLRRVIEQEIRDKVTDFYLDHTDVKHLKAEMQDDKLIIEEA

SEQ ID NO: 6805 - protein, 813 aa, Streptococcus mutans UA159
MTDYSLKMQEVFRLAQFEAARFESSYLESWHVLLAMVEIDSSVAGLSFAEFEADVRFEDYQAAAILAIGKKPKSSSNDIMLLEQSHALKRTLAEAAAISQVTHAKEVGTEHVLFAMLLNPNLLATRILELVGFHAKDDGESIRLLDLRKVIERYAGFSKEDIKAIFEMRKPKKVKNSSSFSDLMKPPSVTGELADFTRDLTELARQGRLEPVIGREQEISRMVQILSRKTKNNPVLVGDAGVGKTALAYGLAQRIVDSAVPFELADMKVLELDMMSVVAGTRFRGDFEERMNQIIADIEADGHIVLFIDELHTIMGSGSGIDSTLDAANILKPALARGSLRTIGATTQEEYQKHIEKDAALSRRFAKVTIEEPSEEEAYQILLGLKKSYETYHHVIISDAAVMAAVKGAHRYLSGKNLPDSAIDLLDEASATVQGLVKKKAPAYLTDLDHALITNDYQLAKRLLKKEKKPLLKKRAEVKEEDILATLSKLSGIPVKKLTQADSKKYLNLERELHKRVIGQDDAVSSISRAIRRNQSGIRVGKRPIGSFMFLGPTGVGKTELAKALAEVLFDDESALIRFDMSEYMEKFAASRLNGAPPGYVGYEEGGELTEKVRNKPYSVLLFDEVEKAHPDIFNILLQVLDDGVLTDSRGRKVDFSNTIIIMTSNLGATALRDDKTVGFGAKSFSQDYKAMESRILEELKKVYRPEFINRIDEKVVFHNLGQEDIRHIVKIMVAPLIAHLADQGITLKFQPSALKHLALAGYDAEMGARPLRRTLQTEVEDKLAELILSGKLASGQTLKIGIQKEKLKFDIV

SEQ ID NO: 6806 - protein, 715 aa, Mycoplasma pneumoniae
MDFSFTPTPDKRDFLKEMGRSINDEVLKNKVDPIIGRDNEIRRLIEILSRKNKNNPVLIGEPGVGKTAIVEGFVRRVVNNDVPLNLRDVEIYELSLSGLIAGTQYQGEFEKRVNGILKQVKESNGKIILFIDEIHQIVGLGRNSSSGAMDIANILKPMLARGEIKVIGATTLKEYREYVEKDGALERRFQKILVSEPSQQEALTIMRGLKTRWELFHNLTIFDSALVAAVEMSARYIPDRNLPDKAIDLIDEASAKIKTEMASEPVVIDTLKREIINLETEYAALKQDKENADNKKKQGHLDNLKQQLDELKKKRDSLTAEWKKEKTNFESINKLKKEIEDLQTRLELYQTEGNYEAASKILYYDIPKLKNQLEQAQKKYVDSKHDLFKTEVSENEVAEVVSQATGIPLKKLLETEKEKLLHLGDEIKKRVKGQDAAVETVVNTVMRGRVNLNDPNRPIGSFIFLGSTGVGKTELAKSLAEVLFDNEKAMIRFDMSEYMEKHSVAKLIGAPPGYVGYEQSGLLTEAVRRKPYCVLLFDEIEKAHPDVTNILLQVLDDGTLKDSQGRLVNFKNTMIIMTSNLGSNYIMENKRDLAMEALKKHFRAEFINRIDEIVFFSVLQKTTVLEIITNLLDQLNQRLAKQNLKFTFDPKLNEFIYKSSFDEQFGARPIKRFIDRQIATLIAKQILEGIITKDVSYNVIVEKDKVAIVANKVKS

SEQ ID NO: 6807 - protein, 753 aa, Streptococcus agalactiae NEM316
MLCQNCKLNESTIHLYTNVNGKQKQVDLCQNCYQIIKTDPNNPLFSGLNHVSHAPGGINPFFDDFFGDLNNFRAFNGQDLPNTPPTQSGGNRGGGNGNGRNNNRNQTATPPQAKGILEEFGINVTEIARHGDIDPVIGRDSEIIRVIEILNRRTKNNPVLIGEPGVGKTAVVEGLAQKIVDGNVPHKLQGKQVIRLDVVSLVQGTGIRGQFEERMQKLMEEIRQRQDVILFIDEIHEIVGAGTAGEGSMDAGNILKPALARGELQLVGATTLNEYRIIEKDAALERRMQPVKVDEPSVEETITILKGIQKKYEDYHHVKYNNDAIEAAAVLSNRYIQDRFLPDKAIDLLDEAGSKMNLTLNFVDPKEIDQRLIEAENLKAQATREEDYERAAYFRDQIAKYKEMQQQKVDDQDTPIITEKTIEHIIEEKTNIPVGDLKEKEQSQLINLADDLKQHVIGQDDAVVKIAKAIRRNRVGLGIPNRPIGSFLFVGPTGVGKTELSKQLAIELFGSADSMIRFDMSEYMEKHAVAKLVGAPPGYVGYEEAGQLTEKVRRNPYSLILLDEIEKAHPDVMHMFLQVLDDGRLTDGQGRTVSFKDTIIIMTSNAGSGKTEASVGFGASREGRTNSVLGQLGNFFSPEFMNRFDGIIEFKALDKENLLNIVDIMLSDVNARLAINGIHLDVTDKVKEKLVDLGYDPKMGARPLRRTIQEHIEDAITDYYLENPSEKELRAIMTSNGNIIIKSSKKTEESTKG

SEQ ID NO: 6808 - protein, 702 aa, Streptococcus agalactiae NEM316
MANNNFYNRDPFGNMDDIFNSLMGNMGGYNSENKRYLINGREVTPEEFSQYRQTGKLPGQELNNQNTPTNQVSADSVLTKLGTNLTDQARQHLLDPVIGRNKEIQETAEILARRTKNNPVLVGDAGVGKTAVIEGLAQAIINGDVPAAIKNKEIISIDISSLEAGTQYRGSFEENIQNIIKEVKETGNIILFFDEIHQILGAGSTGGDSGSKGLADILKPALSRGELTVIGATTQDEYRNTILKNAALARRFNEVKVNAPSAQDTFNILMGIRNLYEQHHNVVLPDSVLKAAVDLSIQYIPQRSLPDKAIDLIDMTAAHLAAQHPVTDLKSLEKEIAAQRDKQEKAVNTEDFEEALKVKTRIEELQNQIDNHTEGQKVTATINDIAMSIERLTGVPVSNMGASDIERLKELGNRLKGKVIGQNDAVEAVARAIRRNRAGFDDGNRPIGSFLFVGPTGVGKTELAKQLAFDMFGSKDAIVRLDMSEYNDRTAVSKLIGATAGYVGYDDNSNTLTERIRRNPYSIVLLDEIEKADPQVITLLLQVLDDGRLTDGQGNTINFKNTVIIATSNAGFGNEAFTGDSDKDLKIMERISPYFRPEFLNRFNGVIEFSHLSKDDLNEIVDLMLDEVNQTIGKKGIDLVVDENVKSHLIDLGYDEAMGVRPLRRVIEQEIRDRITDYYLDHTDVKHLKANLQDGQIVISER

SEQ ID NO: 6809 - protein, 857 aa, Shewanella oneidensis MR-1
MRLDRMTNKFQLAISDAQSLALGRDHQFIEPLHLMMALLNQDSGSIHPLLTQAGIRVSALRSLLSQELERLPQVEGTGGDVQLSQGLIRLLNLCDKLAQKRKDKYISSELFVLAALEGCDALAQCLKKSGATKELMEQTIEQVRGGQKVDDPNAEDQRQALKKFTVDLTERAEQGKLDPVIGRDDEIRRTIQVLQRRTKNNPVLIGEPGVGKTAIVEGLAQRIVNGEVPEGIKNKRVLSLDMGALIAGAKYRGEFEERLKAVLNELAQEEGQVILFIDELHTMVGAGKGDGAMDAGNMLKPALARGDLHCVGATTLDEYRQYIEKDAALERRFQKVLVDEPSVEDTIAILRGLKERYELHHHVEITDPAIVAAATMSHRYVSDRKLPDKAIDLIDEAASSIRMQMDSKPESLDRLERRAIQLKLEEQALAKENDEASRRRLDHLQEELRDVEAKASELSEIWRTEKAALAGTQHIKADLEQARLDLEVARRAGDLTRMSELQYGRIPELEKQLDLASQAEMQDMTLLRNKVTDLEIAEVLSKATGIPVSKMLEGEREKLLQMEVALHERVIGQNEAVDAVANAIRRSRAGLADPNRPIGSFLFLGPTGVGKTELCKSLARFLFDSESALVRIDMSEFMEKHAVSRLVGAPPGYVGYEEGGYLTEAVRRKPYSVILLDEVEKAHPDVFNILLQVLDDGRLTDGQGRTVDFRNTVIIMTSNLGSDIIQEGFGHLSYSEMKSAVMNVVTHSFRPEFLNRIDESVVFHPLDAENIKHIASIQIASLRKRLAEKDYTLEITDEALSLIAEIGFDPVYGARPLKRALQQEMENPLAQKLLRGDLLPGKPIKVSCVDGELVFEQ

SEQ ID NO: 6810 - protein, 704 aa, Ureaplasma urealyticum
MEFKQKNSNNPLEEFGRNLNKEILDNKIDPIIGRDEEIRRTIEILSRKTKNNPVLIGEPGVGKTAIVEGLAYRIVHKDVPSNLLDKTIIELSLSSLIAGASYQGQFEERINSILKEVKKADGNIILFIDEIHQIVGMGRNQGSNMDVANILKPMMARGEIKLIGATTLDEYRLYIEKDQALERRFTKVLVNKPTIQETLTIMRGLKPRWEAFHGIKIHDNALIAAVNLSERYINDRNLPDKAIDLIDEAAAKIKTQINSQPIYLDEIKRDLQHLQTEKAALEPEKDEKSIKRLNEILEKIKLKQDEFNNLNDLYLKEKKQIDDLKNLRQKIERIQHDIEFYQSEGKYEKASRLLYSDLPLFEKQREELENKINENNNQKMIIDSLTENEIADVIARATGIPLSHLLADEKTKLLSLNKRIASHVIGQDEAVKLISDAVIRGRAGINNPNQPIGSFLFLGPTGVGKTELAKTLAKELFNSEKALIRFDMSEYMEKHSVSKLVGAPPGYIGYENAGVLTESVKRKPYSILLFDEIEKAHPDILNILLQILDEGSIKDAKNNEINFKNTIIIMTSNIGAEALLENNKTKALLDLQKTFKPEILNRISEIIFFNKLSKEIIFKISENLLKELENLLAKQDYLIKFDDNIAQIMVEDAYSSNYGARPLKRWITKHLENEIAKLIIENRITKNINYKINYDRELDQVLIK

SEQ ID NO: 6811 - protein, 857 aa, Vibrio vulnificus CMCP6
MRLDRFTSKFQIAISDAQSLALGRDHQYIEPVHLMVALLDQNGSPIRPLLTILNVDVTHLRSKLSEMLDRLPKVSGIGGDVQLSSAMGAMFNLCDKIAQKRQDAYISSEIFLLAAIEDRGPLGQLFKELGLTEQKVSQAIEQIRGGQKVNDQNAEELRQALEKFTIDLTERAEQGKLDPVIGRDDEIRRTIQVLQRRTKNNPVIIGEPGVGKTAIVEGLAQRIINNEVPEGLRGRRVLSLDMGALVAGAKYRGEFEERLKSVLNELSKEEGNIILFIDELHTMVGAGKGEGSMDAGNMLKPALARGELHCVGATTLDEYRQYIEKDPALERRFQKVLVDEPTVEDTIAILRGLKERYELHHHVEITDPAIVAAASLSHRYVSDRQLPDKAIDLIDEAASSIRMQIDSKPEALDKLERKIIQLKIEQQALSNEHDEASEKRLRSLNEELNEKEREFAELEEIWNAEKAALSGTQHIKAALEQARMDMEFARRAGDLSRMSELQYGRIPELEKQLDLATQAEMQEMTLLKNKVTDNEIAEVLSKQTGIPVSKMLEAEKEKLLRMEEVLHKRVIGQKEAVEVVANAIRRSRAGLSDPNKPIGSFLFLGPTGVGKTELCKTLANFMFDSEDAMVRIDMSEFMEKHSVARLVGAPPGYVGYEEGGYLTEAVRRKPYSVILLDEVEKAHPDVFNILLQVLDDGRLTDGQGRTVDFRNTVVIMTSNLGSSRIQENFAMLDYQGIKEQVMEVVTKHFRPEFLNRVDETVVFHPLGQDHIKSIAAIQLNRLANRMEEHGYPLEVSDKALELIAQVGFDPVYGARPLKRAIQQSIENPLAKSILAGSVLPDKKIQLIVNNDQIVAHQ

SEQ ID NO: 6812 - protein, 854 aa, Vibrio vulnificus CMCP6
MASLSLSALVDKLTPEAKRALEQAAALASSRTHHSIEMTHWLLTLVQSAGPEEIELYRSFKVDLNQLQTDLTLQLEKYKTGCQTVPGLSSHTVTILQNAWMTATIAFEAEKIAAVHLLHAFLSDDTLFALSSTVSKELSKIQPSALIEYAQTHVEMANQIPNHRASTQALDQFTIDLTEQAELGQIDPVIGRDDEIRLMTDILLRRRQNNPILTGEAGVGKTAVVEGLALKIAEGDVPPALKAVRIKSLDLALLQAGAGMKGEFENRLKNVVKEVKESAVPIVLFIDEAHGLIGGGAQAGQGDAANILKPALARGELRTIAATTWAEYKKYVEKDAALTRRFQVVKIEEPSPELAIEMLRGLVPVMEKHHGVHITTEALKAAVFLSSRYISGRQLPDKAVSVLDTACSRVALSQNSIPGLLDQKYKKRQMIEAQQLQLTNELAFGHSHQTALDELESKLSLLQNEIHQLETTWRDEEGAVKQAKALRDSILAEPSAEKANQLQSIEQQLSSNPMPLVFSHVNEALIAEIIAGWTGIPLGKLKSDEIKAILDLQQHLQERVVGQDHALSKMAEVIKTARAQLNEESKPNGIFFLVGPSGVGKTESALAIAEQVYGSEENITVINMSEFKEEHKVSLLLGSPPGYVGYGEGGVLTEAVRRKPYSVILLDEMEKAHPGVQDIFYQVFDKGMIKDGEGRDIDFKNTIIIMTSNSGTETTMELFQDPELAPDPEALKEALRDDLLQDFKPAFLGRVNVIPYIPLHRDVLEKITALKLSKIQKRIKTNYKAEAVINDRLINSIVDSCNETGSGARALQNVIENKVLPKISESVLNAILNDIRINKIEIEGEVDDLSISIV

SEQ ID NO: 6813 - protein, 699 aa, Tropheryma whipplei TW08/27
MSESQSELDKYGTNLTKTAATNKLDPVIGRDAEIRRVCQILSRRTKNNPVLIGSAGVGKTAIVEGLAQRIVAGDVPESLRNKEIVSLDLSALLAGASYRGEFEKRVKNLLEEIQKSKVIIFIDEVHTLMSAGAAEGAIAAGNMLKPLLARGELRLIGATTLDEYREHLEKDPALERRFQQVFVGEPNLEDCIAIMRGLKERYEAHHKVSISDTALVTAVELSSRYITGRQLPDKAIDLLDEAASSLRMEIDSSPVELDQLRREVDRLRLEELALKSENDPTSEQRLRSITNQLSGKQEMLNTLQASWNSERARLNQIGALKEQIDIAKQSADIAQREGRLEDASRLLYATIPQLQKNLAEKLEEQDSAPLVSDQVMPEDIASVVEGWTGIPVKKLMQKDAKQLLHLEEDLSKSVIAQKVAIGVIADAVRRSRAGLSDPNRPSGTFLFLGPTGVGKTQLVKALASLLYDGEIVRIDMSEYSEKFSISRLIGAPPGYIGHESAGQLTESVRRRPYSVVLFDEAEKAHPEVFDILLQVLDEGRLTDSHGRTVDFRNTIIVLTSNIGSRYLSDISLEATTAHEYVNDEVRRTFRPEFLNRLDEIVIFEPLSQSDICQIVDLNIESLNKRIKDRRIVVTVSEDLRRWLSKSGYDVIYGARPLRRLIQREIEDRLAKLIIEGLIHDGQTASFDLSGGAVNAQVCS

SEQ ID NO: 6814 - protein, 76 aa, Methanosarcina barkeri
RLIGAPPGYVGYEEGGQLTEQVRRRPYSVVLLDEVEKAHPDLFNTLLQVLDEGRLTDGHGRTVDFRNTVLIMTSNI

SEQ ID NO: 6815 - protein, 854 aa, Pseudomonas syringae pv. tomato str. DC3000
MRIDRLTSKLQLALSDSQSLAVGLDHPAIEPAHLMQALLEQQGGSIKPLLLQVGFDINSLRKELSAELDRLPKIQNPTGDVNMSQDLARLLNQADRLAQQKGDQFISSELVLLAAMDENSKLGKLLLGQGVSKKALENAINNLRGEGAVNDPNIEESRQALDKYTVDLTKRAEEGKLDPVIGRDDEIRRTIQVLQRRTKNNPVLIGEPGVGKTAIAEGLAQRIINGEVPDGLRGKRLLSLDMGALIAGAKYRGEFEERLKSLLNELSKQEGQIILFIDELHTMVGAGKGEGSMDAGNMLKPALARGELHCVGATTLNEYRQYIEKDAALERRFQKVLVDEPSEEDTIAILRGLKERYEVHHKVAITDGAIIAAAKLSHRYITDRQLPDKAIDLIDEAASRIRMEIDSKPEVLDRLERRLIQLKVEAQALKKEKDEAAIKRLEKLQEEIVRLEKEYADLEEIWTSEKAEVTGSAQIQQKIEQSRQELEAARRRGDLNRMAELQYGIIPDLERSLQMVDQHGKPENQLLRSKVTEEEIAEVVSKWTGIPVSKMLEGEREKLLRMETLLHNRVIGQEEAVVAVSNAVRRSRAGLSDPNRPSGSFMFLGPTGVGKTELCKALAEFLFDTEEAMVRIDMSEFMEKHSVARLIGAPPGYVGYEEGGYLTEAVRRKPYSVILLDEVEKAHSDVFNILLQVLEDGRLTDSHGRTVDFRNTVIVMTSNLGSAQIQELVGDREAQRAAVMDAVSTHFRPEFVNRIDEVVIFEPLARDQIAGITDIQLGRLRKRLAERELTMVLSPEALDKLIAVGYDPVYGARPLKRAIQRWIENPLAQLILSGGFEPGSSITGKVVDDEIVFG

SEQ ID NO: 6816 - protein, 867 aa, Pseudomonas syringae pv. tomato str. DC3000
MIDVDLQQLVKALDAPTRNELEGAAGRCVSRGSSQILVEDMLPGLLERPDGMLMRALSDADVSTAEFAGLILVPVEHSVDRTPVFAAELVQWFQDALLIATLDLGQSHIDQAALILALLRNPLRYADRPYQPLLAKINIERFRDYVLSRQASGTARQAIHQSDSLLERFTHNLTQQAREGSLDPVLCRDDCLRQMVDILARRRKNNPIVVGEAGVGKTAIVEGLALRIVRGEVPDLLKDVELLSLDMGLLQAGASIKGEFERRLKGVIDEVKSSPGSFILFIDEAHTLIGAGANAGGSDAANILKPALARGELRTIAATTWAEYRQYFEKDPALARRFQPVRVLEPTVEQAVTILRGLAPLYEQSHGVYLRDDAVVAAARLSARYISGRQLPDKAIDLLDTACARVQISLVAVPERLEHLRSEMVQQQRHLEAVQRDADAGLSVDDKVLSTLASSVSRIRKEAIVLEDAWLDQRKTARRVLDLRQQLAHRKIQQNALTTLDSDCQATQALESELAQAQQTILSTQLKDRLVSFEVCPRLVAQVVNAWTGIPLSQLVQEHSLSIADFSSDLRLRIRGQEQAVQVLERAVKASAAGLNAPNAPTGVFLLVGPSGVGKTETAIALADLLYGGERFLTTINMSEFQEKHTVSRLIGAPAGYVGYGEGGMLTDAVRQKPYSVILLDEVEKADPEVMNLFYQIFDKGVANDGEGREINFRNTLILMTSNLGGDLIHASCREGERPDADELAMRIKPLLTAHFKPALLARMRVVPYYPVTGVVLHELIELKLSRLGERLECRGLTFSYSPDLTRYLLECCTQSDSGARLIDHVLESRVTPLIADRLLSAASSGDSVSRAHATLDASGGIVCEFE

SEQ ID NO: 6817 - protein, 882 aa, Pseudomonas syringae pv. tomato str. DC3000
MSNVDLQQLIQALDAETRRDLESSAERCVARGGSKILVEDLLLELLERPQGLLARALQDAEVDAGELSASLQSRVEHSASRNPVFAPELVQWLQDALLVANLELGQTQVEQAALILALLRNPMRYAGSRYQPLLAKLNIDRLKEFALSKQEQPANGKSAAQGESLLERFTHNLTQQARDGKLDPVLCRDGAIRQMVDILARRRKNNPIVVGEAGVGKTAIVEGLASRIAAGEVPQALKGVELLSLDMGLLQAGASVKGEFERRLKGVIDEVKASPKPIILFIDEAHTLIGAGGNAGGSDAANLLKPALARGELRTIAATTWAEYKKYFEKDPALARRFQPVQLHEPTVSEAVTILRGLAQVYEKSHGIYLRDDAVVAAAELSARYLAGRQLPDKAVDVLDTACARVRISLAAAPESLERLRGELAEGGRQRQALRRDAEAGLLIDHESLEALETRLHAAEEERVALEAMWLEQKTLAERLLELRQQLAKAREAVAAVPVVEIGEDDEGTVIEAVALDETQSVEALTAALNDTHVALAALQVKERLVSFEVCPRLVAEVISAWTGVPLAQLAREHNAKVASFAKDLRIRIRGQEQAVHALDRSMRATAAGLNKPDAPVGVFLLVGPSGVGKTETALALADLLYGGDRFITTINMSEFQEKHTVSRLIGAPPGYVGYGEGGMLTEAVRQKPYSVVLLDEVEKADPDVLNLFYQIFDKGVANDGEGREIDFRNTLILMTSNLGSDQISALCEDGARPTAEVLEETIRPVLSKHFKPALLARMRVVPYYPVSGPVLRELIEIKLGRLGERLNRRQLEFTYCQDLVDHLAQRCTQSDSGARLIDHLLDLHVLPLVADRLLDAMATGESLKRVHATLDTSGTVTCEFA

SEQ ID NO: 6818 - protein, 857 aa, Vibrio parahaemolyticus RIMD 2210633
MRLDRFTSKFQIAISDAQSLALGRDHQYIEPVHLMVALLDQNGSPIRPLLTMLDVDVTHLRSKLGEMLDRLPKVSGIGGDVQLSSSMGTLFNLCDKVAQKRQDSYISSEVFLLAALEDRGPLGQLLKEVGLTEQKVSQAIEKIRGGQKVNDPNAEELRQALEKFTIDLTERAEQGKLDPVIGRDDEIRRTIQVLQRRTKNNPVIIGEPGVGKTAIVEGLAQRIVNNEVPEGLRGRRVLSLDMGALVAGAKYRGEFEERLKSVLNELAKEEGNVILFIDELHTMVGAGKGEGSMDAGNMLKPALARGELHCVGATTLDEYRQYIEKDAALERRFQKVLVDEPTVEDTVAILRGLKERYELHHHVEITDPAIVAAASLSHRYISDRQLPDKAIDLIDEAASSIRLQIDSKPESLDKLERKIIQLKIEQQALSNEHDEASEKRLQALNDELNEKEREYAELEEVWNTEKAALSGTQHIKSELEQARMDMEFARRAGDLNRMSELQYGRIPELEKQLDLATQAEMQEMTLLRNKVTDNEIAEVLSKQTGIPVSKMLEAEKEKLLRMEDVLHNRVVGQSEAVAVVSNAIRRSRAGLSDPNRPIGSFLFLGPTGVGKTELCKTLASFMFDSEDAMVRIDMSEFMEKHSVARLVGAPPGYVGYEEGGYLTEAVRRKPYSVILLDEVEKAHPDVFNILLQVLDDGRLTDGQGRTVDFRNTVVIMTSNLGSSRIQENFATLDYQGIKSEVMDVVSKHFRPEFLNRVDEIVVFHPLGQEHIKSIASIQLERLAKRLEEKGYQLEVSDKALDLIAQVGFDPVYGARPLKRAIQQNVENPLAKSILAGEIVPDKKVQLIVTNDQILAHQ

SEQ ID NO: 6819 - protein, 890 aa, Vibrio parahaemolyticus RIMD 2210633
MININLSSLIQRLHPIAKVALEDAAALAVSEKANEVQIEHYLLSLLERPNSDFDVLLSHFDCSENLLRQSVRSTLDTNAKGNGSKPVFSALLIEWLQESWLVSSLDLSETQIRSGALLLTLVSNPLRYGQHGYASILEAVNPDSLKRNFAELTSHSIEAQVATSEKTQAREDGSALSKFTTDFTGKARKGEIDPVFCRDQEIRQIVDILARRRKNNPIAVGEPGVGKTAVVEGLALKIVQGDVPDNLKGVELYGLDMGLLQAGASVKGEFEKRLNAVLDEVKNSPTPIILFIDEAHTLVGGGNQAGGSDAANLLKPALARGEVKTIAATTWSEYKKYFEKDPALARRFQLVKLDEPSPEQAALIIRGLRPAYEKSHNVYVRDDAITAAAALSARYISGRQLPDKAIDVLDTACARVNISLNAIPASVETLQQELAAQQRELEALERDALQQTGDKHSLANIPDLKLAMETTKEELAEQEVQWHKEKEQIQEMIALRSRLHELVFGKVNEEELVVDEDSEQDVSPYTEMDEEAVRIAISACQEQLDAIRNGNPLVHFEVGPDEVSHVISDWTGIPMGKMLQDEAETTLKLKESLTQSIKGQEYAIDALSEGIQTAKAGLGNPDAPTGVFLLVGPSGVGKTETARAIADQMFGGERFMTTINMSEFQEKHTVSRLIGSPPGYVGYGEGGMLTEAVRQRPYSVVLLDEVEKADPEVLNLFYQVFDKGTLNDGEGRTIDFKNTLIIMTSNLATHEIESLVHQSKEIDANIIAEAIRPTLNQHFKPALLARMSVLPFVPLSDEAMTEIIHHKLNKVSQRLHSHHKLSLSYEESLVEFVLGNCRLAETGARNIDAVINRQLLPQLSTQLLVHDKDDSHTQITVSVDEQGTLTYAFS

SEQ ID NO: 6820 - protein, 855 aa, Vibrio parahaemolyticus RIMD 2210633
MASLSLSALVERLSPQAKETLEQAAAMASSRTHHSIELTHWLLTIVQHPSGIYSEVFEAFDIDERKVEEQLQAQLEKYKTGCQTVPGLSAHTVTIMQNALMCATIEFHEEQVNCIHLLFAYLSDDTLVNMMNAISAELDKVEPSRLVVMKEHVGDGGNNTSKATSSSNSALNQFTTDLTEQAKAGKIDPVIGRDNEIRLMIDILLRRRQNNPILTGEAGVGKTAVIEGLAQKIVDGDVPPALHDVAIKSLDLALLQAGAGMKGEFENRLKNLIREVNESSQPIILFIDEAHGLIGGGGQAGQGDAANILKPALARGELRTIAATTWAEYKKYFEKDAALTRRFQVVKVDEPTPELAVDMLRGLVNIMGQHHDVYITSQALNAAVQLSARYINGRQLPDKAVSVLDTACSRVALSQSATPGALDSKKKKLNIKEAEFQQLTKEAQLGVSHDELLNNIRYEIDELSNQVIELEAIWEQEKQWVQEAKSLRARVIEENADCDKERLQEIESNLALNAQPLVFSHVNESLIAEVISDWTGIPLGKLQDDEIEAVLNLKDSLCERVVGQDHALEIMSEVIKTASAQLTDETKPNGVFLLTGPSGVGKTESALAIAEKVYGSEDNVTTINMSEFKEEHKVSLLLGSPPGYVGYGEGGVLTEAVRRKPYSVILLDEMEKAHPGVQDIFYQVFDKGSIKDGEGRDIDFKNTIIIMTANTGTETTMSLYADPDLAPEPEALKEALRDDLLTDFKPAFLGRVNVLPYLPLGKEVLTEITKLKLNKVSNRIRKHYSAGLYFDEQLINDIVDNSNESGSGARVVQTTIENNLLPKISHEILNAILNGKTFDEINVRGSIKELEVSLI

SEQ ID NO: 6821 - protein, 1006 aa, Aquifex aeolicus VF5
MISENLFSAKSLEYLEKAKEIARENKDTKVDTDHLLIALLLDEKSPLSKYIEKRGIDRKEFLKRVSEYLENLNKQLEKAIEAEAQNLINLRTQIMEVKSNIGNVQTELSKIRKAKERILRELEYARRYGDWWTAETLELELRQLEATEQSIRRQLEQVEKSLSTVFAPEDVKAFLENKLSIDGLIRKALEKSPLIEQVKELGISPDRIIDKVAEKVFGKKPTFDYSQYLTQVLEKAQDKAVSEGEAQVQPSHISAALIEAKDTIGGKLINQVLGGEKEMKKDVTQELKEEEKSPLERFGVNLNELARQGKLDPVIGREREINQVIEILLRRTKNNPVLVGDPGVGKTAIVEGLAQRIVNKEVPPELQDKEIWSIDMASLLAGSKYRGEFEERLKALLDEVKEKGNVILFIDEIHTVVGAGAAEGAVDAANIMKPALARGEIRVIGATTVDEYRKYIEKDPALERRFQPVFVDEPTEEQTIEILKGLRPRLEQFHKVKISDEAIEAAVKLTKRYVTFRRLPDKAIDALDQAAARKKLKVIGTPPEIQEIERKIKALEEQIIEANLKGDYEKEAQLKIEKAKLEKEKQELLGKVGGVEAKIAELKKKIEELDEKIKEAAEKGDYEKEAELKIEKAKLEKELKKLEQEKSKELVVTWDDVAEVVSEWTGIPVSRLKEEEMQKLLKLEDELHKRVVDQEHAVKAVAEAIRRARAGLKDPKRPIASFLFLGPTGVGKTELSKALAELLFGDEDALIRLDMSEFKEEHSVAKLIGAPPGYVGYEEGGKLTEAVRRKPYSVILLDEIEKAHPRVLDLFLQVLDDGRLTDSHGRTVDFRNTVIIMTSNIGSQYLLNIPVDADEETLNREFEKAKEKVLEELKLYMRPEFINRIDEIIVFKPLTMRELSKIIDLLIANVNKRLAERNIKIELTEEAKKELVRRGYDPAFGARPLKRTIQKYVETPLADKIIRGEIKDGMTVVVDYKDGEFVFIPKEEYEKQKAEVSASSEEKKES

SEQ ID NO: 6822 - protein, 739 aa, Borrelia burgdorferi B31
MVEIDSKEIARKNKNKEVSIWHLLMSIITTPKKSEIKFIDSKTLKNIKQEVISEIDKLEKILIEKNEIIIPKINKEIFALIKEAKKEFKSKPLIGAKEIFYQILKNKKLLKKHKLSKSSFNFKDQNILEYMEKNKIRLIETYKEFDEEIRLENEHFEIGKYVKNLTALAKAKKLDPLVGREAEIKTLTNILLRRNKNSAMLIGEPGVGKTAIVEGLASSIVQKKISSKLQDKTILMLKVSNLVSGTKYRGEFEDRLNNIIKYIEKNKNTIIFIDEIHTLIGAGNSEGALDASNILKPSLSRAEIQIIGATTYNEYRKYISKDKAFARRFQTITVKEPDEKDTLKIIENIAKNFEDYHGVIYEKSALLNIVKLSSKYLINKRFPDKAIDIIDIAGAIKKEELTKDNIITSDDIQKAINEILSIKTANNTKEEILELKEIESEINKKVIGQKHAVSELIKEIIKVKLGLNDDSKPLTSILLIGSSGCGKTALTDEISKKIIKDQNSVLKLDMSDYKEENSISKLIGTNPGYVGYSDGGILTNKLRHSFETLILFENIENAHSSVLNLISRMLENGELIDSKEDKILFKNTIIIMTTNIGSRMLLGEKNIGFNKNQQKSLETKSFKEEINQDLEKRFKLSFLDRIQKKIILNILTKENVEEICKNYLNTLKTKFHSKGIEIEIKKDVDKFITTKYYKKNSGARSVIAAIKGKIEENIITKIAENQNINKITIYLEKEKIIIE

SEQ ID NO: 6823 - protein, 763 aa, Borrelia burgdorferi B31
MYDRRALNCLFFNTFLFFMESRHLVFTEEHIFYGLIKSDKVKELLNLCAIDFYKLNKQLEEFFSKLPLRGNYIPDYVSSMDYLYDDIISVLFFYKKPYKIQEKDLLWVLVKKRKNSILDALLSSGFNLTIFDKLIEAHDYLAVNTKSASGDSELIAEYIHNNAPKRKGGFHIFDDKRDELDQNNIFLESKDSIGNFLTNVIDTLDLKYNPLIGRSQELSRLIQVILRKHKSNPILFGEPGVGKTVLIQGLAYKIKIENVPKDLIGYEIYSLDIGRLVSGTKYRGDLESRVNRVLDFLSSRKKVMLFIDEIHMIVGAGATSFGSMDISNLLKPILTLGKIKFIGATTEYEYRKFFLKDKALMRRFQSIELKEPNFEDAYNILQEIKKDYERYHNVEYTDEAIQACILMSQKYIKDRFLPDKAFDILDELGSKFKLENIKRIITKDDVCDLIKSIVGSNIFNFEEYDGELLINLENRIKKELIIHDNLVLDLILNIKLLKFNLLANRSTIGIFAFIGASGSGKCKLMDILSEEFKIPKFSLNMGEYNDFNSLDRLIGPVLSNEGYYESTRFFKFLNKSSNSIIFLSDFDKCNKRVLDFFLEGFKTGKLFDGLGKKVSLSESLIVISINAESKELNSIGFRNKMAGENDFNFILKKRLPNEFLELIDHVFVFKSIDELDFEKIIFNELNYFARILRDRKFDVFFEKSVVDYIREKIYGKGYSLKSVRKFIFKELGKLLIDEILFKKIENSGKIKIYLDETIKYEFL

SEQ ID NO: 6824 - protein, 868 aa, Enterococcus faecalis V583
MNIEKMTTTLQEAIAEAQKVAVTRQHQEIDIAHLWKIFLQPNHFGRNFYTDAGLDVDAFEREVDNALDEYPSVAGGNVQYGQNLSQNLFHLLQEADSLREEFQDEFLSTEIVLLALMKLKNYRLTKYLMQQGITEKELRKNIEEMRGGDRVTSQNQEEQYKALEKYGVDLVQQVKAGKQDPIIGRDEEIRDVIRILSRKTKNNPVLIGEPGVGKTAIVEGLAQRIVRKDVPENLKDKTIFSLDMGALIAGAKFRGEFEERLKAVLKEVKKSDGKIILFIDEIHNIVGAGKTEGSMDAGNLLKPMLARGELHLIGATTLDEYRQYMEKDKALERRFQKVLVKEPTVEDTISILRGLKERFEIHHGVNIHDNALVAAATLSDRYITDRFLPDKAIDLVDEASATIRVEMNSMPTELDQVTRRLMQLEIEEAALKKESDDASKKRLANLQEELADLREEANSMKMQWETEKEEVNAVSNKRAEIDKAKHELEDAENNYDLERAAVLRHGTIPQLEHELKELEEKNAKDNVKMVQESVTENEIAQVVGRLTGIPVTKLVEGEREKLMKLNETLHKRVIGQDEAVDAVSDAVIRSRAGLQDPNRPLGSFLFLGPTGVGKTELAKALAEDLFDSEDHMVRIDMSEYMEKHAVSRLVGAPPGYVGYEEGGQLTEAVRRNPYTIVLLDEIEKAHPDVFNILLQVLDDGRLTDSKGRVVDFKNTVLIMTSNIGSQLLLEGVTPEGTIPEEVENQVMNILKGHFKPEFLNRIDDTILFTPLSLDNVKGIIGKMTAQLAHRLEQQEIVLEITDEAKTWIAENGYEPAYGARPLKRFITREVETPLAKEIVSGRVMPKTKVTISLLDNQLVFENEPIEEV

SEQ ID NO: 6825 - protein, 859 aa, Coxiella burnetii RSA 493
MRIDKFTTAFQTALADAQSLAVGRDHQFIEPAHVMKVLLEQTQGTVAPLLEQSKVNLSRLIDGVNKAIDSYPQVEGTGGEVHVSRELSKILTLMDKFAQQNKDQYISSEWFIPAALEAKGQLRDVLIEAGADKKAIEKNIMNLRKGERVTEQSAEDQRQALAKYTIDLTEKAETGKLDPVIGRDEEIRRTVQVLQRRTKNNPVLIGEPGVGKTAIVEGLAQRIVNGEVPEGLKQKRLLALDMGALIAGAKFRGEFEERLKAVLKDIAKEEGRVILFIDELHTMVGAGKAEGAMDAGNMLKPALARGELHCVGATTLDEYRKYIEKDAALERRFQKVLVEEPSTEDAIAILRGLKERYEVHHGVEITDPAIIAAATLSQRYITDRNLPDKAIDLIDEAASQIRMEMDSKPVELDRLERRLIQLKIEREALKKETDEASKKRLSDLETEIKNVEKEYSDLEEVWKSEKASLHGTQQIKEELEQARIELEAAGRAGDLARMSELQYGIIPELDKKLKAASQKEEQFHDHKLLRSRVTEEEVAEVVSKWTHIPVSKMLEGEREKLLHMETELHKRVIGQDEAVNAVANAIRRSRAGLSDPNRPVGSFLFLGPTGVGKTELCKALAVFLFDTEDAMVRIDMSEFMEKHSVARLIGAPPGYVGYEEGGYLTEAIRRRPYSVILLDEIEKAHNDVFNVLLQVLDDGRLTDGQGRTVDFRNTVIVMTSNLGSDLIREFSGENYDKMKDAVMEVVAQHFRPEFINRIDEAVVFHSLKKEQIRNIAIIQIDRIKKRLKEKDYQLTISDDALDYLSELGYDPVYGARPLKRVLQQQLENPLSQKILEGKFVPGSLINIEKKGEQLEFKEA

SEQ ID NO: 6826 - protein, 864 aa, Chlamydophila caviae GPIC
MDKISDAVSEALEKAFELAQSAKNPYVSENHFLKCLLENTESLFYLIIKDIHNNPKLLTSAVDEALSLEPSVIEGSAMPKPSPGLQSLLLDAKQEAKDLGDEYLSGDHVLLAFWKSNKEPFASWKKTVKISLDDLKKLIINIRRGNRMDSPSAENNLRGLEKYCKNLTLLAKEGKLDPVIGRDEEIRRTVQVLSRRTKNNPMLIGEPGVGKTAIAEGLALRIVQGDIPESLKGKQLYVLDMGALIAGAKYRGEFEERLKSVLKDVESVDGESILFIDEVHTLVGAGATDGAMDAANLLKPALARGTLHCIGATTLNEYQKYIEKDAALERRFQPIFVTEPSLEDAVFILRGLREKYEIFHGVRITEGALNAAVLLSYRYIPDRFLPDKAIDLIDEAASLIRMQIGSLPLPIDEKERELAALIVKQEAIKREKAPSYQEEAAAMQQSIEQLKEELAALRLRWDEEKKLITGLKEKKNSLENMKFSEEEAERVADYNRVAELRYSLIPALEEEIREDEEALNQRDNRLLQEEVDERLIAQVVANWTGIPIQKMLEGEAEKLLVLEESLEERVVGQPFAISAVSDSIRAARVGLSDPQRPLGVFLFLGPTGVGKTELAKALADLLFNKEEAMVRFDMTEYMEKHSVSKLIGSPPGYVGYEEGGSLSEALRRRPYSVVLFDEIEKADKEVFNILLQIFDEGILTDSKKRKVNCKNALFIMTSNIGSQELADYCAKKGSRVSKETVLSVVAPTLKKYFSPEFINRIDDILPFVPLNTEDIVKIVGIQMRRVAQRLLERRVTLTWDDSVILYLSEQGYDSSFGARPLKRLIQQKVVTLLSKALLKGDIKSDTSIELTMSKDVLLFKKIEG

SEQ ID NO: 6827 - protein, 631 aa, Aquifex pyrophilus
MGQVTRGSHSGEVLFAPDAKRVIEFAVEEARILHHQFVGPEHLLIGVVREKTGLGGRILRSFGLDEYSVRREVLQLLGELPPQESQRYVSTPNLDRFSRDLTQMAREGKLDPVIRKEREIERVIQILVRRRKNNPVLLGDPGVGKTAIVEGLAQRIANREVPEPLLNKRVVALDLAALVAGTKYRGQFEERLKNILKELEKANNVILFIDELHTLVGAGSAEGSIDASNMLKPALARGEIQVIGATTVDEYRKYIEKDGALERRFQPVYVEQPSPEDTIQILYGLKPKFEEFHKVEYTPESIEKAVELSVKYITDRNLPDKAIDVMDEAGALVKLKASQLPPELKELEEKIKEYEKEKEKAVKEQDYEKAAKIRDEELRLRAKFETMKAKWKEEMEKNRPKVTEEDVAEVVARWTGIPVKRVHESDAEKLLHIEEELKKRVIGQDEAIKAVAKAIRRSRVGLKGKHRPIGVFMFLGPTGVGKTETAKALAEYLFGTEDALIRFDMSEYMEKHTVSRLIGAPPGYVGYEEGGQLTEAVRRRPYSVLLFDEIEKAHPDVFNVFLQIFDDGRLTDGLGRTVDFSNTIIIMTSNLGARLITGGTMGFEKKQGLLDFEEMKKNVLDQVKKTFSPEF

SEQ ID NO: 6828 - protein, 821 aa, Porphyra purpurea
MFERFTEKAIKVIMLAQEEARRLGHNFVGTEQILLGLVGEGTGIAAQVLKSMNVNLKDARVEVEKIIGRGSGFVAVEIPFTPRAKRVLELSLEEARQLGHNYIGTEHLLMGLVREGEGVAARVLENLAVDVSSIRAEVIQMLGENAEANVSGSNATQARSKTPTLEEFGSNLTQMAIEGGLDPVVGRQKEIERVIQILGRRTKNNPVLIGEPGVGKTAIAEGLAQRIANRDVPSILEDKLVITLDVGLLVAGTKYRGEFEERLKRIMDEIKSADNVILVIDEVHTLIGAGAAEGAIDAANLLKPALARGELQCIGATTLEEYRKHIEKDPALERRFHPVVVGEPSVEETIEILFGLRDRYEKHHQLTMSDGALAAAAKYANQYISDRFLPDKAIDLIDEAGSRVRLLNSQLPPAARELDKELRAVLKTKDEAIRAQKYETAEQYRAREMEIKAQIAAIAQSKKNEPDLNLEDPVVTEDDIAEIVAAWTGIPVTKLTKSESEKLMQMEETLHGRIIGQDEAVIAVSRAIRRARVGLKNPNRPIASFIFSGPTGVGKTELTKALASYFFGSEASMIRLDMSEYMERHTVSKLIGSPPGYVGYSEGGYLTEAVRKKPYTVILFDEIEKAHPDIFNLLLQILEDGRLTDAKGRTIDFKNTLLIMTSNIGSKVIEKGGGSLGFELSEDQTESQYTRVRSLVNEELKQYFRPEFLNRLDEIIVFRQLTKDEVREIAELMLNEVFARIKQQDIQLNVTERFKERLVEEGYNPSYGARPLRRAVMRLLEDSLAEEVLSGKIKAGDSPVVDVTNEGEVKVLLGEKLELLT

SEQ ID NO: 6829 - protein, 705 aa, Mycoplasma penetrans
MEFNFEPSNEKDILKKYSRNLNEEVSANKLNKIIGREQEIRRVIEILSRKEKNNPVLIGEPGVGKTAIVEGFVQKIISKEVPENLVHCVVYEVNLSSLIAGTFLQGEFEKRLNALIKEAKQNNGAVILFIDEIHQLMGMGKAGNNSGMDAANILKPIMARGEIKIIGATTSNEYRQYIEKDGALERRFQKILVEEPTPEEALTIMRGLKEKWEIYHKVRIQDNALVASVKLSERYISDKYLPDKAIDLIDEAAAKIKTEAHTSPSEPINKKIFYLETEKIALSKEEGTNQKERINEIEIELEKLKQERDLVEKEWKEQKEQQVALNKIKKEIEKNNWDVERYQNQGEYTEASKILYSVLPELKKKLEAIEKSISENKKVLIKDYISEIDVAEIISRITKIPLNKIFEKEQDKLLNLFNNLKKRVKGQDEALKLVSDTVLKNRVGINNPNRPIGSFLFVGPTGVGKTEVAKSLAENLFNTEKAIVRINMSEYMEKHSISRLIGAPPGYIGYEQAGELSEQIRRKPYSVVLLDEIEKAHPDILNVLLQVLDEGTLKDNQGRNINFKNTIIIMTSNVGALYLMENKEDMFERELKTSFKPEFLNRIDEIIKFNSITMEFAKEIAQKMLDDLEKRLKDNNYQITFDKSVVEYVAKNGYSKEYGARPINRFIQKTIENFITESILKNELIKDRSTIINFANNKLAILKSN

SEQ ID NO: 6830 - protein, 885 aa, Odontella sinensis
MFEKFTEGAIKVIMLSQEEARRMGHNFVGTEQLLLGIIGQRHGIGARALKKQKVTLKKARREIELYIGRGTGFVASEIPFTPRAKRVLEMAVHEGKDLGQNFVGTEHILLALISESDGVAMRTLDKLGVNIPKLRNLILMYIEENQEEILRPLTQAEKFLLEREKKGSSTPTLDEYSENISKEAVDGKLDPVIGRDKEIHEVIKVLARRRKNNPVLIGEPGVGKTAVAEGLAQLIIAEKAPDFLDGNLLMALDLGSILAGTKYRGEFEERIKRIVEEVQNDSAIILVIDEIHTLVGAGAAEGAVDAANILKPALARGKFRCIGATTIDEYRKYIERDPALERRFQPVHVKEPTVGVTIEILLGLRSKFEEHHTLSYHDKAVEQAAILADKFIADRFLPDKAIDVLDEAGSRVRLENRRLPRGMKRLLKELQDTLRDKEESIKEHDFDIAKQLVDHEMEVRTHIRIMKQSILTNETLGLARKEIDTVLEGDVAEVIAGWTGIPVNKISDSESKRLLTMEETLHERLIGQHHAIVSVSKAIRRARVGLRNPDRPIASFIFAGPTGVGKTELTKALSEYMFGNEDSMIRLDMSEYMEKHTVAKLIGSPPGYVGYNEGGQLTEAVQTKPYSVVLLDEVEKAHPDVFNLLLQILDDGRLTDSKGRTIDFRNTMIIMTTNLGAKIIEKESGIKPKTKQDKPAFRIDESGCLGWEPTPEPIKDSALFEKVTELVNEELKEFFRPEFLNRIDEIIVFNHLTKYDIWEICGLMVKQLQKRLEEKELTLEVDVSVRNLLTEEGYDPVYGARPLRRAVMRLLEDTLAQQCLSKPLYPGTILRVSRVKEEGTLASYTNDVKVEIDYRRVDPRLLEQAEEKKEQNQEETKQNILKTDA

SEQ ID NO: 6831 - protein, 460 aa, Gluconacetobacter xylinus
MNTLHKPARLSKIVLLTGVVSVSCSPVAAWADPVVERITTTKDVGDVSPAFRTSTPRHSTTRVAIVTGADLLKTGQTNVIAALQQSSPEINAPPGGGGGGYSTTPTQTVILRNLNADETLVLVNGVRRHASAIGNWNYGPAQGTEPADLSLIPLSAIDHVEIVTEGATALYGQDAIGGAINIVLKAGNRNGGTANIQNSGYYRGDGQGITAYGDLERQLGSKGGGMDLAWQVQNQLPTHRDGIHPTLGDVNRIEGISRSLSELFSFNAHMPISRSVEAYGTATLAHRSTDRIGFIRGPTNINNVPSLHPNGFEPIETFDEMDFQVNGGLRGTMPAGVAWNTYASFGREQVNEGVYDDNNPTFGALSQTSFNQGKIEALTAAIKLSRAGLRDPEKPIGNYLFSGPTGVGKTEVAKQLAATLGIELIRFDMSEYMERHSIRMITGSLTTSRACARSFSTTPM

SEQ ID NO: 6832 - protein, 371 aa, Pseudomonas aeruginosa
MPFLSDMLDQSRRQQDEEQALARENLAEASLLQAHLSHRSALHSRFRFDPAAVMDCLRAEVLGQEPALQAVEDMLKVVRADIADPRRPLFSALFLGPTGVGKTEIVRALARALHGDAEGFCRVDMNTLSQEHYAAALTGAPPGYVGAKEGTTLLEQDKLDGSPGRPGIVLFDELEKASPEVVHALLNVLDNGLLRVASGERTYHFRNTLVFMTSNLCAHEIQRYDERRQRLPWRLLPVGGERRRRDIDGMVRARLLKTFSPEFVNRLDSVVTFNWIERDVVARLVELEVQRLNRRLEKHRCRLEATPEVLAKIARAGFDRQFGARALRRSVRHHLEVPLAEHLLDHHQPGDGNCTIYLASLEHERVRFVRR

SEQ ID NO: 6833 - protein, 862 aa, Ralstonia solanacearum
MRLDKLTTRFQEALADAQSLALGNDNPYIEPLHLLLAMLRQPDGATKNLLARAGVNAKGLEIALDNAIKRLPQVQGGEQVQVGRDLGSLLQATEKEGIKRGDQFIASELFLLAVADDKGEAGRVAREHGLARRALEAAIDAVRGGQTVGSAEAESQREALKKYTIDLTEQARIGKLDPVIGRDDEIRRAIQILQRRTKNNPVLIGEPGVGKTAIVEGLAQRIINGEVPESLKNKRVLVLDMAGLLAGAKYRGEFEERLKAVLNDIAKEEGQTILFIDEIHTMVGAGKAEGAIDAGNMLKPALARGELHCIGATTLDEYRKYIEKDAALERRFQKVLVDEPSVEATIAILRGLQEKYELHHGVEITDPAIVAAAELSHRYITDRFLPDKAIDLIDEAAARIKMEIDSKPEAMDKLDRRLIQLKIEREAVKKETDEASQKRLELIEQEIERLQKEYADLEEIWKAEKGAAQGAAAVKEEIDRVKLEIARLQREGKLDKVAELQYGRLPELEGKLKAATAAEASGQRPPNKLLRTQVGAEEIAEVVSRATGIPVSKMMQGERDKLLRMEDRLHERVVGQDEAVRLVSDAIRRSRAGIADENKPYGSFLFLGPTGVGKTELCKALAGFLFDSEEHLIRIDMSEFMEKHSVSRLIGAPPGYVGYEEGGYLTEAVRRKPYSVVLLDEVEKAHPDVFNILLQVLDDGRLTDGQGRTVDFKNTVIVMTSNLGSQLIQQMASESPDVIKGAVWQEVKTHFRPEFLNRIDEVVVFHALDQGHIESIARIQLQRLAARLAHMDLTLEISDPAVAKLASAGYDPVFGARPLKRAIQQQIENPVARMILEGRFTPKDVVPVDYHDGHFTFDRVVR

SEQ ID NO: 6834 - protein, 905 aa, Ralstonia solanacearum
MATPLKTLIAKLNATSRQAAERAASLCMARGNYEVDLEHLFLALLENRRSDFAVAARASGIDPAALQRDLEAEVGRFQTGNTRTPAFSPYLPKLFEHAWLIASLDSQITRIRSGHLLLALLTEPSLAALAERGSRLFGRFEVERLKHDFERMTTGSDEQEQAVDFADGTAVQTDDGRTAPAAALGATPALDQFTVDLTQAAREGRIDPVIGRDAEIRQVVDILMRRRQNNPILTGEAGVGKTAVVEGLALRVAANDVPPPLRGVTLRTLDMGLLQAGASVKGEFENRLKNVIDEVKKSPKPIILFIDEAHTIIGAGGQAGQNDAANLLKPALARGELRTIAATTWSEYKKYFEKDAALARRFQVVKVDEPSEPLAAAMLRGMAPLMERHFGVRVLDEAITEAVRLSHRYISGRQLPDKAVSVLDTACAKVALGQSATPGAIEDDQKLLERLLGEIAALQREQSAGAAHDARLEALQAKRAELEQRIAQNTERLARERALVARIQALREARESDAAQAGAQDAEPVAANSDVVALSPKRARAADAPDELATLLAELRALQGEAPMVPLQVDGHVVSEIVSAWTGIPLGRMVKDELRTVLNLKPLLAARVIGQDHALDAIAQRVRTASANLEDPNKPRGVFLFAGPSGVGKTETALALADILYGGERKLITINMSEYQEAHSVSGLKGSPPGYVGYGEGGVLTEAVRRNPYSVVLLDEVEKAHPDVLEMFFQVFDKGEMDDAEGRPIDFRNTIIILTSNVGSSAIMQACLNQPAEALPDADTLAETLRPVLYKAFKPAFLGRTKVVPYYPIADDVLAEIITLKLGRIRDRVAANHKATFQWDNALVESVLARCTEVDAGARAVDHILNGTLLPEIAEAVLTRMAEGGSVEKIKVSVGKTGEFKYRIN

SEQ ID NO: 6835 - protein, 891 aa, Spinacia oleracea
MAGALIQSTNIPSLAYKVNGQFQRSDKGNKAVKMMASLQDPGYRMRTFSGVRGGNALDTLGTTSECFYSKMRAVLSVRKGTASRGVVRAMFERFTEKAIKVIMLAQEEARRLGHNFVGTEQILLGLIGEGTGIAAKVLKSMGINLKDARVEVEKIIGRGSGFVAVEIPFTPRAKRVLELSLEEARQLGHNYIGSEHLLLGLLREGEGVAARVLENLGADPSNIRTQVIRMVGENTEAVGAGVGGGTTGNKMPTLEEYGTNLTKLAEEGKLDPVVGRQAQIERVTQILGRRTKNNPCLIGEPGVGKTAIAEGLAQRIATGDVPETIEGKKVITLHMGLLVAGTKYRGEFEERLKKLMEEIKQSDEIILFIDEVHTLIGAGAAEGAIDRANILKPRFRRGELQCIGATTLDEYRKHIEKDPALERRFQPVKVPEPTVDETIQILKGLRERYEIHHKLRYTDEALVAAAQLSYQYISDRFLPDKAIDLIDEAGSRVLPSSLKKLESWLQHEKELRQLTKEKNEAVRGQDFEKAGELRDREMDLKAQISALVEKKKEMSKAETEAGDVGPMVTESDIQHIVSSWTGIPVEKVSTDESDRLLKMEDTLHTRVIGQDEAVKAISRAIRRARVGLKNPNRPIASFIFSGPTGVGKSELAKALAAYYFGSEEAMIRLDMSEFMERHTVSKLIGSPPGYVGYTEGGQLTEAVRRRPYTVVLFDEIEKAHPDVFNMMLQILEDGRLTDSKGRTADFKNTLLIMTSNVGSSVIEKGGRRIGFDLDYDEKDSSYNRIKSLVTEELKQYFRPEFLNRLDEMIVFRQLTKLEVKEIADIMLKEVFGRLKNKEIELQVTERFRDRVVDEGYNPSYGARPLRRAIMRLLEDSMAEKMLARKSKRVIQ

SEQ ID NO: 6836 - protein, 857 aa, Rickettsia sibirica
MNIDKFTAHAKSVIASSQSLAAKNDHQQILPLHLLSSLLSEETGIIQTLINNTGGNINLLKDQVQLELNKIPKVQVEGGGQVYSSAEALKVLEKASSIAKDSGDSFVTIERIFEALTYDNTIAGKILTNNGINNKKIATAILQFRKGKKADTESAENSYDALKKYGRDVTELAESGKLDPIIGRDEEIRRTVQVLSRRMKNNPVLIGEPGVGKTAIIEGLAQRIFSKDVPESLINCRIIELDMGALIAGAKYRGEFEERLKAVLSEIKESSGEIILFIDELHLLVGTGKTDGAMDASNLLKPMLARGELHCIGATTLDEYRKYIEKDAALARRFQPVYVSEPTVEDTISILRGIKEKYELHHAVRISDSAIVAAATLSNRYITDRYLPDKAIDLIDEACSRMKIELSSKPEELDELDRRIIQIKVELAALKKENDEHSKKKIEHLTTALEKLESQSYDMGAKWQAEKAKLQQTQKLKEELDRSRNELERAERDANLAKASELKYGIIPEIMKKIQEAESMDNKGLLKEIVSESDIASIISRITGIPIDTMLSSERERLLVMEQKLRESVIGQDKAIKGVSDAVRRSRAGIQDINRPLGSFLFLGPTGVGKTELTKALAGFLFDDRNAILRIDMSEYMEKHAISRLIGAPPGYIGYDQGGVLTEAVRRRPYQVILFDEVEKAHPDIFNIMLQILDEGRLTDSQGITVDFKNTIIVLTSNLGAEILVNQKEDEDTYKVKDEVMEYVKAVFKPEFLNRLDEIILFHRLNRNNIHDIVKIQLESLKKILLAQNIILEFDESALNYLAEKGYDPSFGARPLKRLIQREIQNNLAKMILAGEISSGKTVKINSKDKELKVTIS

SEQ ID NO: 6837 - protein, 906 aa, Plasmodium falciparum 3D7
MTRRYLKYYIFVTLLFFVQVINNVLCAPDNKQEQGKYLNRTINILNAGKNIAKSYGHNKLKPIHILSALAKSDYGSTLFKENNVNAANLKEYIDIALEQTRAGAPLDNKSKIVNSAEVKETLALAEAAANKYKSPKVDVEHLLSGLSNDELVNEIFNEVYLTDEAIKAILKRKFEKTKKDKDGKTGTLYIEQFGSNMNEKVRNGKLQGIYGRDEEIRAIIESLLRYNKNSPVLVGNPGTGKTTIVEGLVYRIEKGDVPKELQGYTVISLNFRKFTSGTSYRGEFETRMKNIIKELKNKKNKIILFVDEIHLLLGAGKAEGGTDAANLLKPVLSKGEIKLIGATTIAEYRKFIESCSAFERRFEKILVEPPSVDMTVKILRSLKSKYENFYGINITDKALVAAAKISDRFIKDRYLPDKAIDLLNKACSFLQVQLSGKPRIIDVTERDIERLSYEISTLEKDVDKVSKKKYNKLIKEFEEKKEQLKKYYEEYVITGERLKRKKEIEKKLNDLKELTQNYVYSNKEPPIELQNSLKEAQQKYLELYKETVAYVEAKTHNAMNVDAVYQEHVSYIYLRDSGMPLGSLSFESSKGALKLYNSLSKSIIGNEDIIKSLSDAVVKAATGMKDPEKPIGTFLFLGPTGVGKTELAKTLAIELFNSKDNLIRVNMSEFTEAHSVSKITGSPPGYVGFSDSGQLTEAVREKPHSVVLFDELEKAHADVFKVLLQILGDGYINDNHRRNIDFSNTIIIMTSNLGAELFKKKLFFDADNSGTPEYKRVMEDVRLSLIKKCKKVFKPEFVNRIDKIGVFEPLNKKNLHKIVALRFKKLEKRLEEKNIQVSVSEKAIDYIIDQSYDPELGARPTLIFIESVIMTKFAIMYLKKELVDDMDVFVDYNSKAKNLVINLSKT

SEQ ID NO: 6838 - protein, 1341 aa, Plasmodium falciparum 3D7
MNVLYIFIAVLILNGILNIHVSKKKTSFLNNTYPINKYKTINIKRHYRKVQNRNNKLYVSLFDEYDEKCIKALIMAREVAKNDNENEILLKHLLIAIIRIDSNLVQNILKNFNISLTNFLDKFHVAINKISKSYTNSNNGHNNIYEQSGSAQNNLNEQEKKNISLTNEEIDMKNILNEEDENQVENRKQNENGNVNGNGNVNENVNENINENEKLLNDFINKHLKDMEEKINILKNLNNEEDNASLDDINNKDYIINDISSSNNITKENNNNNNNNNNNNDKGNFNNLDTNNDSGNLSNNVPKNESHNVLHNHTYKINNNNKMMNQEILGNPNFDIKFSENCKLVLHNAVLEAKRKRKIFVNIIDILLSIINIAQEKKHYDFLKYIEELNININDLKSLLLSYDEKNYDGNNIYDTNANNTNYNTHNRNIPLNNNNNNNNVSNKGYNNQRLNNMNNNEQANHIINSLNNEYLNNGRDYKYNEDHPFSSNNKFLNPSTSSASSISFMKDCLIDMVHEAQEKGDDHFFGRKKEIKRIIEILGRKKKSNPLLIGESGVGKTAIIEYLSYLILKDNVPYHLKNCRIFQLNLGNIVAGTKYRGEFEEKMKHLLSNMNKKKKNILFIDEIHVIVGAGSGEGSLDASNLLKPFLSSDNLQCIGTTTFQEYSKFIENDKALRRRFNCVTINPFTSKETYKLLKKIKYNYEKYHNIYYTDDSLKSIVSLTEDYLPTANFPDKAIDILDEAGVYQKIKYEKFMKQKLRAERLRKIRIHMNTQENNNNNNNNNNNISNNNNDYIISDEDQHIHNNNYGYNNYDVINQQKEFSNDEDINKLNDDDTNLRKTYKQEIDNKIKNDENGNNNIKTDTNGNILINNVESLQNDTYDETRNLIENVHMKYVTSDVIENIVSKKSSITYIKKNKKEEEKILKLKEKLNKIIIGQEKVIDILSKYLFKAITNIKDPNKPIGTLLLCGSSGVGKTLCAQVISKYLFNEDNLIVINMSEYIDKHSVSKLFGSYPGYVGYKEGGELTESVKKKPFSIILFDEIEKAHSEVLHVLLQILDNGLLTDSKGNKVSFKNTFIFMTTNVGSDIITDYFKLYNNNYSNLGFKYYIKKKKNENDINQSKQEEQYLVHTSNGNIENEQNKKYMDPTKQSNENNYESTINHTHTADTKYNNITTDNNNNNNNNNNNNNDHFEIFEEKLRTNKWYDELKPDIEEELKKKFLPEFLNRIDEKIIFRQFLKRDIINILQNMIDDLKKRIKKRKNINLIIDKNVINYICSDENNIYDMNFGARSIRRALYKYIEDPIAAFLISNIHEPNDSIYVQLTNDKKIKVQLIKAPVQQFSS

SEQ ID NO: 6839 - protein, 111 aa, Plasmodium falciparum 3D7
TDAANLLKPVLSKGEIKLIGATTIAEYRKFIESCSAFERRFEKILVEPPSVDMTVKILRSLKSKYENFYGINITDKALVAAAKISDRFIKDRYLPDKAIDLLNKACSFFTS

SEQ ID NO: 6840 - protein, 601 aa, Wigglesworthia glossinidia endosymbiont of Glossina brevipalpis
MNNFYKKKQINIISKFAIDLTNLSQKKKLEAIFEIEKEIFHVIRILQKKTKNNIILTGDKGVGKTSIIKGLSQKIIKKEVPKKLKKYRIFILDIFSIINILEYKGIKYLNYILLEIYKINYPIIFFIDNFNKLIELNLFNKFISINNYLFQKKIKKNFRFILETTTDKYQKYTDQYSNLEKNFQKIFIPEISVKNCIKILNHLKNSYESYYNVKITNKAIITSSILSNNYINNKRLPDKAINIIEEASSLINIDLHYKKNNIDKFKNTNKFSNYVTEKEVIKILSEKTGISAENIVENNYEKFIRIEKDLKKRMIGQDKAVFKILNVVKRNFLGLSNKNKPIGSFLFLGPNGVGKTKICKILSDIIFNKNTDLIYIDMSEFNDKVYSFDVLQYNKNNLEYRFNTCLIKLVEKNPNSLILINEIEKSHIDFFKILLRLLKYGELIDSFGRKINFKNTIIVMNSNIGLDIFQKNYNSSRNISYAKKTVIDMVYHYFNFNLINEIDDIVFFKPLDNISLEKIIYKNINLFKNKLEKKGYLFEITSSVISYIRKLGFNPSYGANNFKKIIEKKIINPISDEIMCKNFNIGHNIFVDIKFNKIEIK

SEQ ID NO: 6841 - protein, 911 aa, Arabidopsis thaliana
MNPEKFTHKTNETIATAHELAVNAGHAQFTPLHLAGALISDPTGIFPQAISSAGGENAAQSAERVINQALKKLPSQSPPPDDIPASSSLIKVIRRAQAAQKSRGDTHLAVDQLIMGLLEDSQIRDLLNEVGVATARVKSEVEKLRGKEGKKVESASGDTNFQALKTYGRDLVEQAGKLDPVIGRDEEIRRVVRILSRRTKNNPVLIGEPGVGKTAVVEGLAQRIVKGDVPNSLTDVRLISLDMGALVAGAKYRGEFEERLKSVLKEVEDAEGKVILFIDEIHLVLGAGKTEGSMDAANLFKPMLARGQLRCIGATTLEEYRKYVEKDAAFERRFQQVYVAEPSVPDTISILRGLKEKYEGHHGVRIQDRALINAAQLSARYITGRHLPDKAIDLVDEACANVRVQLDSQPEEIDNLERKRMQLEIELHALEREKDKASKARLIEVRKELDDLRDKLQPLTMKYRKEKERIDEIRRLKQKREELMFSLQEAERRYDLARAADLRYGAIQEVESAIAQLEGTSSEENVMLTENVGPEHIAEVVSRWTGIPVTRLGQNEKERLIGLADRLHKRVVGQNQAVNAVSEAILRSRAGLGRPQQPTGSFLFLGPTGVGKTELAKALAEQLFDDENLLVRIDMSEYMEQHSVSRLIGAPPGYVGHEEGGQLTEAVRRRPYCVILFDEVEKAHVAVFNTLLQVLDDGRLTDGQGRTVDFRNSVIIMTSNLGAEHLLAGLTGKVTMEVARDCVMREVRKHFRPELLNRLDEIVVFDPLSHDQLRKVARLQMKDVAVRLAERGVALAVTDAALDYILAESYDPVYGARPIRRWMEKKVVTELSKMVVREEIDENSTVYIDAGAGDLVYRVESGGLVDASTGKKSDVLIHIANGPKRSDAAQAVKKMRIEEIEDDDNEEMIED

SEQ ID NO: 6842 - protein, 911 aa, Arabidopsis thaliana
MNPEKFTHKTNETIATAHELAVNAGHAQFTPLHLAGALISDPTGIFPQAISSAGGENAAQSAERVINQALKKLPSQSPPPDDIPASSSLIKVIRRAQAAQKSRGDTHLAVDQLIMGLLEDSQIRDLLNEVGVATARVKSEVEKLRGKEGKKVESASGDTNFQALKTYGRDLVEQAGKLDPVIGRDEEIRRVVRILSRRTKNNPVLIGEPGVGKTAVVEGLAQRIVKGDVPNSLTDVRLISLDMGALVAGAKYRGEFEERLKSVLKEVEDAEGKVILFIDEIHLVLGAGKTEGSMDAANLFKPMLARGQLRCIGATTLEEYRKYVEKDAAFERRFQQVYVAEPSVPDTISILRGLKEKYEGHHGVRIQDRALINAAQLSARYITGRHLPDKAIDLVDEACANVRVQLDSQPEEIDNLERKRMQLEIELHALEREKDKASKARLIEVRKELDDLRDKLQPLTMKYRKEKERIDEIRRLKQKREELMFSLQEAERRYDLARAADLRYGAIQEVESAIAQLEGTSSEENVMLTENVGPEHIAEVVSRWTGIPVTRLGQNEKERLIGLADRLHKRVVGQNQAVNAVSEAILRSRAGLGRAQQPTGSFLFLGPTGVGKTELAKALAEQLFDDENLLVRIDMSEYMEQHSVSRLIGAPPGYVGHEEGGQLTEAVRRRPYCVILFDEVEKAHVAVFNTLLQVLDDGRLTDGQGRTVDFRNSVIIMTSNLGAEHLLAGLTGKVTMEVARDCVMREVRKHFRPELLNRLDEIVVFDPLSHDQLRKVARLQMKDVAVRLAERGVALAVTDAALDYILAESYDPVYGARPIRRWMEKKVVTELSKMVVREEIDENSTVYIDAGAGDLVYRVESGGLVDASTGKKSDVLIHIANGPKRSDAAQAVKKMRIEEIEDDDNEEMIED

SEQ ID NO: 6843 - protein, 831 aa, Arabidopsis thaliana
MNDLKFDPNVKLILASARSHAMSLSHGQVTPLHLGVTLISDLTSVFYRAITSAGDGDISAQSVVNVINQSLYKLTKRNLGDTKVGVAVLVISLLEDSQISDVLKEAGVVPEKVKSEVEKLRGEVILRALKTYGTDLVEQAGKLDPVIGRHREIRRVIEVLSRRTKNNPVLIGEPGVGKTAVVEGLAQRILKGDVPINLTGVKLISLEFGAMVAGTTLRGQFEERLKSVLKAVEEAQGKVVLFIDEIHMALGACKASGSTDAAKLLKPMLARGQLRFIGATTLEEYRTHVEKDAAFERRFQQVFVAEPSVPDTISILRGLKEKYEGHHGVRIQDRALVLSAQLSERYITGRRLPDKAIDLVDESCAHVKAQLDIQPEEIDSLERKVMQLEIEIHALEKEKDDKASEARLSEVRKELDDLRDKLEPLTIKYKKEKKIINETRRLKQNRDDLMIALQEAERQHDVPKAAVLKYGAIQEVESAIAKLEKSAKDNVMLTETVGPENIAEVVSRWTGIPVTRLDQNEKKRLISLADKLHERVVGQDEAVKAVAAAILRSRVGLGRPQQPSGSFLFLGPTGVGKTELAKALAEQLFDSENLLVRLDMSEYNDKFSVNKLIGAPPGYYIGHEEGGQLTEPVRRRPYCVVLFDEVEKTHVTVFNTLLQHGRTVDFKNTVIIMTSNLGADHLVSGLTGEMTMQVARDNAMKDAKKHFRPELLNRLDEIVMFHPLSHEHLAKIVQLQVKNVVPIRRWLERKVVTDISMMIVREEIGDDSIVCIDVNEAKTDLVYRIDKNVFVKIEQTLDVVIHSGNKRGRSNDEDHIVTLTKKIKNEVVVID

SEQ ID NO: 6844 - protein, 668 aa, Arabidopsis thaliana
MNDLKFDPNVKLILASARSHAMSLSHGQVTPLHLGVTLISDLTSVFYRAITSAGDGDISAQSVVNVINQSLYKLTKRNLGDTKVGVAVLVISLLEDSQISDVLKEAGVVPEKVKSEVEKLRGEVILRALKTYGTDLVEQAGKLDPVIGRHREIRRVIEVLSRRTKNNPVLIGEPGVGKTAVVEGLAQRILKGDVPINLTGVKLISLEFGAMVAGTTLRGQFEERLKSVLKAVEEAQGKVVLFIDEIHMALGACKASGSTDAAKLLKPMLARGQLRFIGATTLEEYRTHVEKDAAFERRFQQVFVAEPSVPDTISILRGLKEKYEGHHGVRIQDRALVLSAQLSERYITGRRLPDKAIDLVDESCAHVKAQLDIQPEEIDSLERKVMQLEIEIHALEKEKDDKASEARLSEVRKELDDLRDKLEPLTIKYKKEKKIINETRRLKQNRDDLMIALQEAERQHDVPKAAVLKYGAIQEVESAIAKLEKSAKDNVMLTETVGPENIAEVVSRWTGIPVTRLDQNEKKRLISLADKLHERVVGQDEAVKAVAAAILRSRVGLGRPQQPSGSFLFLGPTGVGKTELAKALAEQLFDSENLLVRLDMSEYNDKFSVNKLIGAPPGYYIGHEEGGQLTEPVRRRPYCVVLFDEVEKTHVTVFNTLLQVLEDGRLTD

SEQ ID NO: 6845 - protein, 874 aa, Brassica napus
VAVGNNVLDTLGRSRQSFGGKVRQAMNVPKGKGSRGVVKAMFERFTEKAIKVIMLAQEEARRLGHNFVGTEQILLGLIGEGTGIAAKVLKSMGINLKDARVEVEKIIGRGSGFVAVEIPFTPRAKRVLELSLEEARQLGHNYIGSEHLLLGLLREGEGVAARVLENLGADPSNIRTQVIRMVGENNEVTANVGGGSGTNKMPTLEEYGTNLTKLAEEGKLDPVVGRHPQIERVVQILGRRTKNNPCLIGEPGVGKTAIAEGLAQRIASGVVRETSEGKKVITLDMGLLAAGTKYRGEFEERVKKLMEEIKQSDEIILFIDEVHTLIGAGAAEGAIDAANILKPALARGELQCIGATTLDEYRKHIEKDPALERRFQPVKVPEPTVDETIQILKGLRERYEIHHKLRYTDESLVAAAQLSYQYISDRFLPDRAIDLMDEAGSRVRLRHAQVPEEARELEKELRQITKENEAVRGQDFEKAGTLRDREIELRAEVSAIQAKGKEMSKAESETGDEGPMVTESDIQHIVSSWTGILVEKVSTDESDLLLKMEETLHKRVIGQDEAVKAISRAIRRARVGLKNPNRPIASFIFFGPTGVGKSELAKALAAYYFGCEEAMIRLDMSEFMERHTVSKLIGSPPGYVGYTEPPQLTEAVRRRPYTVVLFDEIEKAHPDVFNMMLQILEDGRLTNSKGRTVDFKNTLLIMTSNVGSSVIEKGGRRIGFDLDYEKDSSYNRIKSLVTQELKQYFRPEFLNRLDEMILFRQLTKLEVKEIADILLQELFERLKKKEVELQVTERFKERVVDEGYNPSYGARPLRRAIMRLLEDSMEEKMLAREIKEGDSVIVDVDSEGKVTVLNGGSGTPTTSLEEQEDSLPVA

SEQ ID NO: 6846 - protein, 911 aa, Glycine max
MNPEKFTHKTNEALASAHELAMSSGHAQLTPIHLAHALISDPNGIFVLAINSAGGGEESARAVERVLNQALKKLPCQSPPPDEVPASTNLVRAIRRAQAAQKSRGDTRLAVDQLILGILEDSQIGDLLKEAGVAVAKVESEVDKLRGKEGKKVESASGDTNFQALKTYGRDLVEQAGKLDPVIGRDEEIRRVVRILSRRTKNNPVLVGEPGVGKTAVVEGLAQRIVRGDVPSNLADVRLIALDMGALVAGAKYRGEFEERLKAVLKEVEEAEGKVILFIDEIHLVLGAGRTEGSMDAANLFKPMLARGQLRCIGATTLEEYRKYVEKDAAFERRFQQVFVAEPSVVDTISILRGLKERYEGHHGVRIQDRALVMAAQLSNRYITGRHLPDKAIDLVDEACANVRVQLDSQPEEIDNLERKRMQLEVELHALEKEKDKASKARLVEVRKELDDLRDKLQPLMMKYRKEKERVDEIRRLKKKREELLFALQEAERRYDLARAADLRYGAIQEVETAIQQLEGSTEENLMLTETVGPEQIAEVVSRWTGIPVTRLGQNEKERLIGLGDRLHSRVVGQDQAVNAVAEAVLRSRAGLGRPQQPTGSFLFLGPTGVGKTELAKALAEQLFDNENQLVRIDMSEYMEQHSVSRLIGAPPGYVGHEEGGQLTEAVRRRPYSVVLFDEVEKAHTSVFNTLLQVLDDGRLTDGQGRTVDFRNTVIIMTSNLGAEHLLSGLSGKCTMQVARDRVMQEVRRQFRPELLNRLDEIVVFDPLSHDQLRKVARLQMKDVASRLAEKGIALAVTDAALDYILSESYDPVYGARPIRRWLEKKVVTELSRMLVREEIDENSTVYIDAGPNGGELVYRVEKNGGVVNPTTGQKSDILIQIPNGHAPKTDAVQAVKKMKIEEIDDDEMEE

SEQ ID NO: 6847 - protein, 911 aa, Glycine max; identical to SEQ ID NO: 6846

SEQ ID NO: 6848 - protein, 465 aa, Glycine max
  unsure (1)..(465): unsure at all Xaa locations
MNPDKFTHKTNEALVSAHEIATSNGHAQFTPLHLASSLISDKDGIFSQALSNAAGEESARAAERVINNALKKLPSQSPLPDEVPASNALVKAIRRAQTLQKKRGDTHLAVDQLILGLLEDSQIAELLNEAGVAASKVKSEVERLRGKEGKKVESATGDSTFQALKTYGRDLVEQAGKLDPVIGRDEEIRRVVRILSRRTKNNPVLIGEPGVGKTAVVEGLAQRIVKGDVPSNLCDVKLIALDMGALVAGAKYRGEFEERLKAVLKEVEDAEGKVILFIDEIHLVLGAGKGEGSMDAANLFKPMLARGQLRCIGATTLEEYRKYVEKDAAFERRFQQVYVAEPSVVDTISILRGLKERYEGHHGVRILDRALVVAAQLSSRYITGRHLPDKAIDLVDEACANVRVQLDSHPEEIDNLERKRMQLEVELHALEKEKDKASKARLVEVRKELDDLRDKLQPLMMKYKX

SEQ ID NO: 6849 - protein, 977 aa, Phaseolus lunatus
MATRRTPTLAKSLFATVTASRTSRSRSARRLFSAITRASETSPNVLSRSQVVDALAANNVASAKFLSLSFTRSFHATNPSLRSAASSQVAQTEFTDMAWEGILGAVDAARISKQQIVESEHLMKALLEQKDGLARRVFTKTGLDNTSVLQATDDFIPKQPKVTGDTTGPVIGSHLSSLLDNARKYKKEMGDEYVSVEHLLLAFHSDKTFGQQLFKNLQLSGITLKDAVQAVRGSQRVTDQNPEGKYEALDKYGNDLTELAKRGKLDPVIGRDDEIRRCIQILSRRTKNNPVIIGEPGVGKTAIAEGLAQRIVRGDVPEPLMNRKLISLDMGSLLAGAKYRGDFEERLKAVLKEVTASNGQIILFIDEIHTVVGAGATSGAMDAGNLLKPMLGRGELRCIGATTLNEYRKYIEKDPALERRFQQVFCSQPSVEDTISILRGLRERYELHHGVKISDSALVSAAVLADRYITERFLPDKAIDLVDEAAAKLKMEITSKPTELDEIDRAILKLEMEKLSLKNDTDKASKERLSKLENDLSLLKQKQKELAEQWDNEKVFMTRIRSIKEEIDRVNLEMEAAERDYDLNRAAELKYGTLMSLQRQLEEAEKNLTDFRKSGKSLLRRRGHYLDITEIVSKWTGIPLSNLQQTEREKLVLLEQVLHNRVVGQDIAVKSVADAIRRSRAGLSDPNRPIASFMFMGPTGVGKTELAKALAGYLFNTENALVRIDMSEYMEKHAVSRLVGAPPGYIGYEEGGQLTEVVRRRPYSVVLFDEIEKAHHDVFNILLQLLDDGRITDSQGRTVSFTNCVVIMTSNIGSHFILETLRSTQDDKTGVYDQMKRQVVELARQTFRPEFMNRIDEYIVFQPLDSEQISKIVELQMERVKNRLKQKKIDLHFTEEAVKHLGVLGFDPNFGARPVKRVIQQLVENEIAMGVLRGDFKEEDSIIVDADVAPSGKERSLNRLLIKKLDSPVADAMVVNH

SEQ ID NO: 6850 - protein, 938 aa, Oryza sativa (indica cultivar-group)
MEVCCCSTSSAVPGRRFAAAGAAAAAVAARWGAVGVGRAVVLAHPLRPAPRGGHAHAQQAGARRARRAVVRAVFERFTERAVKAVVLSQREAKGLGEGAVAPRHLLLGLIAEDRSAGGFLSSGINIERAREECRGIGARDLTPGAPSPSGSGLEMDIPFSGSCKRVFEVAVEFSRNMGCSFISPEHLALALFTLDDPTTNSLLRSLGADPSQLASVALTRLQAELAKDGREPAGASSFKVPKKSPAGAGRSAFSKSLNSKKEKGALDQFCLDLTTQASGGFIDPIIGREEEIERVVQIICRRTKNNPILLGEAGVGKTAIAEGLALRIANGDVPIYLVAKRIMSLDVGLLIAGAKERGELESRVTSLIREVREAGDVILFIDEVHNLIGSGTVGKGKGAGLDIGNLLKPPLARGELQCIAATTLDEHRMHFEKDKALARRFQPVLVEEPSQDDAVKILLGLREKYETYHKCKFTLEAINAAVYLSARYIPDRQLPDKAIDLIDEAGSRARMESFNRKKEGQSSILLKSPDEYWQEIRAAQNMHEVVSSNQMKYSPCQENGSAAIKAPSEDMNELTSELQVEEPIVVGTEEIARVASLWSGIPVQQLTADDRKLLVGLDGELRKRVIGQDDAVMAISRAVKRSRVGLNDPDRPIATLLFCGPTGVGKTELTKALAASYFGSESAMLRLDMSEYMERHTVSKLIGSPPGYIGYGETGTLTEAVRRKPFTVVLLDEIEKAHPDIFNILLQIFEDGHLSDSQGRRVSFKNTLIVMTSNVGSTSISKGRRSMGFMTEDTESSSYVAMKSLVMEELKAFFRPELLNRIDEMVVFRPLEKTQMLAILDIILQEVKGRLLALGIGLEVSDAMKDLICEEGYDKSYGARPLRRAVTHLIEDVISEAILFGEYKPGDTILMDIDAAGKPCMSHLNEKVVQLSDPTRTF

SEQ ID NO: 6851 - protein, 912 aa, Oryza sativa (japonica cultivar-group)
MNPDNFTHKTNEALVAAHEIASEAGHAQLTPLHLVAALAADKGGILRQAISQASGGDAGAPDSFERVVSGALKKLPSQSPPPDSVPASTALIKVIRRAQSAQKKRGDSHLAVDQLLLGLLEDSLISDCLKEAGVSAARVRAELEKLRGGEGRKVESASGDTNFQALKTYGRDLVEQAGKLDPVIGRDEEIRRVVRILSRRTKNNPVLIGEPGVGKTAVVEGLAQRIVRGDVPSNLLDVRLIALDMGALVAGAKYRGEFEERLKAVLKEVEEAEGKVILFIDEIHLVLGAGRTEGSMDAANLFKPMLARGQLRCIGATTLEEYRKYVEKDAAFERRFQQVFVAEPSVPDTISILRGLKEKYEGHHGVRIQDRALVVAAQLSARYIMGRHLPDKAIDLVDEACANVRVQLDSQPEEIDNLERKRIQLEVEHHALEKEKDKASKARLVEVKKELDDLRDKLQPLTMKYRKEKERIDEIRKLKQRREELQFTLQEAERRMDLARVADLKYGALQEIDVAIAKLESETGENLMLTETVGPEQIAEVVSRWTGIPVTRLGQNDKERLVGLADRLHQRVVGQAEAVSAVAEAVLRSRAGLGRPQQPTGSFLFLGPTGVGKTELAKALAEQLFDDENLLVRIDMSEYMEQHSVARLIGAPPGYVGHEEGGQLTEQVRRRPYSVILFDEVEKAHVAVFNTLLQVLDDGRLTDGQGRTVDFRNTVIIMTSNLGAEHLLAGMVGKNSMKVARDLVMQEVRRHFRPELLNRLDEIVIFDPLSHEQLRKVARLQMKDVAVRLAERGVALAVTDAALDVILSLSYDPVYGARPIRRWIEKRVVTQLSKMLIQEEIDENCTVYIDAAPHKDELAYRVDNRGGLVNAETGQKSDILIQVPNGAATGSDAAQAVKKMRIMEDEDGMDEE

SEQ ID NO: 6852 - protein, 912 aa, Oryza sativa (japonica cultivar-group)
MNPDNFTHKTNEALVAAHEIASEAGHAQLTPLHLVAALAADKGGILRQAISQASGGDAGAPDSFERVVSGALKKLPSQSPPPDSVPASTALIKVIRRAQSAQKKRGDSHLAVDQLLLGLLEDSLISDCLKEAGVSAARVRAELEKLRGGEGRKVESASGDTNFQALKTYGRDLVEQAGKLDPVIGRDEEIRRVVRILSRRTKNNPVLIGEPGVGKTAVVEGLAQRIVRGDVPSNLLDVRLIALDMGALVAGAKYRGEFEERLKAVLKEVEEAEGKVILFIDEIHLVLGAGRTEGSMDAANLFKPMLARGQLRCIGATTLEEYRKYVEKDAAFERRFQQVFVAEPSVPDTISILRGLKEKYEGHHGVRIQDRALVVAAQLSARYIMGRHLPDKAIDLVGEARANVRVQLDSQPEEIDNLERKRIQLEVEHHALEKEKDKASKARLVEVKKELDDLRDKLQPLTMKYRKEKERIDEIRKLKQRREELQFTLQEAERRMDLARVADLKYGALQEIDVAIAKLESETGENLMLTETVGPEQIAEVVSRWTGIPVTRLGQNDEERLVGLADRLHQRVVGQAEAVSAVAEAVLRSRAGLGRPQQPTGSFLFLGPTGVGKTELAKALAEQLFDDENLLVRIDMSEYMEQHSVARLIGAPPGYVGHEEGGQLTEQVRRRPYSVILYDEVEKAHVAVFNTLLQVLDDGRLTDGQGRTVDFRNTVIIMTSNLGAEHLLAGMVGKNSMKVARDLVMQEVRRHFRPELLNRLDEIVIFDPLSHEQLRKVARLQMKDVAVRLAGRGVALAVTDAALDVILSLSYDPVYGARPIRRWIEKRVVTQLSKMLIQEEIDENCTVYIDAAPHKDELAYRVDNRGGLVNAETGQKSDILIQVPNGAATGSDAAQAVKKMRIMEDEDGMDEE

SEQ ID NO: 6853 - protein, 909 aa, Nicotiana tabacum
MNPEKFTHKTNEALAGALELALSAGHAQFTPLHMAVALISDHNGIFRQAIVNAGGNEEVANSVERVLNQAMKKLPSQTPAPDEIPPSTSLIKVLRRAQSSQKSRGDSHLAVDQLILGLLEDSQIGDLLKEAGVSASRVKSEVEKLRGKEGRKVESASGDTTFQALNTYGRDLVEQAGKLDPVIGRDEEIRRVVRILSRRTKNNPVLIGEPGVGKTAVVEGLAQRIVRGDVPSNLADVRLIALDMGALVAGAKYRGEFEERLKAVLKEVEEAEGKVILFIDEIHLVLGAGRTEGSMDAANLFKPMLARGQLRCIGATTLEEYRKYVEKDAAFERRFQQVYVAEPSVADTISILRGLKERYEGHHGVKIQDRALVVAAQLSSRYITGRHLPDKAIDLVDEACANVRVQLDSQPEEIDNLERKRIQLEVELHALEKEKDKASKARLIEVRKELDDLRDKLQPLMMRYKKEKERIDELRRLKQKRDELIYALQEAERRYDLARAADLRYGAIQEVETAIANLESTSAESTMLTETVGPDQIAEVVSRWTGIPVSRLGQNEKEKLIGLGDRLHQRVVGQDHAVRAVAEAVLRSRAGLGRPQQPTGSFLFLGPTGVGKTELAKALAEQLFDDDKLMIRIDMSEYMEQHSVSRLIGAPPGYVGHDEGGQLTEAVRRRPYSVVLFDEVEKAHPAVFNTLLQVLDDGRLTDGQGRTVDFTNSVIIMTSNLGAEYLLSGLMGKCTMETAREMVMQEVRKQFKPELLNRLDEIVVFDPLSHKQLRQVCRYQMKDVALRLAERGIALGVTEAAPDVILTESYDPVYGARPIRRWLERKVVTELSKMLVKEEIDENSTVYIDAGVSGKDLTYRVEKNGGLVNAATGQKSDILIQLPNGPRSDAVQAVKKMRIEEIEDDEMED

SEQ ID NO: 6854 - protein, 914 aa, Oryza sativa
  unsure (1)..(914): unsure at all Xaa locations
MNPDNFTHKTNEALVAAHEIASEAGHAQXTPLHLVAALAADKGGILRQAISQASGGDAGAPDSFERVVSGALKKLPSQSPPPDSVPASTALIKVIRRAQSAQKKRGDSHLAVDQLLLGLLEDSLISDCLKEAGVSAARVRAELEKLRGGEGRKVESASGDTNFQALKTYGRDLVEQAGKLDPVIGRDEEIRRVVRILSRRTKNNPVLIGEPGVGKTAVVEGLAQRIVRGDVPSNLLDVRLIALDMGALVAGAKYRGEFEERLKAVLKEVEEAEGKVILFIDEIHLVLGAGRTEGSMDAANLFKPMLARGQLRCIGATTLEEYRKYVEKDAAFERRFQQVFVAEPSVPDTISILRGLKEKYEGHHGVRIQDRALVVAAQLSARYIMGRHLPDKAIDLVDEACANVRVQLDSQPEEIDNLERKRIQLEVEHHALEKEKDKASKARLVEVKKELDDLRDKLQPLTMKYRKEKERIDEIRKLKQRREELQFTLQEAERRMDLARVADLKYGALQEIDVAIAKLESETGENLMLTETVGPEQIAEVVSRWTGIPVTRLGQNDKERLVGLADRLHQRVVGQAEAVSAVAEAVLRSRAGLGRPQQPTGSFLFLGPTGVGKTELAKALAEQLFDDENLLVRIDMSEYMEQHSVARLIGAPPGYVGHEEGGQLTEQVRRRPYSVILFDEVEKAHVAVFNTLLQVLDDGRLTDGQGRTVDFRNTVIIMTSNLGAEHLLAGMVGKNSMKVARDLVMQEVRRHFRPELLNRLDQXIVIFDPLSHEQLRKFARLQMKDVAVRLAERVVALAXVTDAALDVILSLSYDPVYGARPIRRWIEKRVVTQLSKMLIQEEIDENCTVYIDAAPHKDELAYRVDNRGGLVNAETGQKSDILIQVPNGAATGSDAAQAVKKMRIMEDEDGMDEE

SEQ ID NO: 6855 - protein, 918 aa, Triticum aestivum
MNPDNFTHKTNEALVAAHEAASEAGHAQITPLHLAAALAADKSGILRQAVAGASGGNASAGDSFERVLSGALKKLPSQSPPPDSVPASTALIKAIRRAQSAQKKRGDSHLAVDQLLMGLLEDAQIADCLKEAGVSASRVRAELEKLRGGDNSRKVESASGDTNFQALKTYGRDLVEVAGKLDPVIGRDEEIRRVVRILSRRTKNNPVLIGEPGVGKTAVVEGLAQRVVRGDVPSNLLDVRLVALDMGALVAGAKYRGEFEERLKAVLKEVEEAEGKVILFIDEIHLVLGAGRTEGSMDAANLFKPMLARGQLRCIGATTLEEYRKYVEKDAAFERRFQQVYVAEPSVADTISILRGLKEKYEGHHGVRIQDRAIVVAAQLSARYIMGRHLPDKAIDLVDEACANVRVQLDSQPEEIDNLERKRIQLEVELHALEKEKDKASKARLVEVRKELDDLRDKLQPLTMKYRKEKERIDEIRKLKQRREELQFTLQEAERRMDLARVADLKYGALQEIDAAIAKLEGETGENLMLTETVGPEQIAEVVSRWTGIPVTRLGQNDKERLVGMADRLHTRVVGQTEAVNAVAEAVLRSRAGLGRPQQPTGSFLFLGPTGVGKTELAKALAEQLFDDENLLVRIDMSEYMEQHSVARLIGAPPGYVGHEEGGQLTEQVRRRPYSVILFDEVEKAHVAVFNTLLQVLDDGRLTDGQGRTVDFRNTVIIMTSNLGAEHLLAGMVGKNSMKVARDLVMQEVRRHFRPELLNRLDEIVVFDPLSHEQLRKVARLQMKDVAVRLAERGVALAVTDAALDVILSLAYDPVYGARPIRRWIEKRVVTQLSKMLIQEEIDENCTVYIDAANKDELAYRVDRSGGLVNAETGQRSDILIQVPNGALGGGKGGEAAKAVKKMRVMEDGDEDGMDEDV

SEQ ID NO: 6856 - protein, 918 aa, Triticum aestivum; identical to SEQ ID NO: 6855

SEQ ID NO: 6857 - protein, 918 aa, Triticum aestivum
MNPDNFTHKTNEALVAAHEAASEAGHAQITPLHLAAALAADKSGILRQAVAGASGGNASAGDSFERVLAGALRKLPSQSPPPDSVPASTALIKAIRRAQSAQKKRGDSHLAVDQLLMGLLEDAQIADCLKEAGVSASRVRAELDKLRGGDNSRKVESAFGDTTFQALKTYGRDLVEVAGKLDPVIGRDEEIRRVVRILSRRTKNNPVLIGEPGVGKTAVVEGLAQRVVRGDVPSNLLDVRLVALDMGALVAGAKYRGEFEERLKAVLKEVEEADGKVILFIDEIHLVLGAGRTEGSMDAANLFKPMLARGQLRCIGATTLEEYRKYVEKDAAFERRFQQVYVAEPSVADTISILRGLKEKYEGHHGVRIQDRAIVVAAQLSARYIMGRHLPDKAIDLVDEACANVRVQLDSQPEEIDNLERKRIQLEVELHALEKEKDKASKARLVEVRKELDDLRDKLQPLTMKYRKEKERIDEIRKLKQRREELQFTLQEAERRMDLARVADLKYGALQEIDAAIAKLEGETGENLMLTETVGPEQIAEVVSRWTGIPVTRLGQNDKERLVGMADRLHTRVVGQTEAVNAVAEAVLRSRAGLGRPQQPTGSFLFLGPTGVGKTELAKALAEQLFDDENLLVRIDMSEYMEQHSVARLIGAPPGYVGHEEGGQLTEQVRRRPYSVILFDEVEKAHVAVFNTLLQVLDDGRLTDGQGRTVDFRNTVIIMTSNLGAEHLLAGMVGKNSMKVARDLVMQEVRRHFRPELLNRLDEMVIFDPLSHEQLRKVARLQMKDVAVRLAERGVALAVTDAALDVILSLAYDPVYGARPIRRWIEKRVVTQLSKMLIQEEIDENCTVYIDAADKDELAYRVDRSGGLVNAETGQRSDILIQVPNGALGGGGGGEAAKAVKKMRVMEDGDEDGMDEDV

SEQ ID NO: 6858 - protein, 918 aa, Triticum aestivum; identical to SEQ ID NO: 6857

SEQ ID NO: 6859 - protein, 913 aa, Triticum aestivum
MNPDKFTHKTNEALAAAHEMASEAGHAQLTPLHLAAALAADRSGILRQAIAHASGGNDAAAESFERVASAALKRLPSQSPPPDTVPASTSLVKAVRRAQSAQKSRGDSHLAVDQLLMGLLEDPQISDALKEAGISAARVKAEVEKLRGGDNRRVESASGDTNFQALKTYGRDLVEVAGKLDPVIGRDEEIRRVVRILSRRTKNNPVLIGEPGVGKTAVVEGLAQRVVRGDVPSNLLDVRLVALDMGALVAGAKYRGEFEERLKAVLKEVEEAEGKVILFIDEIHLVLGAGRTEGSMDAANLFKPMLARGQLRCIGATTLEEYRKYVEKDAAFERRFQQVFVAEPSVPDTVSILRGLKEKYEGHHGVRIQDRALVIAAQLSSRYIMGRHLPDKAIDLVDEACANVRVQLDSQPEEIDNLERKRIQLEVELHALEKEKDKASKARLVDVRKELDDLRDKLQPLQMKYRKEKERIDEIRSLKQRREELQFTLQEAERRMDLARVADLRYGALQEVDAAIAKLEGETGENLMLTETVGPDQIAEVVSRWTGIPVTRLGQNEKARLIGLADRLHQRVVGQYEAVNAVGEAVLRSRAGLGRPQQPTGSFLFLGPTGVGKTELAKALAEQLFDDENLLVRIDMSEYMEQHSVARLIGAPPGYVGHEEGGQLTEQVRRRPYSVILFDEVEKAHVAVFNTLLQVLDDGRLTDGQGRTVDFRNTVIIMTSNLGAEHLLAGMVGNSMKVARDLVMQEVRRHFRPELLNRLDEIVIFDPLSHEQLRKVARLQMKDVAVRLAERGVALAVTDAALDVILSLSYDPVYGARPIRRWIEKRIVTELSKMLIREEIDENSTVYIDAAPSKDELTYGVDKHGGLVNARTGHKSDILIQVPSGAVGGDAAHAVKKMKIMQDSGEVDDMEEE

SEQ ID NO: 6860 - protein, 913 aa, Triticum aestivum; identical to SEQ ID NO: 6859

SEQ ID NO: 6861 - protein, 410 aa, Triticum aestivum
  unsure (1)..(410): unsure at all Xaa locations
XKDAAFERRFQQVFVAEPSVPDTVSILRGLKEKYEGHHGVRIQDRALVIAAQLSSRYIMGRHLPDKAIDLVDEACANVRVQLDSQPEEIDNLERKRIQLEVELHALEKEKDKASKARLVDVRKELDDLRDKLQPLQMKYRKEKERIDEIRSLKQRREELQFTLQEAERRMDLARVADLRYGALQEVDAAIAKLEGETGENLMLTETVGPDQIAEVVSRWTGIPVTRLGQNEEARLIGLADRLHQRVVGQYEAVNAVGEAVLRSRAGLGRPQQPTGSFLFLGPTGVGKTELAKALAEQLFDDENLLVRIDMSEYMEQHSVARLIGAPPGYVGHEEGGQLTEQVRRRPYSVILFDEVEKAHVAVFNTLLQVLDTGXLTDGXGRTVDFRNTVIIMTSNLGAEHLLAGXMVGNS

SEQ ID NO: 6862 - protein, 770 aa, Lactobacillus rhamnosus
MCWSGFDQCIQGPYTQVSGPANAFRKAARILFILTCSPPPPLFPRIFPTRRNSTMANFNDPFFNHDMDDVFNQMLQGMGKGESARYVVNGHEMTPDEFAQYRATGQLPKQGDEIPVETTGEQAVKKGGILEKLGRNLTQEAKDGLLDPVIGRDHEIQETAEILSRRTKNNPILVGDAGVGKTAVVEGLAQAIVKGNVPESIKDKQIWSIDLSNLEAGTQYRGSFEEKIQNLIKEVKAAGNVILFFDEIHQILGAGATGGEESDGKGLADIIKPALSRGEITVIGATTQDEYRNTIMKDSALARRFNDVTINEPSAADTVKILEGVKKLYEQHHHVQLPENVLKAAVDYSIQYIPQRSLPDKAIDLIDMTAAHLASKHPIVDKVELEKQIKDLNAQKDAAAKAEDFEKAANLKKEIADKQHQLEGTNNEKPVVATPNDVAAAVERLTGIPVSKLGASDIERLKGIGKRLKGKVIGQDEAVDMVARAIRRNRAGFDEGNRPIGSFLFVGPTGVGKTELAKQLALDLFGSKDAIIRLDMSEYSDRTAVSKLIGTSAGYVGYNDNKNTLTEQVRRNPYSIVLLDEIEKADPQVLTLLLQVLDDGRLTDGQGNVVDFKNTVIIATSNAGFGNEALTGEKEKDEDLMKRLAPYFRPEFLNRFNGIVEFSHLTKNDLGKIVDLMLEDVNKTLAKKGITLTVTDAAKDWLIAQGYDEAMGARPLRRVIERNIRDKVTDFYLDHLKAKKLQADLIDGAIIVSEVQPASDKPKKEASGAK

SEQ ID NO: 6863 - protein, 220 aa, Phycomyces blakesleeanus
IREELKPLKLRYDMDKGRLDEIRDLKQKLDELKRKAVEARNRYDLDSAADIEYYAIPDVEQRINALSAEKQRKMAEQMANDTAGQASTTGQLVSEIVRPEQIMEVISRWTGIPVQNLAKSEREKLLHMEAEIGKKVVGQKRAIESVCDAIRLSKAGLQNPTKPLASFMFLGPTGVGKTLLCKTLAEFLFNDERAMIRIDMSELMEQHSVAKLIGAPPGSV

SEQ ID NO: 6864 - protein, 905 aa, Schizosaccharomyces pombe
MADYPFTDKAAKTLSDAYSIAQSYGHSQLTPIHIAAALLSDSDSNGTTLLRTIVDKAGGDGQKFERSVTSRLVRLPAQDPPPEQVTLSPESAKLLRNAHELQKTQKDSYIAQDHFIAVFTKDDTLKSLLAEAGVTPKAFEFAVNNVRGNKRIDSKNAEEGFDALNKFTVDLTELARNGQLDPVIGREDEIRRTIRVLSRRTKNNPVLIGEPGVGKTSIAEGLARRIIDDDVPANLSNCKLLSLDVGSLVAGSKFRGEFEERIKSVLKEVEESETPIILFVDEMHLLMGAGSGGEGGMDAANLLKPMLARGKLHCIGATTLAEYKKYIEKDAAFERRFQIILVKEPSIEDTISILRGLKEKYEVHHGVTISDRALVTAAHLASRYLTSRRLPDSAIDLVDEAAAAVRVTRESQPEVLDNLERKLRQLRVEIRALEREKDEASKERLKAARKEAEQVEEETRPIREKYELEKSRGSELQDAKRRLDELKAKAEDAERRNDFTLAADLKYYGIPDLQKRIEYLEQQKRKADAEAIANAQPGSEPLLIDVVGPDQINEIVARWTGIPVTRLKTTEKERLLNMEKVLSKQVIGQNEAVTAVANAIRLSRAGLSDPNQPIASFLFCGPSGTGKTLLTKALASFMFDDENAMIRIDMSEYMEKHSVSRLIGAPPGYVGHEAGGQLTEQLRRRPYSVILFDEIEKAAPEVLTVLLQVLDDGRITSGQGQVVDAKNAVIIMTSNLGAEYLTTDNESDDGKIDSTTREMVMNSIRGFFRPEFLNRISSIVIFNRLRRVDIRNIVENRILEVQKRLQSNHRSIKIEVSDEAKDLLGSAGYSPAYGARPLNRVIQNQVLNPMAVLILNGQLRDKETAHVVVQNGKIFVKPNHEANANGSADIDMDGIDDDVNDEELE

SEQ ID NO: 6865 - protein, 908 aa, Saccharomyces cerevisiae
MNDQTQFTERALTILTLAQKLASDHQHPQLQPIHILAAFIETPEDGSVPYLQNLIEKGRYDYDLFKKVVNRNLVRIPQQQPAPAEITPSYALGKVLQDAAKIQKQQKDSFIAQDHILFALFNDSSIQQIFKEAQVDIEAIKQQALELRGNTRIDSRGADTNTPLEYLSKYAIDMTEQARQGKLDPVIGREEEIRSTIRVLARRIKSNPCLIGEPGIGKTAIIEGVAQRIIDDDVPTILQGAKLFSLDLAALTAGAKYKGDFEERFKGVLKEIEESKTLIVLFIDEIHMLMGNGKDDAANILKPALSRGQLKVIGATTNNEYRSIVEKDGAFERRFQKIEVAEPSVRQTVAILRGLQPKYEIHHGVRILDSALVTAAQLAKRYLPYRRLPDSALDLVDISCAGVAVARDSKPEELDSKERQLQLIQVEIKALERDEDADSTTKDRLKLARQKEASLQEELEPLRQRYNEEKHGHEELTQAKKKLDELENKALDAERRYDTATAADLRYFAIPDIKKQIEKLEDQVAEEERRAGANSMIQNVVDSDTISETAARLTGIPVKKLSESENEKLIHMERDLSSEVVGQMDAIKAVSNAVRLSRSGLANPRQPASFLFLGLSGSGKTELAKKVAGFLFNDEDMMIRVDCSELSEKYAVSKLLGTTAGYVGYDEGGFLTNQLQYKPYSVLLFDEVEKAHPDVLTVMLQMLDDGRITSGQGKTIDCSNCIVIMTSNLGAEFINSQQGSKIQESTKNLVMGAVRQHFRPEFLNRISSIVIFNKLSRKAIHKIVDIRLKEIEERFEQNDKHYKLNLTQEAKDFLAKYGYSDDMGARPLNRLIQNEILNKLALRILKNEIKDKETVNVVLKKGKSRDENVPEEAEECLEVLPNHEATIGADTLGDDDNEDSMEIDDDLD

SEQ ID NO: 6866 - protein, 908 aa, Saccharomyces cerevisiae
MNDQTQFTERALTILTLAQKLASDHQHPQLQPIHILAAFIETPEDGSVPYLQNLIEKGRYDYDLFKKVVNRNLVRIPQQQPAPAEITPSYALGKVLQDAAKIQKQQKDSFIAQDHILFALFNDSSIQQIFKEAQVDIEAIKQQALELRGNTRIDSRGADTNTPLEYLSKYAIDMTEQARQGKLDPVIGREEEIRSTIRVLARRIKSNPCLIGEPGIGKTAIIEGVAQRIIDDDVPIILQGAKLFSLDLAALTAGAKYKGDFEERFKGVLKEIEESKTLIVLFIDEIHMLMGNGKDDAANILKPALSRGQLKVIGATTNNEYRSIVEKDGAFERRFQKIEVAEPSVRQTVAILRGLQPKYEIHHGVRILDSALVTAAQLAKRYLPYRRLPDSALDLVDISCAGVAVARDSKPEELDSKEQSIAIDSSRDKSSRERVECRLHTKRKLKLARQKEASLQEELEPLRQRYNEEKHGHEELTQAKKKLDELENKALVAERRYDTRTAADLRYFAIPDIKKQIEKLEDQVAEEERRAGANSMIQNVVDSDTISETAARLTGIPVKKLSESENEKLIHMERDLSSEVVGQMDAIKAVSNAVRLSRSGLANPRQPASFLFLGLSGSGKTELAKKVAGFLFNDEDMMIRVDCSELSEKYAVSKLLGTTAGYVGYDEGGFLTNQLQYKPYSVLLFDEVEKAHPDVLTVMLQMLDDGRITSGQGKTIDCSNCIVIMTSNLGAEFINSQQGSKIQESTKNLVMGAVRQHFRPEFLNRISSIVIFNKLSRKAIHKIVDIRLKEIEERFEQNDKHYKLNLTQEAKDFLAKYGYSDDMGARPLNRLIQNEILNKLALRILKNEIKDKETVNVVLKKGKSRDENVPEEAEECLEVLPNHEATIGADTLGDDDNEDSMEIDDDLD

SEQ ID NO: 6867 - protein, 811 aa, Saccharomyces cerevisiae
MLRQATKAPIQKYLQRTQLLRRSTPRIYTIVQCKRSICSFNARPRVANKLLSDIKTNALNEVAISTCALKSSYGLPNFKRTYVQMRMDPNQQPEKPALEQFGTNLTKLARDGKLDPVIGRDEEIARAIQILSRRTKNNPCLIGRAGVGKTALIDGLAQRIVAGEVPDSLKDKDLVALDLGSLIAGAKYRGEFEERLKKVLEEIDKANGKVIVFIDEVHMLLGLGKTDGSMDASNILKPKLARGLRCISATTLDEFKIIEKDPALSRRFQPILLNEPSVSDTISILRGLKERYEVHHGVRITDTALVSAAVLSNRYITDRFLPDKAIDLVDEACAVLRLQHESKPDEIQKLDRAIMKIQIELESLKKETDPVSVERREALEKDLEMKNDELNRLTKIWDAERAEIESIKNAKANLEQARIELEKCQREGDYTKASELRYSRIPDLEKKVALSEKSKDGDKVNLLHDSVTSDDISKVVAKMTGIPTETVMKGDKDRLLYMENSLKERVVGQDEAIAAISDAVRLQRAGLTSEKRPIASFMFLGPTGTGKTELTKALAEFLFDDESNVIRFDMSEFQEKHTVSRLIGAPPGYVLSESGGQLTEAVRRKPYAVVLFDEFEKAHPDVSKLLLQVLDEGKLTDSLGHHVDFRNTIIVMTSNIGQDILLNDTKLGDDGKIDTATKNKVIEAMKRSYPPEFINRIDDILVFNRLSKKVLRSIVDIRIAEIQDRLAEKRMKIDLTDEAKDWLTDKGYDQLYGARPLNRLIHRQILNSMATFLLKGQIRNGETVRVVVKDTKLVVLPNHEEGEVVEEEAEK

SEQ ID NO: 6868 - protein, 811 aa, Saccharomyces cerevisiae
MLRQATKAPIQKYLQRTQLLRRSTPRIYTIVQCKRSICSFNARPRVANKLLSDIKTNALNEVAISTCALKSSYGLPNFKRTYVQMRMDPNQQPEKPALEQFGTNLKKLARDGKLDPVIGRDEEIARAIQILSRRTKNNPCLIGRAGVGKTALIDGLAQRIVAGEVPDSLKDKDLVALDLGSLIAGAKYRGEFEERLKKVLEEIDKANGKVIVFIDEVHMLLGLGKTDGSMDASNILKPKLARGLACISATTLDEFKIIEKDPALSRRFQPILLNEPSVSDTISILRGLKERYEVHHGVRITDTALVSAAVLSNRYITDRFLPDKAIDLVDEACAVLRLQHESKPDEIQKLDRAIMKIQIELESLKKETDPVSVERREALEKDLEMKNDELNRLTKIWDAERAEIESIKNAKANLEQARIELEKCQREGVYTKASELRYSRIPDLEKKVALSEKSKDGDKVNLLHDSVTSDDISKVVAKMTGIPTETVMKGDKDRLLYMENSLKERVVGQDEAIAAISDAVRLQRAGLTSEKRPIASFMFLGPTGTGKTKLTKALAEFLFDDESNVIRFDMSEFQEKHTVSRLIGAPPGYVLSESGGQLTEAVRRKPYPVVLFDEFEKAHPDVSKLLLQVLDEGKLTDSLGHHVDFRNTIIVMTSNIGQDILLNDTKLGDDGKIDTATKNKVIEAMKRSYPPEFINRIDDILVFNRLSKKVLRSIVDIRIAEIQDRLAEKRMKIDLTDEAKDWLTDKGYDQLYGARPLNRLIHRQILNSMATFLLKGQIRNGETVRVVVKDTKLVVLPNHEEGEVVEEEAEK

SEQ ID NO: 6869 - protein, 120 aa, Debaryomyces hansenii
LMGDGKSDAANLLKPMLARGTLHCIGATTFTEYRKFISKDGAFERRFQKIDVPASTVPETVAILRGLQPRYEIHHGVRILDSALVTAAQLASRYLTYRSLPDSAVDLIDETAATVAVARD

SEQ ID NO: 6870 - protein, 870 aa, Pleurotus sajor-caju
MIQEKRSNRSGGGLGDASSRSQSLFHSAISKAGGDPAVVKRGYRRAVVRLPTQDPPPEEVYFSGPALKVLREGQSLQKTMHDSYIAQDHLLLAALKDATIQAVIKEAGLTEATLKTAIEQARGNRRIESKTAEQGFDALQKYAVDLTALAEEGPIDPVIGRDNEIRPVIRILCRRTKNNPVLIGEPGVGKTSIAEGLAQRIVKRDVPASLISRLYSLDMGALMAGAKYKGEYEERIKAVLNEVEKASEDGGPGVILFVDELHLIMAGRGAEGGGMDAANLFKPLLARGKLRCIGHDLRISKYIETDAALERRFAQVLVNEPSVLETISILRGIREKYEVHHGVRILDGALIQAATLAHRYLTSRGLPDAAIDLVDEACASVRVNRETEPEAIDKLQRKRLELEIEIHALEAPRAREGCCKRSVSKLPKKAISDVDEELQPRQAAFQAEKMRGDELNVLRRKMDELKAKIEEAERRRTLPPASDLKFYAVPEVQARIEQLEAKKAARASTGSAADVVTPEAIADIVGRWTNIPVSRLMSSEKEKLLRMERILTENVVGQPEAVKRVANPIRLSRSGPANAQRPIASFLFAGPSGSFLFAGPSGTGKTLLSKTLATLLFDSPDAMIRIDGSEYSEKHSIARLIGAPPGYIGHDAGGQLTEYVRRKPYSIILIDEIEKACREFVTLFLQVLDDGRLTDGQGRVVDFRNSVIIMTSNLGAAYLNDMGDGPVRPETRTLVMGAIQGHFPPEFVNRIDEIVIFRALSQKNVLKIVDIRLKEVLERLAERKITIDIDDVAKSYLSSAGYSPAYGARPLNRAIQSELLNPLSIMILSEQVRFDGPHNRLNIIPNHEATETQGMDVDYDDDDIEIEEMD

SEQ ID NO: 6871 - protein, 807 aa, Leptosphaeria maculans
MLTTKARLSARHLITHGTVQLPSRPLLPCAAITLRAHQDPVPRQQLLGPTRSYMNTTRPQQPCLIQPRITSRGYANGRPHPPGGTHRMNMGGEPEKPALEQYGIDLTERARDGKLDPVIGRDGEIQRTIQILSRRTKNNPVLIGKAGTGKTAILEGLAQRIVKGDVPESIKDKRVISLDLGSLIAGAKFRGDFEERLKSVLKEVEEAKKGVILFVDELHTLLGLGKAEGSIDASNLLKPALSRGELQLCGATTLSEYRQIEKDAALARRFQPIQVGEPTVQDTISILRGIKERYEVHHGVRITDNALVAAASYSNRYITDRFLPDKAIDLVDEAASALRLQQESKPDAIQELDRQIMTIQIELESLRKETDIASKERRQRLEESLKQKQEEAKGLTEKWEKERAELEEIKNAQENLEKARLELEQARREGNFAKAGELQYSRIPELIEKLPKDEELVAGASRPDSLLHDSVTADDIASVVSRTTGIPLSKLNSGESEKLIHMEETLRQFVKGQDEALTAVANAIRLQRAGLSGENRPIASFMMLGPTGVGKTEVCKRLAEYLFSTPQAVIRFDMSEFSEKHTVSRLIGSPAGYVGYEDAGQLTEAVRRKPYAVLLFDEWEKAHKDISTLLLQVLDEGFLTDAQGHKVDFRNTIIVMTSNLGADIIVGDDALRSGNQDSGEISSDVRNAVMDIVSATYPPEFLNRLDEFIIFRRLSREALRDIVDIRLKELQQRLDDRRITLDCPDEAKQWLCDRGYDPKYGARPLNRLIAREIGNGLADKIIRGEIRSGDTAKIGVKSDGSGLEVTA

SEQ ID NO: 6872 - protein, 927 aa, Neurospora crassa
MTSKMEFTDRAKKALEDAMALAEQYAHSQLLPVHLAVALLDPLPDPSKDQQNAPAGATSSLFRQVIERAHGDPQLFDRALKKALVRLPSQDPPPDHVSMAPSFHTVLRKANELQKTQKDTYIAVDHLITALAEEPSIMNALKEANIPKPKLVTDAIQAIRGTKRVDSRNADTEEEHENLAKFTIDMTAMAREGKIDPVIGREEEIRRVIRILSRRTKNNPVLIGEPGVGKTTVVEGLAQRIVNADVPDNLANCKLLSLDVGALVAGSKYRGEFEERMKGVLKEISESKEMIILFIDEIHLLMGAGASGEGGMDAANLLKPMLARGQLHCIGATTLAEYRKYIEKDAAFERRFQQVIVKEPSVSETISILRGLKEKYEVHHGVTISDAAIVAAANLAARYLTSRRLPDSAIDLIDEAAAAVRVARESQPEIIDSLERKLRQLKIEIHALSREKDEASKARLEQAKKDAENVEEELRPLREKYEQEKQRAKALQEARMKLESLRQKAEEASRMGDHSRAADLQYYAIPEQEAVIKRLEKEKAAADAALNAAAAETGGAMITDVVGPDQINEIVARWTGIPVTRLKTSEKEKLLHMEKHLSKIVVGQKEAVQSVSNAIRLQRSGLSNPNQPPSFLFCGPSGTGKTLLTKALAEFLFDDPKAMIRFDMSEYQERHSLSRMIGAPPGYVGHDSGGQLTEALRRKPFSILLFDEVEKAAKEVLTVLLQLMDDGRITDGQGRVVDARNCIVVMTSNLGAEYLSRPNAKDGKIDPTTRELVMNALRNYFLPEFLNRISSIVIFNRLTRREIRKIVELRIAEIQKRLQDNDRNVKIEVSEEAKDKLGALGYSPAYGARPLQRVLEKEVLNRLAVLILRGSIRDGEVARVVVQDGKITVLPNHPEVNDEDDEMMLDEEDAVDEVAPESEMDEDLYDD

SEQ ID NO: 6873 - protein, 899 aa, Candida albicans
MEDFTDNAIKIINNATELAKQQANSQLVPLHFLAAFIPSDDTEGSTQYLKTLVKRARYEWGDFERIVNRHLVKIPSQNPPPDEIRPSYQAGQVLTRANKIKQQQKDSYVAQDHILLALLEDQSIKDIFKEAGMSVDTIKTQAIELRGSQRIDSRQADSSSSYEFLNKYCEDFTEKAREGKIDPVIGREEEIRRVIRVLARRSKSNSVLIGDAGVGKTSIVEGVAQRIVDGDVPNVLAGSRLFALDLGALTAGAKYKGEFEERLKGVLNEIEKSKEFIILFIDEIHMLMGDGKSDAANLLKPMLARGALHCIGATTFAEYRKFISKDGAFERRFQKIDVPAATVQETVAILRGIQPKYEIHHGVRILDSALVTAAQLASRYLTYRALPDSAVDLVDESAAAVAVARDSKPEELDTLERQLHLVDVEISALERDKDADSASKERLNLAKKKKAELEEKIGPLNERYRQERASHEQLTAAKRKLDELEIKAQDAERRYDTATAADLRYFAIPDIQKQIEELEVKVAEEEASNLDSLLKNAVGPEQICETAARLTGIPVTKLSQAENNKLINMEAELSKEVVGQSEAVKAVSNAIRLRRSGLANPNQPPSFLFLGLSGSGKTELAKKLAGFLFADEKAIIRIDCSELGDKWSASKLLGAAPGYVGYEEGGILTEPLIRRPYSVVLLDEVEKAAPEVLTVLLQILDDGRVTSSQGKLVNCSNAIFIMTSNLGANYINAAKGSKIDANTKEHVMDAVRAHFRPEFINRISSIVVFNRLSRKAISKIVKIRLSEIENRFTANGKAIQLKLDDDAMEYLCKNGWSPDLGARPLNRLIQNEILNRLAVMLLKGQIQDKETARVVLGEKGLEILPNHEPEDVEMNDVDNWQDSEDEDDDEARFTSPGLD

SEQ ID NO: 6874 - protein, 899 aa, Candida albicans
MEDFTDNAIKIINNATELAKQQANSQLVPLHFLAAFIPSDDTEGSTQYLKTLVKRARYEWGDFERIVNRHLVKIPSQNPPPDEIRPSYQAGQVLTKANKIKQQQKDSYVAQDHILLALLEDQSIKDIFKEAGMSVDTIKTQAIELRGSQRIDSRQADSSSSYEFLNKYCEDFTEKAREGKIDPVIGREEEIRRVIRVLARRSKSNSVLIGDAGVGKTSIVEGVAQRIVDGDVPNVLAGSRLFALDLGALTAGAKYKGEFEERLKGVLNEIEKSKEFIILFIDEIHMLMGDGKSDAANLLKPMLARGALHCIGATTFAEYRKFISKDGAFERRFQKIDVPAATVQETVAILRGIQPKYEIHHGVRILDSALVTAAQLASRYLTYRALPDSAVDLVDESAAAVAVARDSKPEELDTLERQLHLVDVEINALERDKDADSASKERLNLAKKKKAELEEKIGPLNERYRQERASHEQLTAAKRKLDELEIKAQDAERRYDTATAADLRYFAIPDIQKQIEELEVKVAEEEASNLDSLLKNAVGPEQICETAARLTGIPVTKLSQAENNKLINMEAELSKEVVGQSEAVKAVSNAIRLRRSGLANPNQPPSFLFLGLSGSGKTELAKKLAGFLFADEKAIIRIDCSELGDKWSASKLLGAAPGYVGYEEGGILTEPLIRRPYSVVLLDEVEKAAPEVLTVLLQILDDGRVTSSQGKLVNCSNAIFIMTSNLGANYINAAKGSKIDANTKEHVMDAVRAHFRPEFINRISSIVVFNRLSRKAISKIVKIRLSEIENRFTANGKAIQLKLDDDAMEYLCKNGWSPDLGARPLNRLIQNEILNRLAVMLLKGQIQDKETARVVLGEKGLEILPNHEPEDVEMNDVDNWQDSEDEDDDEARFTSPGLD

SEQ ID NO: 6875 - protein, 812 aa, Candida albicans
MLSSRIPKGKLLKQTSATSYLNLAKSIPITTARYRPNQYYANELAKPNVFTIHNIPSPCFSQVRNFHSSFPRKLQMQQTEQGDNRPALEKFGSDLTQLAKEGKLDPVIGRDHEIRRTIQILSRRTKNNPVLIGNAGTGKTAVMEGLAQRIIRGEVPDSMKDKQIITLDLAGIISGAKYRGDFESKLKSILKEVEEKNGKVILFIDEFHLLMGLGKAEGSIDASNLLKPALARGKLSMCGATTIEEYRKYVEKDAALARRFSPVTVNEPTGEDTISILRGLKERYEVHHGVRIMDSALVTAALYSNRYITDRFLPDKAIDLVDEASSTLRLQHESRPDAIATLDRQIMTIEIELESLRKEEDQLSIDRKHKLEKELEVKKSELKELTDQWESEKRAIDAVKNAKSELEKAKYELEQATREGDYARASRIQYASIPELQDKIQELSKNELAAKSSNLLHDSVTSEDIAGVISKMTGIPVNNLLKGEKDKLLDMNILLRQSVVGQDEAIDAVSDAVRLQRAGLTSENRPIASFMFLGPTGTGKTELTKSLAQFLFNDKNAVVRFDMSEFQEKHTISRLIGSPPGYVGYEESGELTEAVRRKPYSVVLFDEFEKAHPDLSKLLLQVLDEGSLTDSHGKKIDFKNTIIVMTSNIGQEILLADKNTYEDGHINSEVKSQVLENLRHHYAPEFLNRIDDIVVFNRLSKTALKEILDIRLREIGDRLVDKRIILQLTDEAKTLLCDMGYDPTYGARPLNRVLRKKLLDPLAMRLIKGQVQENETVKVEVKDHKIYVVPNHSEGTVIEKEEDYFKEDKDDN

SEQ ID NO: 6876 - protein, 867 aa, Leishmania donovani
MTTQQPEWTQAASDLMARTAALARKKANGYLDPVHLAYVMFEDENSLASRVVRKLGAASVKDGLEARVDAIPTQMPAPTQPRPNSDMMRVMNTAEQERVALGDTLMAADHFLLALHESKEVGRILDAAGAGKKAIRATLLEMRKGKKINSDFQDDNYESLNKYAVDLCKQAEDGKLDPVIGRADEILRTIRVLSRRTKNNPVLIGEPGVGKTAIVEGIAQQVVRGDVPDTLSGIRIFSLDMGALIAGAKYRGEFEERLKAVLNEVKESDNKIILFIDEIHLVLGAGKSDGAMDAANLLKPLLARGELRTIGATTLEEYRQYVEKDAAFERRFMPVQVNEPSVEECTSILRGLKDRYEQHHGVQITDKAVVVAAQLAGRYITNRFLPDKAIDLIDEACANVRVTLSSRPAEIDALERKKRQLEIEEKALQRDKDASAKERLKAVKAEIQKVEEKLGPLLAKYEQERGRIDELQATQAKLDEKKVKLERAERMRDMETAADLKYNVIPILQDRIRSLKEEIEKQKATMLHGTVTETDIATVVSRWTNIPVTKLSQTERERLLHLADQLHLRVKGQDEAVSRVAEAILRSRAGLARSDRPTGSFLFLGPTGVGKTELSKAVASKLFDDAKYMVRLDMSEYMEQHSVARLIGAPPGYVGHEEGGQLTEPVRRRPYTVVLLDEVEKAHPNVFNVLLQVLDDGRLTDSHGRTVNFCYTIIIMTSNLGAQYLQNMDTSPKAYEVAQTQVMGEVRKFFRPEFINRLDDIILFRSLGLKEMTGIIDLITEELYGRLKDQSIRVSLTEEAKNYVLESAFDADMGARPLRRWVEKNITTELSRMIISQELSPNSTVKVTLSSNHKKLSFSVKRTAAQT

SEQ ID NO: 6877 - protein, 867 aa, Leishmania major
MTTQQPEWKQAASDLMARMAALARKKANGYLDPVHLAYVMFEDENSLASRAVRKLGAASVKDGLEARVDAIPNQMPAPTQPRPNSDMMRVMNTAEQERAALGDTLMAADHFLLALHESKEVGRILDAAGAGKKAIRATLLEMRKGKKITSDFQDDNYESLNKYAVDLCKQAEDGKLDPVIGRADEILRTIRVLSRRTKNNPVLIGEPGVGKTAIVEGIAQQVVRGDVPDTLSGIRIFSLDMGALIAGAKYRGEFEERLKAVLNEVKESDNKIILFIVEIHLVLGAGKSDGAMDAANLLKPLLARGDVRTIGATTLEEYRQYVEKDAAFERRFMPVQVHEPSVEECTSILRGLKDRYEQHHGVQITDKAVVVAAQLAGRYITNRFLPDKAIDLIDEACANVRVTLSSRPAEIDALERKKRQLEIEERALQRDKDASAKERLKAVKAEIQKVEEKLGPLLAKYEQERGRIDELQATQAKLDEKKVKLERAERMRDMETAADLKYRVIPILQDRIRSLKEAIEKQKATMLQGTVTGTDIATVVSRWTNIPVTKLSQTERERLLHLADQLHLRVKGQDEAVSRVAEAILRSRAGLARSDRPTGSFLFLGPTGVGKTELSKAVASELFDDAKYMVRLDMSEYMEQHSVARLIGTPPGYVGHEEGGQLTEPVRRRPYTVVLLDEVEKAHPNVFNVLLQVLDDGRLTDSHGRTVDFCNTIIIMTSNLGAQYLQNMDTSPKPYEVAQAQVMGEVRKFFRPEFINRLDDIILFRSLGLKEMTGIIDLITEELNGRLKDQSIRVSLTEEAKQYVLESAFDADMGARPLRRWVEKNITTELSRMIISQELSPNSTVKVTLSSNHKKLSFSVKRTAAQT

SEQ ID NO: 6878 - protein, 862 aa, Trypanosoma brucei
MAHSDRQCTNAAQTALSDAVESARKHNNGFVDPAHLALVLFKNEDGLASRVLRKLNVLEPLAARVGALPEQRPRPRSITFSSDGGCAQHRRAEANRVGDSLIAVDHLLIGLFEVEAIMKAAHASKKAVEGALLELRKGKKVTSEFQEENYQALEKYATDLCKLAEEGKLDPVIGRTDEVLRTIRVLSRRTKNNPILIGEPGVGKTAIAEGIAQRIVRGDVPDTLLNTRLFSLDLGALIAGSSLRGEFEERLKSVLNEVKESSNGVILFIDEIHLVLGAGKSGGSMDAANLLKPMLARGELRTIGATTLEEYRTYVEKDAAFERRFMPVYVTEPSVEECISILRGLKDRYEAHHGVQITDNAVVVAAQLANRYITNRFMPDKAIDLIDEACANVRVQLSSRPEAIDILERKKRQLEIEAKALERDKEAASRERLKLVKADIQRVEEELQPLVSKYNDERQRIDELQEMQSRLDEKKKLERAVRDGKMDLAADLQYNVIPLIQDRIRSLKEDIERQKATLVQEKVTEGDVAAVVARWTGIPVVKLSQTDRERLLNLSMHLHRRVKGQDEAVERVADAIIRARAGLSRPNSPTASFLFLGPTGVGKTELVKAVAAELFDDEKHMVRIDMSEYMEQHSVSRLIGAPPGYIGHDEGGQLTEPVRRRPHAVVLFDEVEKAHPNVYNVLLQVLDDGRLTDSRGRTVDFSNTIIVMTSNLGSEHLLNPEETNESYEVLRENVLAAVRSYFRPELINRLDDIVVFRRLRTEDLRGVVDNLIAGVNERLKSSGFSVLLDDGVKDFILEHGHDANMGARPLRRWIEKNIVTEIGRMLIAKELPPNSTLRVSLPEGGNKLTFGVKRGLTSDEWE

SEQ ID NO: 6879 - protein, 138 aa, Trypanosoma cruzi
NSPKGLEATREKVWQVVRSYFRPEFLNRLDDIVLFRRLGFGELHEIIDLIVAEVNGRLRSQDILLEVTDEAKNFVLENAFDAEMGARPLRRWVEKYITTEVSRMILAQQLPPNSTVRVLVNGSQGKLAFSVKRSFVSE

SEQ ID NO: 6880 - protein, 868 aa, Trypanosoma brucei brucei
MAHSDRQCTNAAQTALSDAVESARKHNNGFVDPAHLALVLFKNEDGLASRVLRKLNAGTVLEPLAARVGALPEQRPRPRSITFSSDGGCAQHRRAEANRVGDSLIAVDHLLIGLFECKEVEAIMKAAHASKKAVEGALLELRKGKKVTSEFQEENYQALEKYATDLCKLAEEGKLDPVIGRTDEVLRTIRVLSRRTKNNPILIGEPGVGKTAIAEGIAQRIVRGDVPDTLLNTRLFSLDLGALIAGSSLRGEFEERLKSVLNEVKESSNGVILFIDEIHLVLGAGKSGGSMDAANLLKPMLARGELRTIGATTLEEYRTYVEKDAAFERRFMPVYVTEPSVEECISILRGLKDRYEAHHGVQITDNAVVVAAQLANRYITNRFMPDKAIDLIDEACANVRVQLSSRPEAIDILERKKRQLEIEAKALERDKEAASRERLKLVKADIQRVEEELQPLVSKYNDERQRIDELQEMQSRLDEKKKLERAVRDGKMDLAADLQYNVIPLIQDRIRSLKEDIERQKATLVQEKVTEGDVAAVVARWTGIPVVKLSQTDRERLLNLSMHLHRRVKGQDEAVERVADAIIRARAGLSRPNSPTASFLFLGPTGVGKTELVKAVAAELFDDEKHMVRIDMSEYMEQHSVSRLIGAPPGYIGHDEGGQLTEPVRRRPHAVVLFDEVEKAHPNVYNVLLQVLDDGRLTDSRGRTVDFSNTIIVMTSNLGSEHLLNPEETNESYEVLRENVLAAVRSYFRPELINRLDDIVVFRRLRTEDLRGVVDNLIAGVNERLKSSGFSVLLDDGVKDFILEHGHDANMGARPLRRWIEKNIVTEIGRMLIAKELPPNSTLRVSLPEGGNKLTFGVKRGLTSDEWE

SEQ ID NO: 6881 - protein, 765 aa, Toxoplasma gondii
MNLNLFTSISSLKSTKEVLIILIYSKILASLFKNNSITFFHIICSLILQSNLFKLIIGKKNLLKFLQLYIKNNFKQTQLNYNILFSYTLFKFFNNLNKSFINTWKLTINLLQYNSILFKYILIYLFKVKSNTYNLINSIIFKFNDKPINNLYFNNLIKPFNYKSNFYNIINRKSDCVYLYEILNRKIIRNPILLGDFGIGKNSIIKKFSFFIEKFKLKFNNITKNLWILNIVTLLKYIKTNNLYIKKFFKFLQENKNIILICPKIEILFNTYYTDSNIYQNLESYSFLFKFFNYIKQNKLQLIGLSNNITDIEKKFNINQELNFLFEKIYVKELSNKEIFKILLKKSSLFEKYYNCSISFKIIKHILYYSQTYIKQHKTLLKSIWLLDNTCSKIYVNQKFHLLKNNNKLALSDIQKTLTKLINLSTNLLFNKANKTNFDIIALRKNLQKSLFGQPTAISKILISLKRVFTGLKQINKPIGSWLLCGPSGTGKTELAKLLAKFLFGSEADLIRFDMSEFMEKHSLSKLIGAPPGYVGYGKSGLLTEAIAKKPFTVLLFDEIEKAHKDINNLMLQLLDDGKLTDSLGKCVDFSNTLIFFTSNLGFPTNSYELQFLKSGTKLSKKNYKILSNKVESAIQSYFKPEFLNRLDDIIIFKPLNINFFKYIINKFLKNIYLKLYNNQIPIFLDIDSNIKTLLAKLAYHPLYGARPLKRLLELIIEKPISDLLINFSFNRIIIFSIFLNKKTFNINYSFKILIINVHFLFLQI

SEQ ID NO: 6882 - protein, 908 aa, Plasmodium berghei
MSDEEYTINSDDYTEKAWDAISSLNPIGEKYESAYVEAEMLLLALLNDSPDGLAQRILKETGIDTDLLSHDIDVYLKKQPKMPSGFGEQKILDEHYKTVLSTSKRLKREFNDEYISIEHLLLSIISEDSKFTRPWLLKYNVNYEKVKKAVEKIRGKKKVTSKTPEMTYQALEKYSRDLTALARAGKLDPVIGRDEEIRRAIQILSRRTKNNPILLGDPGVGKTSIAEGLAIKIVQGDVPDSLKGRKLVSLDMSSLIAGAKYRGHFEERLKSILKEIQDQKGQVVMFIDEIHTVVGAGAVAEGALDAGNILKPLLARGELRCIGATTVSEYRQFIEKDKALERRFQQILVVNPSVDETISILRGLKERYEVHHGVRILDSALVQAAILSDRYISYRFLPDKAIDLIDEAASNLKIQLSSKPIQLDNIEKQLIQLEMEKISILGDKQSASLINKSNSGNDNNNVSTDYTQSQNFIKKRISEKEINRLKTIDHIMNELRKEQKNILESWTSEKMYVDNIRAIKERIDVVKIEIEKAERYFDLNRAAELRFERLPDLEKQLKTAAEENYVNDIPERNRMLKDEVTSEDIMNIVSVSTGIRLNKLLKSEKEKILNLENELHKQIIGQDDAVKIVARAVQRSRVGMNNPKRPIASLMFLGPTGVGKTELSKVLADVLFDTPDAVIHFDMSEYMEKHSISKLIGAAPGYVGYEQGGLLTDAVRKKPYSIILFDEIEKAHPDVYNLLLRVIDEGKLSDTKGNVANFRNTIIIFTSNLGSQSILELANDPNKKEKIKEQVMKSVRETFRPEFYNRIDDHVFFDSLTKKELKEIANIEITKVANRLFDKNFKISIDDAVFSYIVDKAYDPSFGAGPLKRVIQSEIETEIAIRILNETFVENDTIRVSLKDQKLHFSKG

SEQ ID NO: 6883 - protein, 214 aa, Plasmodium berghei
KTELAKILAKQLFGSENELIRFDMSEYMEKHSISRLIGSPPGYIGYSEGGQLTEQVYNKPNCVILFDEIEKAHPDIYNIMLQILDEGRLTDTTGKLIDFTNTIILLTSNLGCPTNYDKYLNNKNYLNELDLKDIKNNIKSKITNYFKPELLNRLTNILIFNPLNIEALNLIFNKFITELKTKLYLNKLNIIISINNNLKYFIIKLTYNPLYGAR

SEQ ID NO: 6884 - protein, 214 aa, Plasmodium cynomolgi
KTELAKILAKYLFGSEKELIRFDMSEYMEKHSISRLIGSPPGYIGYSEGGQLTEQVYNNPNSIILFDEIEKAHPDIYNIMLQILDEGRLTDTTGKLIDFTNTIILLTSNLGCPKNYDLYLKNKYYLSDIDLKDIKKNIKLSINNYFKPELLNRLTNILIFNPLNINSLLLIFNKFINELKIKLYLNKLNITIYIKNELKYFLIKLTYNPLYGAR

SEQ ID NO: 6885 - protein, 1070 aa, Plasmodium falciparum
MVNSFFFCFVIIGLIYVWDITYSKKAKIFFNKNDIFSIKNTHWDIYDKKKYFFIGNNHLKNEESFLPEVRKDYKSQIKEYKNSTNGIIYHNNKNRLSYTINDQVNYDNNMTSGINKKRKVKDSSIHMNNSYEKNRNKNKFALFMSDEEYTINSDDYTEKAWEAISSLNKIGEKYDSAYVEAEMLLLALLNDSPDGLAERILKESGIDTQLLVQEIDDYLKKQPKMPSGFGEQKILGRTLQTVLSTSKRLKKEFNDEYISIEHLLLSIISEDSKFTRPWLLKYNVNYEKVKKAVEKIRGKKKVTSKTPEMTYQALEKYSRDLTALARAGKLDPVIGRDNEIRRAIQILSRRTKNNPILLGDPGVGKTAIVEGLAIKIVQGDVPDSLKGRKLVSLDMSSLIAGAKYRGDFEERLKSILKEVQDAEGQVVMFIDEIHTVVGAGAVAEGALDAGNILKPMLARGELRCIGATTVSEYRQFIEKDKALERRFQQILVEQPSVDETISILRGLKERYEVHHGVRILDSALVQAAVLSDRYISYRFLPDKAIDLIDEAASNLKIQLSSKPIQLENIEKQLIQLEMEKISILGDKQKNLFNYSSVANTHNNNNNSSISSNNSSSYGNAEETEATVDYTKSPNFLKKRINEKEIDRLKMIDRIMSELRKEQRKILDSWSTEKSYVDNIRAIKERIDVVKIEIEKAERYFDLNRAAELRFETLPDLEKQLKKAEENYLNDIPEKSRILKDEVTSEDIVNIVSMSTGIRLNKLLKSEKEKILNLENELHKQIIGQDDAVKVVTKAVQRSRVGMNNPKRPIASLMFLGPTGVGKTELSKVLADVLFDTPEAVIHFDMSEYMEKHSISKLIGAAPGYVGYEQGGLLTDAVRKKPYSIILFDEIEKAHPDVYNLLLRVIDEGKLSDTKGNVANFRNTIIIFTSNLGSQSILDLANDPNKKEKIKEQVMKSVRETFRPEFYNRIDDHVIFDSLSKKELKEIANIEIRKVANRLFDKNFKITIDDAVFSYIVDKAYDPSFGARPLKRVIQSEIETEIAVRILDETFVENDTINISLKDQKLHFSKS

SEQ ID NO: 6886 - protein, 752 aa, Plasmodium falciparum
MSDEEYTINSDDYTEKAWEAISSLNKIGEKYDSAYVEAEMLLLALLNDSPDGLAERILKESGIDTQLLVQEIDDYLKKQPKMPSGFGEQKILGRTLQTVLSTSKRLKKEFNDEYISIEHLLLSIISEDSKFTRPWLLKYNVNYEKLKSCRKNSRKKKSYFKTPEMTYQALEKYSRDLTALARAGKLDPVIGRDNEIRRAIQILSRRTKIILSYLGDPGVGKTAIVEGLAIKIVQGDVPDSLKGRKLVSLDMSSLIAGAKYRGDFEERLKSILKEVQDAEGQVVMFIDEIHTVVGAGAVAEGALDAGNILKPMLARGELRCIGATTVSEYRQFIEKDKALERRFQQILVEQPSVDETISILRGLKERYEVHHGVRILDSALVQAAVLSDRYISYRFLPDKAIDLIDEAASNLKIQLSSKPIQLENIEKQLIQLEMEKISILGDKQKNLFNYSSVANTHNNNNNSSISSNNSSSYGNAEETEATVDYTKSPNFLKKRINEKEIDRLKMIDRIMSELRKEQRKILDSWSTEKSYVDNIRAIKERIDVVKIEIEKAERYFDLNRAAELRFETLPDLEKQLKKAEENYLNDIPEKSRILKDEVTSEDIVNIVSMSTGIRLNKLLKSEKEKILNLENELHKQIIGQDDAVKVVTKAVQRSRVGMNNPKRPIASLMFLGPTGVGKTELSKVLADVLFDTPEAVIHFDMSEYMEKHSISKLIGAAPGYVGYEQGGLLTDAVRKKPYSIILFDEIEKAHPN

SEQ ID NO: 6887 - protein, 214 aa, Plasmodium gallinaceum
KTELAKLLAKQLFGSEKELIRFDMSEYMEKHSISRLIGSPPGYIGYSEGGQLTEQVFKKPNSIILFDEIEKAHPDIYNIMLQILDEGRLTDTTGKLIDFTNTIILLTSNLGCPKNYDIYFKNKNYLSELDLKEIEKNIKLSINKFFKPELLNRLTNILIFNPLNINNLLLIFDKFIKELQIKLYLNKLNILVHINNNIKYIIPKLSYNPLYGAR

SEQ ID NO: 6888 - protein, 214 aa, Plasmodium knowlesi
KTELAKLLAKYLFGSEKELIRFDMSEYMEKHSISRLIGSPPGYIGYSEGGQLTEQVYNNPNSIILFDEIEKAHPDIYNIMLQILDEGRLTDTTGKLIDFTNTIILLTSNLGCPKNYDSYLKNKYYLSDTDLKEIHKNIKLSINNYFKPELLNRLTNILIFNPLNINSLLLIFNKFMSELKIKLYSNKLNITIYIKNELKYFLIKLTYNPLYGAR

SEQ ID NO: 6889 - protein, 214 aa, Plasmodium vivax
KTELAKLLAKYLFGSEKELIRFDMSEYMEKHSISRLIGSPPGYIGYSEGGQLTEQVYNNPNSIILFDEIEKAHPDIYNIMLQILDEGRLTDTTGKLIDFTNTIILLTSNLGCPKNYDLYLKNKYYLSDIDLKDIKKNIKLSINNYFKPELLNRLTNILIFNPLNINSLLLIFNKFINELKIKLYLNKLNITIYIKNELKYFLIKLTYNPLYGAR

SEQ ID NO: 6890 - protein, 214 aa, Plasmodium malariae
KTELAKLLAKQLFGSETELIRFDMSEYMEKHSISRLIGSPPGYIGYSEGGQLTEQIYKKPNSIILFDEIEKAHPDIYNIMLQILDEGRLTDTTGKLIDFTNTIILLTSNLGCPKDYNLYLTNKYFLSNLDLKKIEKNIKLYINNYFKPELLNRLTNILIFNPLNYNTLLLIFDKFINELKIKLYLNKLNINIYINNKLKYFLTKLTYNPLYGAR

SEQ ID NO: 6891 - protein, 860 aa, Prochlorococcus marinus subsp. pastoris str. CCMP1378
MKFVPSEFSNSAWDIFILSKEIAQNNFQQNIDSENILLALIKQDLLTSKILKKNCVNIRKIETKLTSLLDAKAKMKNKQKTLFIGETTEKVFLKANDLRVSFNDVVISTEHILYGLSYDEICSELVLNTKKIPEFLELLNKMKSESTINDNFESSNETLDKFGIDLTKSARDGILDPVIGRDEEIRRTIQILSRRTKNNPVLIGEPGVGKTAIVEGLAQRIVNGDVPSSLNNRQLISIDMGSLIAGAKYRGEFEERIKNVLKKVKSSEGKIILFIDEIHTVVGAGATGGSLDASNLLKPMLARGELRCIGATTINEHKQNIEKDPALERRFQKIKINAPSVDDTISILRGLREKYEVHHSVRISDNALVAAASLSERYINDRFLPDKAIDLIDEAASRLNMIITSKPEEIDEIDRKVLQLEMENLSLQRESDNFSLERLKRINNELHDLKIRQSELNHQWQKEKEEIDEISNLKEEIESTQLKIEQAKRSFDLNKAAELEFGTLISLQKKLKIKSENLVDSFKSGEKNLLRQEVNFDDIAEVVSKWTSIPVNNLNQSEKEKLLKLELTLKEKIIGQNNAICAVSDSIKRSRTGLNDPNRPIASFLFLGPTGVGKTELSKVIAKTIFDSNSSITRLDMSEYMEKHSVSKIIGAPPGYLGFESGGQLTEAVRKNPYSLILLDEIEKAHKDVLDVLLQVLDDGIITDGQGRTISFKNSIIVLTSNLGSQSINDLSIRNEDKNEIKNIVNVELKKFFKPEFLNRLDEIIIFQNLELNELKDIAKLQLKKLENRLIKKDLNFQITDEAIDHLVKNSFDNSYGARPLKRIIQKEIETKIANNILNNNYLNKKEVYISIKDGCIFVN

SEQ ID NO: 6892 - protein, 341 aa, Salmonella typhimurium
AQRIINGEVPEGLKGRRVLALDMGALVAGAKYRGEFEERLKGVLNDLAKQEGNVILFIDELHTMVGAGKADGAMDAGNMLKPALARGELHCVGATTLDEYRQYIEKDAALERRFQKVFVAEPSVEDTIAILRGLKERYELHHHVQITDPAIVAAATLSHRYIADRQLPDKAIDLIDEAASSIRMQIDSKPEELDRLDRRIIQLKLEQQALMKESDEASKKRLDMLNEELDDKERQYSELEEEWKAEKASLSGTQTIKAELEQAKIAIEQARRVGDLARMSELQYGKIPELEKQLEAATQSEGKTMRLLRNKVTDAEIAEVLARWTGIPVSRMLEGEREKLL

SEQ ID NO: 6893 - protein, 851 aa, Encephalitozoon cuniculi
MTTRKYTERAQNALKMCVDEALANNNNTIEPEHLLKAILSDQTSVLHNVLSPTERNNVKNALIKRIGGFAKQYNCTEPRVGETLAKVLMAAESKGEGEYVSVNALVLSLLEVESIRELIANSEDIRKKVEEQTKNKRFDSRNADDGTDVMSRFAVDMVEQARQNVFDPVIGRDEEIRRVLEILSKKTKSNAILVGKPGVGKTAIVNGIAQLIANGEAPTLRGARIYNVDVGSMVAGTSHRGDFEERLKTLVKEAETTPGVILFIDEIHIVLGAGKTDGAMDAANMLKPGLAAGTIKCIGATTHDEYRKYIENDPAFERRFVQVVVNEPSIEDSITMLRGLKGRLEAYHGVKIADSAIVYAVNSSKKYISNRRLPDVAIDLLDTACASVMIALESEPQEILNQKSKAWGLDIAKTSLEFDLSQKKDEQTLKKLKEVVEELEKVKASLQPMEEAYLRDKKHIIEAKKLKKKLEDTKLRLAQAERDRNTYVAYDLKTNVIPVIESELKRLELESVVVILPSHVAEIISRWTGIDVKRLTIKENERLMEMSSRIKKRIFGQDHAVDAIVDSILQSRVGLDDDDRPVGSFLLLGPTGVGKTELAKAVAMELFDNEKDMLVIDMSEYGNEMGITKLIGANAGYVGYNQGGTLTEPIKGRPYNVILLDEVDLAHQTVLNTLYQLLDEGRVTDGKGAVVDFRNCVVIMTSNLGQEIIMRSRGELNDDERKKIEEIVLNRFGAPFVNRIDEVLYFNNLDRENMHRILEYQMGYLEKKLRGRGITFKVSDAVKEDMVTKVLSSIYGARQLRRFIRSSFKRALTKVLLMRVNEDPIEVSCTHPSEGAGGIRISDYVYSMVQQ

SEQ ID NO: 6894 - protein, 890 aa, Yersinia enterocolitica
MAITRKNLFGKLDATLFKGIESATTICKLRGNPYVELIHWLNQLWHQEDNDLKHIVRYFAVDVDAFERGLAQALARLPVGATSISDFSYHIELAIERAWVYASLECLDTRIRSGHLLLAMLTNMELRRALLAIAPEMEKIPLEHLSSDFNFITQASPETNEAATDGSPMYDGTLPGEASNAINGKSTATLAQYTTDLTALAREGKIDPVLGRNHEISTMVDILLRRRQNNPLLTGEAGVGKTAVVEGLALAIVAGEMPPALSQVSLLTLDVVALSAGASMKGEFEARLKNVLDEAMASPTPVILFIDEVHTLVGAGGNAGTGDAANLLKPALARGQLRTIGATTWSEFKRHIEKDPALTRRFQVLQVDEPDEDTAISMLRGLTPALEKHHGVWIMDEALQAAVRLSHRYIPARQLPDKAISLLDTACARVAVAQFSQPAELQQLTFQSETAQTELSSLEKAQHFGKGQDERTALLEATIAQHSAAANKLEQRWQAERELVTAITATRTVLYELVSQPTPDEEKRQQYQQQLAQLEEQLLLIRSAQPLVQAEVNATVIANIVADWTGIQVGQMLKDDIRAVMELPQRLEERVIGQPHALVQLSENIMTARAGMADPRKPLGVFMLVGPSGVGKTETALAIAESMYGGEQNLITINMSEYQESHTVSSLKGSPPGYVGYGEGGVLTEAVRRKPYSVVLLDEIEKAHSDVHELFFQVFDKGQMEDGEGRFIDFKNTILLLTSNVGSELLSNLFADPDTAPDQDGILSALQPELLKVFPAAFLGRVTVIPYLPLQQSALQHIVRLHLDRIGQRLQSQHQLTLQYSDVVVDDVVSRCSVAETGARMLIRYIEQNITPEIGKFILRDHDAIPNQIVFVDKVENKFTVSVLNEKINN

SEQ ID NO: 6895 - protein, 857 aa, Vibrio cholerae
MRLDRFTSKFQIAISDAQSLALGRDHQYIEPVHLMVALLDQNGSPIRPLLTMLNVDVMQLRSKLGEMLDRLPKVSGIGGDVQLSSALGSLFNLCDKVAQKRQDAYISSEIYLLAAIEDKGPLGHLLKEFGLTEKKVSEAIEKIRGGQKVNDPNAEELRQALEKFTIDLTERAEQGKLDPVIGRDDEIRRTIQVLQRRTKNNPVIIGEPGVGKTAIVEGLAQRIINNEVPEGLRGRRVLSLDMGALVAGAKYRGEFEERLKSVLNELAKEEGNIILFIDELHTMVGAGKGEGSMDAGNMLKPALARGELHCVGATTLDEYRQYIEKDPALERRFQKVLVDEPTVEDTIAILRGLKERYELHHHVEITDPAIVAAASLSHRYISDRQLPDKAIDLIDEAASSIRMQIDSKPEALDKLERKIIQLKIEQQALSNEHDEASEKRLAILNEELQEKERDYAELEEVWKAEKAALSGTQHIKAALEQARMDLEVARRAGDLNRMSELQYGRIPELEKQLDLAAQAEMQEMTLLRNKVTDAEIAEVLSKQTGIPVSKMLEAEKEKLLRMEDVLHKRVIGQKEAVEVVANAIRRSRAGLSDPNRPIGSFLFLGPTGVGKTELCKTLANFLFDSEDAMVRVDMSEFMEKHSVARLVGAPPGYVGYEEGGYLTEAVRRKPYSVILLDEVEKAHPDVFNILLQVLDDGRLTDGQGRTVDFRNTVVIMTSNLGSSRIQENFARLDYQGIKEQVMDVVSKHFRPEFLNRVDESVVFHPLGQEHIKSIASIQLARLRQRLAERDYQLEVDDEALDLIAHVGFDPVYGARPLKRAIQQNVENPLAKSILAGKFLPGSPILLSVKDGNIFASQ

SEQ ID NO: 6896 - protein, 869 aa, Vibrio cholerae
MIRIELPTLIAKLNAQSKLALEQAASLCIERQHPEVTLEYYLDVLLDNPLSDVRLVLKQAGLEVDQVKQAIASTYSREQVLDTYPAFSPLLVELLQEAWLLSSTELEQAELRSGAIFLAALTRADRYLSFKLISLFEGINRENLKKHFAMILSDSAETAVAKTDKNAANPLQAAAETPLGRFCTNVTEQARNGELDPVLSRENELNLMVDILCRRRKNNPIVVGEAGVGKSAMIEGLALRVVAGKVPTQLQNVELYSLDLGRLQAGASVKGEFEKRLKGVIDAIKQSPKPIILFIDEAHTLIGSGNQEGGSDAANLLKPALARGELSTVAATTWKEYKKYFEKDPALTRRFQLVKLDEPTIDQAVDILRGLNSVYEKAHNVLITDDALKAAAELSARYISGRQLPDKAIDVLDTACARIAINMTTPPKRLALLETLCHQRQLEIDMLERAQFLGQEVDSERLDVLRNQELADEAEKAALTQSWQQQKSLVESIIALRAELMELSQAQEQDPDHLLVVRTALQEQYQALDAIDHAERLMHPQVDADQIAEVIADWTGVPVDQMNTDELHKITHLTSILGQAIKGQETAIERIHRHLLTARADLRRPGRPKGAFLLVGPSGVGKTETVVQLAEQLYGGKQFLTTINMSEYQEKHTVSRLIGSPPGYVGYGEGGVLTEAIRKMPYSVVLLDEVEKAHPEVLNIFYQGFDKGEIADGEGRVIDCQNIVFFLTSNLGYQTIVDYADEPAKLDEALYPELAAFFKPALLARMEVIPYLPLGKEVLAQIVRGKLARLEKLFKTRYNAEVVIEESLIDEILSRATRSENGARMLEAIIEGQLLPPVSLALLNKLAERAPVERIRLAAEAGEFIGEVA

SEQ ID NO: 6897 - protein, 1048 aa, Plasmodium yoelii yoelii
MQKNFIAFFVIISVSFLCKQGDGKRRFESRLNASNIDNIINNNNILNPFGIARKRIRKNEAFINSNLKGDDILKRDKKKGFKSKINENKDEYNIKSKKYDQSGIKNRLNYSTNDQDNVNNYFFNKNENNFINKRNKMNQLFMSDEEYTINSDDYTEKAWDAISSLNKIGEKYESAYVEAEMLLLALLNDSPDGLAQRILKEAGIDTDLLSHDIDVYLKKQPKMPSGFGEQKILGRTLQTVLTTSKRLKREFNDEYISIEHLLLSIISEDSKFTRPWLLKYNVNYEKVKKAVEKIRGKKKVTSKTPEMTYQALEKYSRDLTALARAGKLDPVIGRDEEIRRAIQILSRRTKNNPILLGDPGVGKTAIVEGLAIKIVQGDVPDSLKGRKLVSLDMSSLIAGAKYRGDFEERLKSILKEIQDSEGQVVMFIDEIHTVVGAGAVAEGALDAGNILKPLLARGELRCIGATTVSEYRQFIEKDKALERRFQQILVDQPSVDETISILRGLKERYEVHHGVRILDSALVQAAILSDRYISYRFLPDKAIDLIDEAASNLKIQLSSKPIQLDNIEKQLIQLEMEKISILGDKQTASLINKSSSGNDDNNVSTDYTQSQNFIKKRISEKEINRLKTIDHIMNELRKEQKNILESWTSEKMYVDNIRAIKERIDVVKIEIEKAERYFDLNRAAELRFETLPDLEKQLKNAEENYVNDIPERNRMLKDEVTSEDIMNIVSISTGIRLNKLLKSEKEKILNLENELHKQIIGQDDAVKIVARAVQRSRVGMNNPKRPIASLMFLGPTGVGKTELSKVLADVLFDTPDAVIHFDMSEYMEKHSISKLIGAAPGYVGYEQGGLLTDAVRKKPYSIILFDEIEKAHPDVYNLLLRVIDEGKLSDTKGNVANFRNTIIIFTSNLGSQSILELANDPNKKEKIKEQVMKSVRETFRPEFYNRIDDHVIFDSLTKKELKEIANIEITKVANRLFDKNFKISIDDAVFSYIVDKAYDPSFGARPLKRVIQSEIETEIAIRILNETFVENDTIRVSLKDQKLHFSKG

SEQ ID NO: 6898 - protein, 909 aa, Plasmodium yoelii yoelii
MVQNIVKNYLFVIVLLLSVLKVDITVFASNNNNNNIQENFLNRTINTLNSGRNIAKRYGHNQLKPVHILKSIIKSEYGLNLFKSNNIDLGNLKEYTDAALEQTRAGAPLDNKTIVINSEATNEVLAEAKAIAKKYKSPKVDIEHILYGLMSDELVSEIFGEIYLTEDSIKEILKNKFEKATKTKEKKTTGLNIEQFGSNLNEKVRSGKLQGIYGRDEEIRAIIESLLRYNKNSPVLVGQPGTGKTTIVEGLAYRIEKGDVPKELLGYTIISLNFRKFTAGTSYRGEFENRMKNIIKELKNKKNKIILFVDEIHLLLGAGKAEGGVDAANLLKPVLSKGEIKLIGATTVTEYRKYIESCSAFERRFEKVIVEPPSVETAIKILRSLKSKYEKFYGINITDKALVAAVKVSDKFIKDRFLPDKAIDLLNKACSFLQVQLSGKPRVIDLTERYIERLAYEISTLERDVDKVSKKKYSSLVEEFELKKEELKKYYEEYVTTGERLKRKKEVEKKLNELKDIAQNYINAGQEPPTELQESLNEAQKQFVEIYKNTVAYVEEKTHNAMNVDSLYQEHVSYIYLRDSGMPLGSLSFESSKGALKLYNSLSQSIIGNEDIIKSLSDAVVKAATGMKDPEKPIGTFLFLGPTGVGKTELAKTLAIELFNSKNNLIRVNMSEFTEAHSVSKITGSPPGYVGFSDSGQLTEAVRERPHSVVLFDELEKAHPDVFKVLLQILGDGYINDNHRRNIDFSNTIIIMTSNLGADLFKKQFFFDADNSNTQEYKRLFEDLRIQLIKKCKKVFKPEFVNRIDKIGIFEPLSKKNLHKIVKLRFKKLEKRLEEKNISIDVSDRAIDYIIDQSYDPELGARPTLIFIESVIMTKFAVMYLEKELIDDMDVYVDYNKTINNIVINLSLS

SEQ ID NO: 6899 - protein, 214 aa, Plasmodium elongatum
KTELAKLLAKQLFGSDKELIRFDMSEYMEKHSISRLIGSPPGYIGYSEGGQLTEKVYLNPNSVILFDEIEKAHPDIYNIMLQILDEGRLTDTTGKLIDFTNTIILFTSNLGCPTNYYKYLKNKNYLSELDLQDITKNIQLSINNYFKPELLNRLTNILIFNPLTIKTLLLICNKFIEDLKIKLYLNKLNIIININYKIKYILVKLSYNPLYGAR

SEQ ID NO: 6900 - protein, 857 aa, Rickettsia conorii
MNIDKFTAHAKSVIASSQLLAAKNDHQQILPLHLLSSLLSEETGIIQTLINNTGGNINLLKDQVQLELNKIPKVQVEGGGQVYSSAEALKVLEKASSIAKDNGDSFVTIERIFEALTYDNTIAGKILTNNGINNKKIATAILQFRKGKKADTESAENSYDALKKYGRDVTELAESGKLDPIIGRDEEIRRTVQVLSRRMKNNPVLIGEPGVGKTAIIEGLAQRIFSKDVPESLINCRIIELDMGALIAGAKYRGEFEERLKAVLSEIKESSGEIILFIDELHLLVGTGKTDGAMDASNLLKPMLARGELHCIGATTLDEYRKYIEKDAALARRFQPVYVSEPTVEDTISILRGIKEKYELHHAVRISDSAIVAAATLSNRYITDRYLPDKAIDLIDEACSRMKIELSSKPEELDELDRRIIQIKIELAALKKENDEHSKKKIEHLTTALEKLESQSYDMGAKWQAEKSKLQQTQKLKEELDRSRNELERAERDANLAKASELKYGIIPEIMKKLQEAESMDNKGLLKEIVSESDIASIISRITGIPIDTMLSSERERLLVMEQKLRESVIGQDKAIKGVSDAVRRSRAGIQDINRPLGSFLFLGPTGVGKTELTKALAGFLFDDRNAILRIDMSEYMEKHAISRLIGAPPGYIGYDQGGVLTEAVRRRPYQVILFDEVEKAHPDIFNIMLQILDEGRLTDSQGITVDFKNTIIVLTSNLGAEILVNQKEDEDTYKVKDEVMEYVKAVFKPEFLNRLDEIILFHRLNRNNIHDIVKIQLESLKKILLAQNIILEFDESALNYLAEKGYDPSFGARPLKRLIQREIQNNLAKMILAGEISSGKTVKINSKDKELKVTMS

SEQ ID NO: 6901 - protein, 858 aa, Rickettsia prowazekii
MNIDKFTAHAKSVIANHQSLAIKNDHQQILPLHLLSSLLSEETGIIQALINNIGGNINLLKDQVQLELNKIPKIQVDGGGQIYYSAEDLKVLEKSSSIAKDSGDSFVTIERIFEALTYDNTIAGKILTNNGINSKKLATAILHLRKGKKADTESAENNYDALKRYGRDVTELAENGKLDPIIGRDEEIRRAVQVLSRRMKNNPVLIGAPGVGKTAIIEGLAQRIFSKDVPETLINCRIIELDIGALIAGAQYRGEFEKRLKAVLSEIKESSGEIILFIDELHLLVGTGKVDGAMDASNLLKPMLARGELHCIGATTLDEYRKYIEKDAALARRFQPVYVGEPSVEDTISILRGIKEKYELHHAVRISDSAIVAAATLSNRYITDRYLPDKAIDLIDEACSRMKIELSSKPEELDELDRRIIQIKIELAALKKENDEHSKKKITSLTEELKKLESKSYDMNTKWQAEKSKLQQAQKLKEELEQARIDLERAERDANLAKASELKYGIIPEIMNKLQEAENMDNKGLLKEIVSESDIASIISRITGIPIDTMLSSERERLLVIEQKLCESVIGQDEAIKGVSDAVRRSRSGIQDINRPLGSFLFLGPTGVGKTELTKALAGFLFDDRNALLRIDMSEYMEKHSISRLIGAPPGYIGYDQGGVLTESVRRRPYQVILFDEVEKAHLDIFNIMLQILDEGRLTDSQGITVDFKNTIIVLTSNLGAEILVNQKEGEDTYKVRDEVMQYVRAVFKPEFLNRLDEIILFHRLNRNNIHDIVKIQLGSLKKILLQQNIILEFDESALNYLAEKGYDPSFGARPLKRLIQREIQNNLAKMILAGEISSGNTVKIRREKEELSINIID

SEQ ID NO: 6902 - protein, 867 aa, Chlamydia trachomatis
MEKFSDAVSEALEKAFELAKNSKHSYVTENHLLKSLLQNPGSLFCLVIKDVHGNLGLLTSAVDDALRREPTVVEGTAVASPSPSLQQLLLNAHQEARSMGDEYLSGDHLLLAFWRSTKEPFASWRKTVKTTSEALKELITKLRQGSRMDSPSAEENLKGLEKYCKNLTVLAREGKLDPVIGRDEEIRRTIQVLSRRTKNNPMLIGEPGVGKTAIAEGLALRIVQGDVPESLKEKHLYVLDMGALIAGAKYRGEFEERLKSVLKGVEASEGECILFIDEVHTLVGAGATDGAMDAANLLKPALARGTLHCIGATTLNEYQKYIEKDAALERRFQPIFVTEPSLEDAVFILRGLREKYEIFHGVRITEGALNAAVVLSYRYITDRFLPDKAIDLIDEAASLIRMQIGSLPLPIDEKERELSALIVKQEAIKREQAPAYQEEAEDMQKAIDRVKEELAALRLRWDEEKGLITGLKEKKNALENLKFAEEEAERTADYNRVAELRYSLIPSLEEEIHLAEEALNQRDGRLLQEEVDERLIAQVVANWTGIPVQKMLEGESEKLLVLEESLEERVVGQPFAIAAVSDSIRAARVGLSDPQRPLGVFLFLGPTGVGKTELAKALAELLFNKEEAMIRFDMTEYMEKHSVSKLIGSPPGYVGYEEGGSLSEALRRRPYSVVLFDEIEKADKEVFNILLQIFDDGILTDSKKRKVNCKNALFIMTSNIGSQELADYCTKKGTIVDKEAVLSVVAPALKNYFSPEFINRIDDILPFVPLTTEDIVKIVGIQMNRVALRLLERKISLTWDDSLVLFLSEQGYDSAFGARPLKRLIQQKVVTMLSKALLKGDIKPGMAVELTMAKDVVVFKIKTNPAV

SEQ ID NO: 6903 - protein, 442 aa, Bacteroides fragilis
ACVKLTDRYITDRNFPDKAIDALDEAGSRVHLTNVSVPKEIEDQEKLIEEAKNNKNEAVKSQNFELAASFRDKEKELAVQLDVMKKDWEERLKDNRETVDEEEIANVVSMMSGIPVQRMAQAEGIKLAGMKEDLQSKVIAQDDAIKKLVKAILRSRVGLKDPNKPIGTFMFLGPTGVGKTHLAKELAKYMFGSSDALIRIDMSEFMEKFTVSRLVGAPPGYVGYEEGGQLTEKVRRKPYSIVLLDEIEKAHPDVFNLLLQVMDEGRLTDSYGRMVDFKNTVIIMTSNIGTRQLKEFGRGVGFATQSRLDDKEFSRSVIQKALNKSFAPEFINRVDEIITFDQLSLEAITKIIDIELKGLYNRIESIGYKLVIEDKAKQFVASKGYDVQYGARPLKRAIQTYLEDGLSELIISADLNEGDTITVSLNEEKGELEMKNEAKTAE

SEQ ID NO: 6904 - protein, 848 aa, Mycobacterium tuberculosis H37Rv
MDSFNPTTKTQAALTAALQAASTAGNPEIRPAHLLMALLTQNDGIAAPLLEAVGVEPATVRAETQRLLDRLPQATGASTQPQLSRESLAAITTAQQLATELDDEYVSTEHVMVGLATGDSDVAKLLTGHGASPQALREAFVKVRGSARVTSPEPEATYQALQKYSTDLTARAREGKLDPVIGRDNEIRRVVQVLSRRTKNNPVLIGEPGVGKTAIVEGLAQRIVAGDVPESLRDKTIVALDLGSMVAGSKYRGEFEERLKAVLDDIKNSAGQIITFIDELHTIVGAGATGEGAMDAGNMIKPMLARGELRLVGATTLDEYRKHIEKDAALERRFQQVYVGEPSVEDTIGILRGLKDRYEVHHGVRITDSALVAAATLSDRYITARFLPDKAIDLVDEAASRLRMEIDSRPVEIDEVERLVRRLEIEEMALSKEEDEASAERLAKLRSELADQKEKLAELTTRWQNEKNAIEIVRDLKEQLEALRGESERAERDGDLAKAAELRYGRIPEVEKKLDAALPQAQAREQVMLKEEVGPDDIADVVSAWTGIPAGRLLEGETAKLLRMEDELGKRVIGQKAAVTAVSDAVRRSRAGVSDPNRPTGAFMFLGPTGVGKTELAKALADFLFDDERAMVRIDMSEYGEKHTVARLIGAPPGYVGYEAGGQLTEAVRRRPYTVVLFDEIEKAHPDVFDVLLQVLDEGRLTDGHGRTVDFRNTILILTSNLGSGGSAEQVLAAVRATFKPEFINRLDDVLIFEGLNPEELVRIVDIQLAQLGKRLAQRRLQLQVSLPAKRWLAQRGFDPVYGARPLRRLVQQAIGDQLAKMLLAGQVHDGDTVPVNVSPDADSLILG

SEQ ID NO: 6905 - protein, 472 aa, Escherichia coli K12
IHTIIGAGAASGGQVDAANLIKPLLSSGKIRVIGSTTYQEFSNIFEKDRALARRFQKIDITEPSIEETVQIINGLKPKYEAHHDVRYTAKAVRAAVELAVKYINDRHLPDKAIDVIDEAGARARLMPVSKRKKTVNVADIESVVARIARIPEKSVSQSDRDTLKNLGDRLKMLVFGQDKAIEALTEAIKMARAGLGHEHKPVGSFLFAGPTGVGKTEVTVQLSKALGIELLRFDMSEYMERHTVSRLIGAPPGYVGFDQGGLLTDAVIKHPHAVLLLDEIEKAHPDVFNILLQVMDNGTLTDNNGRKADFRNVVLVMTTNAGVRETERKSIGLIHQDNSTDAMEEIKKIFTPEFRNRLDNIIWFDHLSTDVIHQVVDKFIVELQVQLDQKGVSLEVSQEARNWLAEKGYDRAMGARPMARVIQDNLKKPLANELLFGSLVDGGQVTVALDKEKNELTYGFQSAQKHKAEAAH

SEQ ID NO: 6906 - protein, 867 aa, Chlamydia muridarum
MEKFSDAVSEALEKAFELAKDAKHSYVTENHLLKSLLQNPGSLFCLVIKDVHGNLGLLTSAVDDALHREPTVVEGAAIPKPSPSLQQLLLNAQEEARSMGDEYLSGDHLLLAFWKTTKEPFASWRKTVKTSPEALKELIIKLRQGSRMDSPSAEENLKGLEKYCKNLTILAREGKLDPVIGRDEEIRRTIQVLSRRTKNNPMLIGEPGVGKTAIAEGLALRIVQGDVPESLKDKHLYVLDMGALIAGAKYRGEFEERLKSVLKGVEASEGACILFIDEVHTLVGAGATDGAMDAANLLKPALARGTLHCIGATTLNEYQKYIEKDAALERRFQPIFVTEPSLEDAVFILRGLREKYEIFHGVRITEGALNAAVVLSYRYITDRFLPDKAIDLIDEAASLIRMQIGSLPLPIDEKERELSALIVKQEAIKREQAPAYQEEANEMQKAIDRVKEELAALRLRWDEEKGLIAGLKEKKNSLENLKFAEEEAERTADYNRVAELRYSLIPSLEKEIRLAEEALNQRDGRLLQEEVDERLIAQVVANWTGIPVQKMLEGESEKLLVLEESLEERVVGQPFAITAVSDSIRSARVGLSDPQRPLGVFLFLGPTGVGKTELAKALAELLFNKEEAMIRFDMTEYMEKHSVSKLIGSPPGYVGYEEGGSLSEALRRRPYSVVLFDEIEKADKEVFNILLQIFDDGILTDSKKRKVNCKNALFIMTSNIGSQELADYCAKKGTIVDKEAVLSVVAPALKNYFSPEFINRIDEILPFVPLTTEDIVKIVGIQMNRVALRLLERRISLTWDDSVVLFLSEQGYDGAFGARPLKRLIQQKVVTMLSKALLKGDIKSGMSVELTMAKDVVVFKTKTNSVV

SEQ ID NO: 6907 - protein, 214 aa, Plasmodium relictum
KTELAKILAKQLFGSETELIRFDMSEYMEKHSISRLIGSPPGYIGYSEGGQLTEQVYKKPYSIILFDEIEKAHPDIYNIMLQILDEGRLTDTTGKLIDFTNTIILLTSNLGCPKNYDIYLKNKDYLSNFDLEQINKNIKLNINNYFKPELLNRLTNILIFNPLNINNLLLIFDKFIHELKNKLNLNKININIHINNKIKYILTKISYNPLYGAR

SEQ ID NO: 6908 - protein, 856 aa, Helicobacter pylori 26695
MNLFEKMTDQLHETLDSALALALHHKNAEVTPMHMLFAMLNNSQGILIQALQKMPVDIQALRLSVQSELNKFAKVSQISKQNIQLNQALIQSLENAQGLMAKRGDSFIATDVYLLANMGLFESVLKPYLDAKELQKTLESLRKGRTIQDKNDDSNLESLEKFGIDLTQKALENKLDPVIGRDEEIIRMMQILIRKTKNNPILLGEPGVGKTAVVEGLAQRIMNKEVPKTLLNKRVIALDLSLLVAGAKYRGEFEERLKKVIEEVKKSANVILFIDEIHTIVGAGASEGGMDAANILKPALARGELHTIGATTLKEYRKYFEKDMALQRRFQPILLNEPSINEALQILRGLKETLETHHNITINDSALIASAKLSSRYITDRFLPDKAIDLIDEGAAQLKMQMESEPAKLSSVKRSIQRLEMEKQALEMEKKESNAKRMQEILKELSDLKEEKIQLEAQFENEKEVFKEISRLKMEMESLKKEAERFKRNGDYQQAGEIEYSKIPENKKKEEELQRKWEAMQQNGALLQNALTENNIAEIVSQWTHIPVQKMLQSEKNRVLNIESELQKRVVGQEKAIKAIAKAIKRNKAGLSDSNKPIGSFLFLGPTGVGKTESAKALAQFLFDSDKNLIRIDMSEYLEKHAMSRLIGAAPGYVGYEEGGQLTEAVRRKPYSVVLLDEVEKAHPDVFNLLLQVLDEGHLTDSKGVRVDFKNTILILTSNVASGALLEENLSEAEKQKAIKESLRQFFKPEFLNRLDEIISFNALDSHAVINIVGILFENIQKKALERGINITLDEEAKELIAEAGFDRFYGARPLKRALYEMVEDKLAELILEDKVKENDSVAFVVENNEIVPKIK

SEQ ID NO: 6909 - protein, 856 aa, Helicobacter pylori J99
MNLFEKMTDQLHETLDSAIALALHHKNAEVTPMHMLFAMLNNSQGILIQALQKMPVDIEALKLSVQSELNKFAKVSQISKQNIQLNQALIQSLENAQGLMAKRGDSFIATDAYLLANMNLFESVLKPYLDTKELQKTLESLRKGRTIQDKNDDSNLESLEKFGIDLTQKALENKLDPVIGRDEEIIRMMQILIRKTKNNPILLGEPGVGKTAVVEGLAQRIVNKEVPKTLLNKRVVALDLSLLVAGAKYRGEFEERLKKVIEEVKKSANVILFIDEIHTIVGAGASEGGMDAANILKPALARGELHTIGATTLKEYRKYFEKDMALQRRFQPILLNEPSINEALQILRGLKETLETHHNITINDSALIASAKLSSRYITDRFLPDKAIDLIDEGAAQLKMQMESEPAKLSSVKRSIQRLEMEKQALEMENKESNHKRMQEILKELSDLKEEKIQLEAQFENEKEVFKEISRLKMEMEGLKKEAERFKRNGDYQQAAEIEYSKIPEKEKKEKELQHKWETMQQNGALLQNALTENNIAEIVSQWTHIPVQKMLQSEKNRVLNIESELQKRVVGQEKALKAIAKAIKRNKAGLSDSNKPIGSFLFLGPTGVGKTESAKALAQFLFDSDKNLIRIDMSEYMEKHAISRLIGAAPGYVGYEEGGQLTEAVRRKPYSVVLLDEVEKAHPDVFNLLLQVLDEGHLTDSKGVRVDFKNTILILTSNVASGALLEEDLSEADKQKAIKESLRQFFKPEFLNRLDEIISFNALDSHAIINIVGILFENVQKKALERGINITLDEKAKELIAEAGFDRFYGARPLKRALYEMVEDKLAELILEDKIKENDSVAFVVENNEIVPKIK

SEQ ID NO: 6910 - protein, 860 aa, Dichelobacter nodosus
MEFMQMSKKFTARFQEALSAAQSLAVGKDHAYIEPLHIFSALLDQEGSSIIAIAQRAGGQIGAVRQAVMQALERLPRVKNPTGDVNISPESMRLLNLCDKYAQQNGDEYISSELFLRAVYDAKGDLEQLLRANGLEKAAVVAAIDAVRGGEAVTDEYAEDKRGALKKYTLDVTQRPLDGKIDPVIGRDEEIRRAMQILQRRSKNNPVLIGEPGVGKTAIVEGLAQRIADRAVPESLKGKRLLSLDLAALLAGTKYRGEFEERLKAVLDEITKADGQIILFIDEIHTMVGAGKSEGSLDAGNMLKPALARGDLHCIGATTLDEYRQYMEKDAALERRFQKVIVDEPSVEDTIAILRNLQERYEVHHGINITDPALVAAAQLSHRYISGRKLPDKAIDLMDEAAAQIRMELDSKPEVMDKIDRRLIQLQIERMALEKETDAASKRRLSDLEAEIAAQEKEYADLEEIWLAEKAGNAGAAEIKEQLDKLRVELEAAKRRGDFARASEIQYGLIPAKEKQLLENEQQTEQRPHRLMRNKVTAEEIAEIVSRWTGIPVAKMMEGEKERLLHLETVLNERVVGQKTAVEAVANAIRRNRAGLSDPKRPIGSFLFLGPTGVGKTELCRTLAQFLFDSEENMVRIDMSEFMEKHSVARLIGAPPGYVGYDQGGYLTEAVRRKPYSVVLFDEVEKAHSDVFNTLLQVLDEGRLTDGQGRTVDFRHTVIIMTSNLGSDMIQLLAEKSYEEMKSAVMEIVMAHFRPEFINRIDEAIVFHGLAKTHMYRIAQIQLERLRQRLQTRELLLSVEEDAINQLVELGYDPLFGARPLKRAIQNYIENPLAQALLAGQYLPQSTITIGFDGTNFTFH

SEQ ID NO: 6911 - protein, 731 aa, Dichelobacter nodosus
MQMSKKFTARFQEALSAAQSLAVGKDHAYIEPLHIFSALLDQEGSSIIAIAQRAGGQIGAVRQAVMQALERLPRVKNPTGDVNISPESMRLLNLCDKYAQQNGDEYISSELFLRAVYDAKGDLEQLLRANGLEKAAVVAAIDAVRGGEAVTDEYAEDKRGALKKYTLDVTQRPLDGKIDPVIGRDEEIRRAMQILQRRSKNNPVLIGEPGVGKTAIVEGLAQRIADRAVPESLKGKRLLSLDLAALLAGTKYRGEFEERLKAVLDEITKADGQIILFIDEIHTMVGAGKSEGSLDAGNMLKPALARGDLHCIGATTLDEYRQYMEKDAALERRFQKVIVDEPSVEDTIAILRNLQERYEVHHGINITDPALVAAAQLSHRYISGRKLPDKAIDLMDEAAAQIRMELDSKPEVMDKIDRRLIQLQIERMALEKETDAASKRRLSDLEAEIAAQEKEYADLEEIWLAEKAGNAGAAEIKEQLDKLRVELEAAKRRGDFARASEIQYGLIPAKEKQLLENEQQTEQRPHRLMRNKVTAEEIAEIVSRWTGIPVAKMMEGEKERLLHLETVLNERVVGQKTAVEAVANAIRRNRAGLSDPKRPIGSFLFLGPTGVGKTELCRTLAQFLFDSEENMVRIDMSEFMEKHSVARLIGAPPGYVGYDQGGYLTEAVRRKPYSVVLFDEVEKAHSDVFNTLLQVLDEGRLTDGQGRTVDFRHTVIIMTSNLGSDMIQLLA

SEQ ID NO: 6912 - protein, 863 aa, Nitrosomonas europaea
MRFDKFTTKFQQALADAQSMALGQDHPYIEPQHLLLALMQQDDGSITSLLQRAGVNAQPLRQALTQSLKLLPKVEGTGGEINVSRDLANLLNLTDKEAQKRGDQYIASEMFLLAALEDKGETGRLLKQYGATRAALEQAVDSVRGGEKVTDAEAEGSREALKKYTLDLTERARSGKLDPVIGRDDEIRRTIQVLQRRTKNNPVLIGEPGVGKTAIVEGLAQRIVNGEVPETLKNKRVLSLDMAALLAGAKYRGEFEERLKAVLKELAQDEGRTIVFIDELHTMVGAGKAEGAMDAGNMLKPALARGELHCVGATTLDEYRKYVEKDAALERRFQKVLVDEPGVEATIAILRGLQEKYELHHGVEITDPAIVAAAELSHRYITDRFLPDKAIDLIDEAAARIRMEQDSKPEVMDKLDRRLIQLKIEREAVRKEKDDASKKRLALLEEEISKLEREYADLDEILKAEKSRAKGSQEIKEELDKLRREEEAARRKGDLQRASELLYGRIPQLEAQLAEQLHHAESAEEAVQPKLFRTQVGAEEIAEVVSRATGIPVSKMMQGEREKLLFMEDKLHERVIGQDEAVRLVSDAIRRSRSGLADPNRPYGSFLFLGPTGVGKTELCKALAGFLFDSEEHLIRVDMSEFMEKHSVARLIGAPPGYVGYEEGGYLTEQVRRKPYSVILLDEVEKAHPDVFNVLLQVLDDGRMTDGQGRTVDFKNTVIVMTSNLGSQMIQQMSGDDYQVIKLAVMGEVKTYFRPEFINRIDEVVVFHALGEAHIKSIARIQLSNLGKRLAQMEMKLVVSEPALTKLAEVGFDPVFGARPLKRAIQAQIENPLAKELLEGHFSAGDTILVEYSNGHMQFTAQR

SEQ ID NO: 6913 - protein, 871 aa, Cytophaga hutchinsonii
MNINNYTIKGQEAFQKAMEIVAANEQQSIESVHLLKGIIVADENVVPFLFKKNNINPVTFNQTLDAVIKTYGKVSGGSPYLSNDATQVLNKATALSKEFGDEYISIEHMLLALVSGKDKAATLLKDAGLSEKGLRAAIQELRGTSKVTDQHAEGKYRSLEKYSKNLNDLARSGKIDPVIGRDEEIRRVLQILSRRTKNNPILLGEPGVGKTAIAEGLAQRIVSGDVPENLKSKQLISLDMGLLVAGAKYKGEFEERLKSVIKEVIDSDGEIVLFIDEIHTLIGAGGGEGAMDAANLLKPALARGELHAIGATTLKEYQKYIEKDKALERRFQAVIVDEPNTQDAISILRGIKEKYEVHHGIRIQDDAIIAAVELSQRYISDRYLPDKAIDLMDEASAKLRIELDSMPQELDEILRRIMQLEIEREAIRRENNKEKETILSRELAELNEQKSQIMAKWQEEKRVIDGLKQAKEDIDRYKMEAEQAERNGDYGKVAEIRYGKIQESEKQLVEFNKQLQELKQTLGSSMLKEEVTPEDIAEVVAKWTGIPVSKMLQSEREKLLHLEEELGKRVAGQAEAIEAISDAVRRSRAGLQDPKRPIGSFIFLGTTGVGKTELAKALADYLFNDDNAMVRIDMSEYQESHAVSRLVGAPPGYIGYEEGGQLTEAVRRKPYSVILLDEIEKAHPDVFNILLQVLDEGRLTDNKGRVANFKNAIIIMTSNMGAHVIQENFDKLTAANEDQVVEETKNEVIDLLRKTIRPEFLNRVDEIIMFRPLTRKEIRKIVGIQFSLIQKRLEENGIKVEASTEVLDKLGELGFDPQFGARPLKRVMQRLILNELSKEILSGNIQKESVVGITLGEDGNLQFLNLDSVPL

SEQ ID NO: 6914 - protein, 586 aa, Bos taurus
IDPFNNDMDDLFNQLMGGMNGVNSENRRYLINGREVTPEEYAAFRQTGKLPGVTDPTQAKTKQPQPDSMLAKLGRNLTQEAKEGKLDPVIGRNKEIQETAEILSRRTKNNPVLVGDAGVGKTAVVEGLAQAIVAGDVPAAIKNKQIISIDISSLEAGTQYRGSFEENMQKLIDEVKKDGNVILFFDEIHQIIGAGNAGDASGSKGMADILKPALSRGEVTLIGATTQDEYRNTILKDAALSRRFNQVTVNAPSKEDTFKILQGLRKLYEKHHNVSLPDEVLKAAIDYSVQYIPQRSLPDKAIDLIDVTAAHLASKHPVKDAKTIEEEIKKTEAKQQEAVEKEDYQAAQEAKDQVAKLQDQLKDHSESERVVATPSDVAAAVERMTGIPVSKMGASDIERLKGLATRLEGKVIGQQEAVEAVSRAIRRNRAGFDEGNRPIGSFLFVGPTGVGKTELAKQLALDMFGSTNDIIRLDMSEYTDRTAVSKLIGTTAGYVGYDDNSNTLTEKVRRHPYSIVLLDEIEKANPQVITLLLQVLDDGRLTDGQGNTVDFKNTIIIATSNAGFSSDAVAGEDAKLMDKLQPYFRP

SEQ ID NO: 6915 - protein, 879 aa, Salmonella typhimurium LT2
METPVSRSALYGKLAGPLFRSLESATAFCKLRSNPWVELTHWLHQLTQQPDNDILHVLRHYQIPLSDVEKALLRQLDMLPAGASAISDFSHHIDLSVEKAWMLASVRYGDNKIRSGWLLLALLTTPELRRVLSSICAPLATLPVDELTEILPSLIETSPEAQERPYDGSGLASAIPGESSQAIPNGGQDGKSALAKYCQDMTAQARDGKIDPVTGREHEIRTMTDILLRRRQNNPLLTGEAGVGKTAVVEGFALAIAQGEVPPALREVRLLALDVGALLAGASMKGEFESRLKGLLEEAGRSPQPVILFVDEVHTLVGAGGASGTGDAANLLKPALARGTLRTIGATTWSEYKRHIEKDPALTRRFQVLQIAEPEEIPAMEMVRGLVDTLEKHHNVLILDEAVRAAVQLSHRYIPARQLPDKAISLLDTAAARVALTLHTPPASVQFLRQQLKAAEMERSLLQKQEKMGIQSDERRDALMARIFSLNNELTASESRWQRELELVHTLQELRLAESDADDKTTLQQAETALREWQGDAPVVFPEVSAAVVAAIVADWTGIPAGRMVKDEASQVLELPARLAQRVTGQDGALAQIGERIQTARAGLGDPRKPVGVFMLAGPSGVGKTETALALAEAIYGGEQNLVTINMSEFQEAHTVSTLKGAPPGYVGYGEGGVLTEAVRRHPWSVVLLDEIEKAHHDVHELFYQVFDKGGMEDGEGTHVDFKNTTLLLTTNVGSDLISQMCEDPALMPDATGLKEALMPELRKHFPAAFLGRVTVIPYLPLDETSRGVIARLHLDRLVARMSEQHGVTLTYSEELVAHIVACCPMHETGARLLIGYIEQHILPRLSRYWLQAMTEKAAIRQIDIGVNGDEQIVFEIVC

SEQ ID NO: 6916 - protein, 758 aa, Salmonella typhimurium LT2
MLNQELELSLNMAFARAREHRHEFMTVEHLLLALLSNPSAREALEACSVDLVALRQELEAFIEQTTPVLPASEEERDTQPTLSFQRVLQRAVFHVQSSGRSEVTGANVLVAIFSEQESQAAYLLRKHEVSRLDIVNFISHGTRKDEPSQSSDLGNQPTGDEQAGGEERMENFTTNLNQLARVGGIDPLIGREKELERAIQVLCRRRKNNPLLVGESGVGKTAIAEGLAWRIVQGDVPEVMADCTIYSLDIGSLLAGTKYRGDFEKRFKALLKQLEQDTNSILFIDEIHTIIGAGAASGGQVDAANLIKPLLSSGKIRVIGSTTYQEFSNIFEKDRALARRFQKIDITEPSVEETVQIINGLKPKYEAHHDVRYTAKAVRAAVELAVKYINDRHLPDKAIDVIDEAGARARLMPVSKRKKTVNVADIESVVARIARIPEKSVSQSDRDTLKNLGDRLKMLVFGQDNAIEALTEAIKMSRAGLGHEHKPVGSFLFAGPTGVGKTEVTVQLSKALGIELLRFDMSEYMERHTVSRLIGAPPGYVGFDQGGLLTDAVIKHPHAVLLLDEIEKAHPDVFNLLLQVMDNGTLTDNNGRKADFRNVVLVMTTNAGVRETERKSIGLIHQDNSTDAMGEIKKVFTPEFRNRLDNIIWFDHLSGEVIHQVVDKFIVELQAQLDQKGVSLEVSQEARDWLAEKGYDRAMGARPMARVIQDNLKKPLANELLFGSLVDGGQVTVALDKEKNALTYDFQSAQKHKPEAAH

SEQ ID NO: 6917 - protein, 865 aa, Streptomyces coelicolor A3(2)
MDAELTNRSRDAINAASNRAVTEGNADLTPAHLLLALLQGQDNENITDLLAAVEADLAAVRTGAERIVAGLPSVTGSTVAPPQPSREMLAVVADAQARAKELGDEYLSTEHLLLGIAAKGGAAGEVLEGQGASAKKLQEAFRKARGGRRVTTADPEGQYKALEKFGTDLTAAARDGKLDPVIGRDQEIRRVVQVLSRRTKNNPVLIGEPGVGKTAVVEGLAQRIVKGDVPESLKDKRLVALDLGAMVAGAKYRGEFEERLKTVLAEIKDSDGQVVTFIDELHTVVGAGAGGDSAMDAGNMLKPMLARGELRMVGATTLDEYRERIEKDPALERRFQQVLVAEPTVEDSIAILRGLKGRYEAHHKVQIADSALVAAASLSDRYITSRFLPDKAIDLVDEAASRLRMEIDSSPVEIDELQRSVDRLKMEELAIGKETDAASLERLERLRRDLADKEEELRGLTARWEKEKQSLNRVGELKEKLDELRGQAERAQRDGDFDTASKLLYGEIPDLERDLEAASEAEEEVARDTMVKEEVGADDIADVVASWTGIPAGRLLEGETQKLLRMEDELGKRLIGQTQAVRAVSDAVRRSRAGIADPDRPTGSFLFLGPTGVGKTELAKALADFLFDDERAMVRIDMSEYSEKHSVARLVGAPPGYVGYEEGGQLTEAVRRRPYTVVLLDEVEKAHPEVFDILLQVLDDGRLTDGQGRTVDFRNTILVLTSNLGSQYLVDPTTGEAEKKQQVLEVVRSSFKPEFLNRLDDLVVFSALSQEELSRIARLQINGLARRLAERRLTLEVTDEALAWLAEEGNDPAYGARPLRRLVQTAIGDRLAREILSGEIKDGDTVRVDRFGDELIVGPASGKTL

SEQ ID NO: 6918 - protein, 837 aa, Streptomyces coelicolor A3(2)
MSMSSFGFGASDPFSDLFNRFFGTSPASSPPAVQRVPIGRMLTESSQELLNLAARRSLEDGTSDLDTEHLLWAATKVEPARGLLARAGADPDALASRIAEVLPREAGEPSAEPGLTPAAKRTLATAYARSRASGVSYIGPEHILGALLADGDTGAARLLGAQGQDIGKLEGLTEQAARPGGAPGDDGGRPATTLDEYGRDLTDEAKAGKLDPVVGRAEEIEQTVEILSRRSKNNPVLIGEPGVGKTAIVEGLAQRIVAGEVPNTLKDKRVVALDLSAMVAGAQYRGQFEERLKKVIEDVQQARGDIILFIDELHTVVGAGASGESSMDAGNMLKPALARGELHVVGATTIDEYRKYVEKDAALERRFQPVMVPEPSVEETVQILEGLRDAYEAHHQVRFADGALTAAAELSDRYVSDRFLPDKAIDVMDQAGARVRLRSASRSTEVVGREDRIAKLRREQEQAVAAEDYARAGELKREIAEAEGELAGIEERREGVVSVTADDIADVISRRTGIPVSQLTAGEKERLLRLEEEMHARIVGQDEAVTAVSRAVRRNRAGMGDPDRPVGSFLFLGPTGVGKTELAKTLAELLFGEENRMIRFDMSEFQEKHTVARLVGAPPGYVGYEEAGQLTEKVRRQPYSVVLFDEVEKAHPDVFNTLLQILDDGRLTDGQGRTVDFRHCVVIMTSNIGAHRILDHKGDVSDLKDELMQELRGRFLPEFLNRIDEIIVFHGLTEDDLSRIVDHLLAQSERRVHAQGMTLKVTEAAKKLLIAHGHQPEFGARPLRRTIQAELDNRVADLLLGGEADPGDTIVADVVDDSLHCTVDKSGTARPAEASGT

SEQ ID NO: 6919 - protein, 841 aa, Streptomyces coelicolor A3(2)
MFERFTDRARRVVVLAQEEARMLNHNYIGTEHILLGLIHEGEGVAAKALESLGISLEAVRQQVEEIIGQGQQAPSGHIPFTPRAKKVLELSLREALQLGHNYIGTEHILLGLIREGEGVAAQVLVKLGADLNRVRQQVIQLLSGYQGKETATAGGPAEGTPSTSLVLDQFGRNLTQAARESKLDPVIGREKEIERVMQVLSRRTKNNPVLIGEPGVGKTAVVEGLAQAIVKGEVPETLKDKHLYTLDLGALVAGSRYRGDFEERLKKVLKEIRTRGDIILFIDELHTLVGAGAAEGAIDAASILKPMLARGELQTIGATTLDEYRKHLEKDAALERRFQPIQVAEPSLPHTIEILKGLRDRYEAHHRVSITDEALVQAATLADRYISDRFLPDKAIDLIDEAGSRMRIRRMTAPPDLREFDEKIAGVRRDKESAIDSQDFEKAASLRDKEKQLLAAKAKREKEWKAGDMDVVAEVDGELIAEVLATATGIPVFKLTEEESSRLLRMEDELHKRVIGQKDAVKALSKAIRRTRAGLKDPKRPGGSFIFAGPSGVGKTELSKALAEFLFGDEDALISLDMSEFSEKHTVSRLFGSPPGYVGYEEGGQLTEKVRRKPFSVVLFDEVEKAHPDIFNSLLQILEDGRLTDSQGRVVDFKNTVIIMTTNLGTRDISKGFNLGFAAAGDTKSNYERMKNKVQDELKQHFRPEFLNRVDDVVVFPQLSQDDILQIVDLMIQKVDERLKDRDMGIELSQSAKELLSKRGYDPVLGARPLRRTIQREVEDSLSEKILFGELRPGHIVVVDTEGEGDAATFTFRGEEKSTLPDVPPIEQAAGGAGPNLSKEA

SEQ ID NO: 6920 - protein, 842 aa, Streptomyces coelicolor A3(2)
MTSGYMGPEGDPFAEFLARFFGGPRPRQIDIGRLLSQPARELVRGAAQYAAEHGSRDLDTEHLLRAALATEPTRGLLSRAGADPDSLASQIDERTGPVQHPPGEVPPPTSLSLTPAVKRALLDAHELARSTGTGYIGPEHVLSALAANPDSAAGHILNAARFAPSNLPTETPEAAKGRTESARTTNTPTLDKYGRDLTDLAQQGRIDPVIGREEEIEQTVEVLSRRGKNNPVLIGDAGVGKTAIVEGLAQRITDGDVPDVLIGRRVVALDLTGVVAGTRYRGDFEERMNNIVGEIRAHSDELIIFIDELHTVVGAGGGGESGSMDAGNILKPALARGELHIVGATTLEEYRRIEKDAALARRFQPILVPEPTTADAIEILRGLRDRYEAHHQVRYTDEALVAAVEMSDRYLTDRRLPDKAIDLIDQAGARVRLRARTKGTDVRALEREVDQLVRDKDQAVADEQYEQATQLRDRIVGLKQRITEATGDGQADEGLDLVVDTESIAEVVSRQTGIPVSSLTQEEKDRLLGLESHLHERVVGQDEAVRVVSDAVLRSRAGLSSADRPIGSFLFLGPTGVGKTELARALAEALFGSEDRMVRLDMSEYQERHTVSRLVGAPPGYVGHEEAGQLTEVVRRHPYSLLLLDEVEKAHPDVFNILLQVLDDGRLTDSQGRTVDFSNTVVVMTSNLGSDVITRRGAGIGFGAGGAEADEEARREQVLRPLREHFRPEFLNRVDEIVVFRQLSGEQLRQITSLLLEQTRRMVHAQGVTVDFTDAAVDWLAERGYQPEYGARPLRRTIQREVDNELSRLLLDGRVAEGGRVTVDVEDGRLAFRTPERPVPEL

SEQ ID NO: 6921 - protein, 678 aa, Mus musculus
MMLSAVLRRTTPAPRLFLGLIKSPSLQSRGGAYGRGVVTGDRGEPQRLRAAAWVRPGASSTFVPGRGAATWGRRGERTEIPYLTAASSERGPSPEETLPGQDSWNGVPNKTGLGMWALAMALVVQCYSKNPSNKDAALMEAARANNVQEVRRLLSEGADVNARHKLGWTALMVASISHNESVVQVLLAAGADPNLGDEFSSVYKTANEQGVHSLEVLVTREDDFNNRLNHRASFKGCTALHYAVLADDYSIVKELLDRGANPLQRNEMGHTPLDYAREGEVMKLLKTSETKYMEKQRKREAEERRRFPLEQRLKEHIIGQESAIATVGAAIRRKENGWYDEEHPLVFLFLGSSGIGKTELAKQTAKYMHKDAKKGFIRLDMSEFQERHEVAKFIGSPPGYIGHEEGGQLTKKLKQCPNAVVLFDEVDKAHPDVLTIMLQLFDEGRLTDGKGKTIDCKDAIFIMTSNVASDEIAQHALQLRQEALEMSRNRIAENLGDVQMSDKITISKNFKENVIRPILKAHFRRDEFLGRINEIVYFLPFCHSELIQLVNKELNFWAKRAKQRHNITLLWDREVADVLVDGYNVHYGARSIKHEVERRVVNQLAAAYEQDLLPGGCTLRITVEDSDKHLLKSPELPSPQAEKRPPTLRLEIIDKDSKTRKLDIQAPLHPEKPTTHRK

SEQ ID NO: 6922 - protein, 677 aa, Mus musculus
MMLSAVLRRTTPAPRLFLGLIKSPSLQSRGGAYGRGVVTGDRGEPQRLRAAAWVRPGASSTFVPGRGAATWGRRGERTEIPYLTAASSERGPSPEETLPGQDSWNGVPNKTGLGMWALAMALVVQCYSKNPSNKDAALMEAARANNVQEVRRLLSEGADVNARHKLGWTALMVASISHNESVVQVLLAAGADPNLGDEFSSVYKTANEQGVHSLEVLVTREDDFNNRLNHRASFKGCTALHYAVLADDYSIVKELLDRGANPLQRNEMGHTPLDYAREGEVMKLLKTSETKYMEKQRKREAEERRRFPLEQRLKEHIIGQESAIATVGAAIRRKENGWYDEEHPLVFLFLGSSGIGKTELAKQTAKYMHKDAKKGFIRLDMSEFQERHEVAKFIGSPPGYIGHEEGGQLTKKLKQCPNAVVLFDEVDKAHPDVLTIMLQLFDEGRLTDGKGKTIDCKDAIFIMTSNVASDEIAQHALQLRQEALEMSRNRIAENLGDVQMSDKITISKNFKENVIRPILKAHFRRDEFLGRINEIVYFLPFCHSELIQLVNKELNFWAKRAKQRHNITLLWDREVADVLVDGYNVHYGARSIKHEVERRVVNQLAAAYEQDLLPGGCTLRITVEDSDKHLLKSPELPSPQAEKRPPTLRLEIIDKDSKTRKLDIQAPLHPEKVCYTI

SEQ ID NO: 6923 - protein, 955 aa, Mus musculus
MVLAVQCYKNPFNKDAALMGAARANNVQEVRRPLLEGADVNIRHKRGWIALMVTAISHNESVVQEHIIGQESAITTVGAAMRRKENGWYEEGHPLIVLFLGSSGIGKTELAKQTAKYMHKDAIKGFIGLDMSEFQDRHEIAKFIGSPPGYVGHEEGGQLTKKVKQCSNAVVLLDEVDKTSDKITISKNLKENVIRSILKAHFRRVKFQGINEIVYFLPFCHSELLQLVNKELNFRAKRAKQRHNITLLCDREWEDALVDGYNVHYGACSIKNEVERCVVNQLAAAYEQDLLPGGCTLRITVEDSDKIVRIYRELQEISYYLVKVNKGLLDSVKYRAEHKHKIGVPPVCGSRVNEHRRMTTVLYLIIWSETTTQDKDEDNEENLPGVKLQTPTRGKKTCLMRRSLWLKDCCTPLGGSLDEQRGGAPKGVFVRNGGSFEDDLLLGAEANHLHEPDAQVENYNNILAKERRLQFHHVSEPLELYEKDPEEILCNLGFGRDEPDTASKIPSRFLNSSPFARGIDIKVFLSAQMQQLEVENSNYALTSQFCQIEVLTTVANAFSSLYSQVSGTPLQRVGRETALMQTDFPRKQTVTLATRRKVKKSREAQSQEKDALQKSAVTDPDFGHDGSMSSHCELESNSELKSAQESWSQIEPCAPLAIPSTRNVTMQQKDPLGDGRGHVPGTCQLSFAKSKRGHLLRTASQHSNSSIFAEDSTDCSFLNHLQVHEFLQAMGSSADICDSETTVTSLGEDIVTPTAQDQPYFSESEEESLASLQKGKQTTKISLRQETRCSPPSFTYKYTPEEEQELEKQGTEHDSQSLVKSTIFIPPPSVKNEEAPQSEGTRLEECHCGRPAPCPPFAPVSQSTWSLHSVYSELQDRPLCEHTRTPSAHIVPNISGAAAAERHWIVQTNEQTDTQTTELDQAAHFEDVLTSEWRSGEEALSSFPQVMKDYRFHQN

SEQ ID NO: 6924 - protein, 331 aa, Mus musculus
MMLSVVWRRTIPAPQLLLGCSPSPEKTLPVRNSWNGVPNKALMVAAISHNESVVQVLLAAEADSNLGDGFSSVYKTANEQGVHSLEVLVIQEDDFNNRLNYLASFKSCTALHYAVQAHNYSIVKELLDGEANPLQRNMMGHTTLDYAQEEEVIKLLKTSETKYMEKQRKLGYIGHEEGGQLTKKLKQCPNAVVLFDEIDKAHPDVLTIMLQLFDEGYLTDGKGKTIDCKDAIFIMTPISSSSWSTRNFRTKRAKQRHITLLCDRKVADVLVDGYNVHYSACSIKHKVERCVLKQLAAAYEQDLLPGGRHHSNQRRCVTPSSIHLSVCALNI

SEQ ID NO: 6925 - protein, 677 aa, Rattus norvegicus
MMLSAVLRRTAPAPRLFLGLIKSPSLQSRGGAYNRSVITGDRGEPQRLRTAAWVRPGASSVLFPGRGAATGGRRGERTEIPYLTAASSGRGPSPEETLPGQDSWNGVPNKAGLGMWALAMALVVQCYNKNPSNKDAALMEAARANNVQEVRRLLSEGADVNARHKLGWTALMVAAISHNESVVQVLLAAGADPNLGDDFSSVYKTANEQGVHSLEVLVTREDDFNNRLNHRASFKGCTALHYAVLADDYSIVKELLGGGANPLQRNEMGHTPLDYAREGEVMKLLKTSETKYMEKQRKREAEERRRFPLEQRLEQHIIGQESAIATVGAAIRRKENGWYDEEHPLVFLFLGSSGIGKTELAKQTAKYMHKDAKKGFIRLDMSEFQERHEVAKFIGSPPGYIGHEEGGQLTKKLKQCPNAVVLFDEVDKAHPDVLTIMLQLFDEGRLTDGKGKTIDCKDAIFIMTSNVASDEIAQHALQLRQEALEMSRNRIAENLGDVQISDKITISKNFKENMIRPILKAHFRRDEFLGRINEIVYFLPFCHSELIQLVNKELNFWAKRAKQRHNITLLWDREVADVLVDGYNVQYGARSIKHEVERRVVNQLAAAYEQDLLPGGCTLRITVEDSDKQLLKSPELPSPQAEKRPPTLRLEIIDKDSKTHKLDIQAPLHPEKVCYTI

SEQ ID NO: 6926 - protein, 835 aa, Nostoc sp. PCC 7120
MKALLEQDGLASGILTKAGVNLQKISDRTEQYIQRQPKVSGNSTSVYLGRSLDTLLDRAEAHRKDFQDEYISIEHLLLAYPKDDRFGKGLFQEFALDESKLKNIIKQVRGSQTVTDQNPEGKYQSLEKYGRDLTEAARKGQLDPVIGRDDEIRRTIQILSRRTKNNPVLIGEPGVGKTAIAEGLAQRIVAGDVPQSLKDRKLISLDMGAMIAGAKFRGEFEERLKAVLKEVTESGGNIVLFIDEIHTVVGAGATQGAMDAGNLLKPMLARGELRCIGATTLDEYRKYIEKDAALERRFQQVYVDQPSVEDTISILRGLKERYEVHHGVKISDSSLVAAATLSSRYISDRFLPDKAIDLVDEAAARLKMEITSKPEELDEIDRKILQLEMEKLSLQKESDAASRERLERLEKELADLKEEQRTLNTQWQSEKDVINKLQSVKEEIDKVNLEIQQAERNYDLNRAAELKYGNLTDLHRRLEATERELSQTQGTGKSLLREEVTEADIAEIISKWTGIPISKLVESEKEKLLHLEDELHHRVIGQDEAVTAVADAIQRSRAGLADPNRPTASFVFLGPTGVGKTELAKALASYMFDTEDALVRIDMSEYMEKHAVSRLIGAPPGYVGYEEGGQLTETIRRRPYAVILFDEIEKAHPDVFNIFLQILDDGRVTDAQGHTVDFKNTIIIMTSNIGSQYILDIAGDNSRYDEMRHRVMEAMRNSFRPEFLNRIDEVIIFHSLDKKELRQIVQLQVERLKARLDDRKISLRLSDVALDFLAEVGYDPVFGARPLKRAIQRELETQIAKAILRGEFNDGDTIFVDVQNERLSFSRLPVEVFSS

SEQ ID NO: 6927 - protein, 880 aa, Nostoc sp. PCC 7120
MQPTDPNKFTDKAWEVIVKSQDIVRAYQQQQLDVEHLILALIEDPTSLAVRILGRAEIDPIRLQQQLEAFTQRQTKVGKSDQLYLGRSLDVMLDRAEEIRERMKDGYISVEHMLLAFVDDERVGRKVLKGFNVDSAKIEASIKAVRGSQKVTDQNPESRYEALQKFGRDLTEQAKSGKLDPVIGRDDEIRRVIQVLSRRSKNNPVLIGEPGVGKTAIAEALAQRIVNGDVPESLKNRQLISLDIGSLIAGAKYRGEFEDRLKAVLREVTESNGNIVLFIDELHTVVGTGSNQQGAMDAGNLLKPMLARGELRCIGATTLDEFRKFIEKDAALERRFQQVYVDQPSVENTISILRGLKERYEVHHNVKISDSALVAAATLSARYIADRFLPDKAIDLVDEAAAQLKMEITSKPADLEAIDRRLMQLEMEKLSLAGEEKVAAPTKERLQRIELEITNLTEKQQDLNNQWQGEKQVLEAISLLKKEEDALRVQIEQAERAYDLNKAAQLKYGKLEGVQRDREAKEAKLLELQSQGSTLLREQVTEADIAEIVAKWTGIPVNRLLESERQKLLQLESHLHQRVIGQQEAVEAVSAAIRRARAGMKDPNRPIGSFLFMGPTGVGKTELARALAQFLFDADDALVRLDMSEYMEKHSVSRLVGAPPGYVGYEEGGQLSEAVRRHPYSVVLLDEVEKAHPDVFNILLQVLDDGRITDSQGRTVDFRNTVIVMTSNIGSEHILDVSGDDTQYETMRNRVMDALRSHFRPEFLNRVDDTILFHALSRSEMSHIIRIQLKRVESLLRDQKISFEISPAACDFLVEKGYDPVYGARPLKRAIQREIENPLATKILENTFISGDTIYIDQDENGLSFTNKAPVKVSVTQITT

SEQ ID NO: 6928 - protein, 839 aa, Nostoc sp. PCC 7120
MLKSAYRHDAGDGKNAMFERFTEKAIKVIMLAQEEARRLGHNFVGTEQILLGLIGEGTGVAAKVLKSMGVNLKDARIEVEKIIGRGSGFVAVEIPFTPRAKRVLELSLEEARQLGHNYIGTEHLLLGLIREGEGVAARVLENLGVDLSKVRTQVIRMLGETAEVSATGQSGRTKTPTLDEFGSNLTQMATDNKLDPVVGRAKEIERVIQILGRRTKNNPVLIGEPGVGKTAIAEGLASRIANKDVPDILEDKRVVTLDIGLLVAGTKYRGEFEERLKKIMDEIRQAGNVILVIDEVHTLIGAGAAEGAIDAANILKPALARGELQCIGATTLDEYRKHIERDAALERRFQPVMVGEPSVDETIEILYGLRDRYEQHHKLKISDEALVAAAKLSDRYISDRYLPDKAIDLVDEAGSRVRLMNSQLPPAAKELDKELRQILKEKDDAVRSQDFDRAGELRDREMEIKAEIRAIAQSKTNASGTEGQEPVVTEEDIAHIVASWTGVPVNKLTESESEKLLHMEDTLHQRLIGQEDAVKAVSRAIRRARVGLKNPNRPIASFVFSGPTGVGKTELAKSLASYFFGSEEAMIRLDMSEYMERHTVSKLIGSPPGYVGYNEGGQLTEAVRRRPYTVVLFDEIEKAHPDVFNMLLQILEDGRLTDAKGRTVDFKNTLLILTSNIGSKVIEKGGGGIGFEFSEDQTETQYNRIRSLVNEELKQYFRPEFLNRLDEIIVFRQLSKLEVTEIADIMLKEVFGRLTEKGITLEVSDRFKGRLIEEGYSPSYGARPLRRAIMRLLEDSLAEEILSGRIKDGDVALIDIDENGNVQVTSQQRRELLPQGVES

SEQ ID NO: 6929 - protein, 814 aa, Nostoc sp. PCC 7120
MFEHFTSEAIKVIMLAQEEARRLGHNFVGTEQILLGLMGEGTGVAAKVLTEMGVTLKDARREVEKIIGRGSGFVPPEIPFTPKVKSLFEQSFREAHNLGNNYINTEHLLLGLTEAGEGVAAKVLQNLGVDLKSVRSAVIRRLGEDPTVVVGGGGSRRNQTPMMEEFGRNLTKLAKEGKLDPVVGRQKEIERTVQILGRRTKNNPVLIGEPGVGKTAIAEGLAQRIINQDVPDILQDKQVVSLDMGSLVAGTRFRGDFEERIKKIVEEVRSAGNIILVIDEIHTLVGAGGTEGGLDAANILKPALARGELQCIGATTLDEYRQYIERDAALERRFQPIMVGEPSVAETIDILYGLRGAYEQHHKVHISDEAVVAAAQLADRYISDRFLPDKAIDLIDEAGSRVRLRNSQISPNKELKRQLTDITKSKNEAVRLQDFDKAAKLRDEEIALETELQAATTGQTIKPVVDEEDIAQIVASWTGVPVNKLTESESELLLHLEDTLHKRLIGQEQAVTSVSRAIRRARVGLKSPNRPIASFIFSGPTGVGKTELAKALAAYFFGAEDAMIRFDMSEYMESHTVSKLIGSPPGYVGYDEGGQLTEAVRRRPYTVLLFDEIEKAHPDVFNMLLQLLDDGHLTDAKGRKVDFKNTLIILTSNIGSKVIEKGGGGLGFEFDNQAEASYNRIRNLVNEELKNYFRPEFLNRLDEVIVFTQLSRDEVKQIADIMLRDVASRLTEKGITLEVTERFKELVVTEGYNPSYGARPLRRAIMRLLEDSLAEVLLSGEITEGDTAIADVNDDGQVQIRQSEERELLLANVG

SEQ ID NO: 6930 - protein, 870 aa, Rhodobacter sphaeroides
MNLEKFTERSRGFLQAAQTIAMRESHQRLASEHLLKALMDDDQGLASNLIRRSGGEPARVAETVELTIAKLPKVSGDAQPFMDPGLVRVLDEAEKLAKKAGDSFVPVERILMALAMVASKAKDALDAGAVTAQKLNAAINDIRKGRTADTASAEEGYDALKKYARDLTQAARDGKIDPIIGRDDEIRRAMQVLSRRTKNNPVLIGEPGVGKTAIAEGLALRIVNGDVPESLKNKRLLSLDMGALIAGAKYRGEFEERLKAVLNEVTSAAGEIILFIDEMHTLVGAGKSEGAMDAANLIKPALARGELHCIGATTLDEYRKHVEKDAALARRFQPLMVEEPTVEDTISILRGIKEKYELHHGVKIADAALVAAATLSHRYITDRFLPDKAIDLVDEAASRLRMEVDSKPEELDALDRQILQAQIEAEALKKEDDAASKDRLAKLEKELSGMTERAAEMTAQWQAERDKLEAARDLKEQLDRARAELEQVKREGNLARAGELSYGVIPQIEKKLEEAEAREGDLLVSEAVRPEQIAEVVERWTGIPTSKMLEGEREKLLKMEEELGRRVIGQRAALRAVANAVRRARAGLNDERRPLGSFLFLGPTGVGKTELTKAVAEYLFDDDQAMVRIDMSEFMEKHSVARLIGAPPGYVGYDEGGVLTEAVRRRPYQVVLFDEVEKAHPEVFNVLLQVLDDGVLTDGQGRTVDFKQTLIILTSNLGAYALSQLPEGADPAPARAAVMEAVRGHFRPEFLNRLDEMVIFDRLSRDDMGQIVEIQLGLLGKRLATRKIGLELDAAAKQWLADEGYDPVYGARPLKRVIQRHLQDPLAEMILAGDVLDGSVVQVSAGADGLIIGDRVSSSRRERPQDAVVH

SEQ ID NO: 6931 - protein, 889 aa, Rhodobacter sphaeroides
MPRGSQETVKRKELVAKLNPTCLAAFSAAAQAAKARGNPYVELVHLIEALLAADRSDMALLMRAAGCDAGRLSADVARAVDALPRGASAVEEFSDHLFHAIREGWTFGSLRFGDDRVRSGYLLLGALRVPVLEALLMRISGAFGQVDAESLSETFRDLTQGSAEGDAAPPPARPGAADGSALARYATDLTARAREGRLDPVVGRDPEIRQIIDILMRRRQNNPILTGEAGVGKTAVVEGLALRLARGDVPPPLRPVTLWMLDLGLMQAGASMKGEFEKRLKSVIDEVHASDAPVILFIDEAHTLIGAGGAAGTGDAANLLKPALARGELRTIAATTWAEYKQHIEPDPALTRRFQVVRIEEPSEEAAIRMCRGVAAVLERHHRVEILDEAVGAAVRLSQRYLPARQLPDKAISLLDTACARVAVSQHATPAEVEDIDRRAQALALEAGILEREEAVGMDVTARRGEVEAARTAVAADRAAAEARWEAEKALVAEILELRARLRAEGDALDGTAAQAAEEAEPPKDDRAALLDRLRRCSRDLAEAQGERPLILPTVDRQAVASVVQDWTGIPMGRMLASRNERALGLADLLARRVVGQDHAMEAIASRIQTAQAGLGPPEKPLGVFLLCGPSGVGKTETALALAEQLHGGEQALITINMSEFQEAHTVSTLKGSPPGYVGYGKGGILTEAVRRKPYSVILLDEVEKAHPDVHEIFFQVFDKGRMDDSEGRQIDFRNTVILLTSNVGTDEIVEAAGQDLARVSATLRAPLLQVFPAALLGRMIVLPFLPLSDRMIAAIAGQKLEAIARRLKAGHGAELVLGEGVLETIRARCTEVESGGRMIDAILSGTLLPELSRKLLERQLAGAAFSRVTLTGGPAGFSYAFETEADHA

SEQ ID NO: 6932 - protein, 879 aa, Rhodopseudomonas palustris
MNVEKYTERVRGFIQSAQSLAMREGHQQFSPLHILKVLLDDSEGLAGGLIDRAGGNSRAILKATEEALGKMPKVSGSGAGQVYLAPATARAFDAAEKAAEKAGDSFVTVERLLLALSLDKDSEAGQLLTKGGVTPQNLNAAINALRKGRTADSATAENAYDALKKYARDLTQAARDGKLDPVIGRDEEIRRTIQVLSRRTKNNPVLIGEPGVGKTAIVEGLALRILNGDVPESLKDKKLLALDMGALIAGAKYRGEFEERLKAVLNEVTAAEGGIILFIDEMHTLVGAGKADGAMDASNLLKPALARGELHCIGATTLDEYRKHVEKDAALARRFQPVFVSEPTVEDTVSILRGLKDKYEQHHGVRIADSALVAAVTLSNRYITDRFLPDKAIDLMDEAAARLKMQVDSKPEELDSMDREIVRLKIEQEALKKETDPGSKARLVTLEKELADLEEKSAALTQRWSAEKNKLSDAQKLKSELDALRIELANAQRRGEYQRAGELAYGRIPELEKKIAEIEANENSGAMVEEAVTANHIAQVVSRWTGVPVDKMLEGEKEKLLRMEEQLGQRVVGQFEAVHAVSTAVRRARAGLQDPNRPMGSFMFLGPTGVGKTELTKALAEYLFDDETAMVRIDMSEFMEKHSVARLIGAPPGYVGYDEGGVLTEAVRRRPYQVILFDEIEKAHPDVFNVLLQVLDDGRLTDGQGRTVDFRNTLIVMTSNLGSEYLVNQPEGEDTGAVREQVMGMVRAHFRPEFLNRVDEIILFHRLQKSEMGRIVDIQFARLTKLLEDRKIVLDLDAAARDWLAEKGWDPAYGARPLKRVIQRSVQDPLAEMILEGSVKDGDHVAISAEGGVLTFNGKPPHTAEVEPFTGRPPKRMLN

SEQ ID NO: 6933 - protein, 826 aa, Chloroflexus aurantiacus
MRLERFTEKAQNAFHIAQEIMQEHQHSQLDVEHLFLAMLRQRDGLAARALARLNVDPHEVERRVERELEKLPKILSPYGMGSQVYITPRTQRLVKRAEEEANRLGDQYVGLDHLLIGLANERDGPSARILQSYQIDQERIYQVLMEIRGSQRSDDPSAESRYEILSKYSVDLTELAREDKLDPVIGREAEITRVIRILSRRTKNNPVLVGETGVGKTAIVEGLAQRIARGDVPPTLRDRKLLALDLAGMVAGSKFRGEFEERLKAVMDEVRNAKGRIILFIDELHTVVGAGAATGSIDASNMLKPALSRGEIQVIGATTIDEYRKHVEKDAALERRFSPVFVEEPDPETTVEMLRGLRKRYEEHHQLTISDEALRAAVQLSSRYINDRFLPDKAIDLIDEASAKLRIDIFSMPPELKAKEEELTRLQAEEEEAGARRDYERAALLRSRYLALQAQFEAERNEWLARNNLDEVVDDEDVAQIVSSWTGVPVSRMLETEREKLIHMEERLHERVIGQHEAIVALSDAIRRARSGLRDPRRPIGSFLFVGPTGVGKTELARALAEFMFDSEEAMTRVDMSEYQERHTVSRLIGAPPGYVGYDEGGQLTESIRRRPYQVVLFDEIEKAHRDVFNALLQVLDDGRLTDGQGRTVDFRNTIIIMTSNAGTEHLQGGGIGFNVGGKNAKTIDMREARKKVDEALRQTFRPEFLNRIDEIILFHPLSMDDLTRIVELQIADLVERLREQQIGLSLTQAAKEYLVQEGYNPVFGARPLRRTIQRLLETPISRELLRGMFRAGDQIEVDVENGQLVFHRGGILTMEEHRPAEPLDA

SEQ ID NO: 6934 - protein, 833 aa, Chloroflexus aurantiacus
MSDLYSKFTKRAKQVLQLAAEEARAFNHPYIGTEHILLGLIRESEGIAARVLDELGVKLPQARSAVEFIVGPGESTMVTDQELTARAQKVIKYAIEEANRLNHHYIGTEHLLLGLVRNGEGVATGVLDILGVSLEQVRNQVMRVLRHGTAGATAEGRTAPGTTPTQRQSKTPYLDALGTDLTEMAEQGRLDPIIGRQHEIERVIQILSRRTKNNPALIGEPGVGKTAIVEGLAQRIVQGDVPDSIKGKRVVTLDMGALVAGTKYRGQFEERLKRVIDEIKESRCILFIDEFHTIIGAGGAEGTLDAANILKPALSRGELQTIGATTLDEYRKYIERDAALERRFQPVMVDEPSIEDTIQILRGIKSRYEDFHQLQISDEAIRAAAVLSARYVPDRQLPDKAIDLIDEAASRVRMYRSATPPRLRDALRGLEALRKEREAALEDQQFELANDLREREERMLSRIQEIEAELGTRSDERYERPYVTEEDIAEVVGMWTGVPVTRLTGNETQRLMQMEEFLHSRIVGQHEAIVTISKAVRRARAGLKDPKRPIGSFIFLGPTGVGKTELAKALAEFMFGTEEALIKIDMSEFQERHTTSRLVGSPPGYIGYGEGGQLTDAVRRKPYSVVLFDEIEKAHPDAFNLLLQVLEDGHLTDGKGRRVDFRNTIIIMTSNVGTEHIRRASRIGFGSNAAEIDQNDMRRKVDEALRMLFRPEFLNRIDATIIFHPLTTEEIQSITRLMLKRVQTQLDEHQIKLEVQPDALEFLARRGYDPAFGARPLRRVITNLIEDPLAEGLLSGQFRDGDTVIVDTFEDQLRLRSQREIDQEHVEESPALA

SEQ ID NO: 6935 - protein, 181 aa, Chloroflexus aurantiacus
MHQQKPVAVRGGVMTEERTMKLAIRGDKNPLDLVEKRLREQIFGQERAIESVIRVLNRSRFGFSAGNSRRPRATLLFLGPTGVGKTATARALAELLRPDGSAFLKIDCSLFSQGHEVSALVGAPPSYVGRDQKPLLNPDIIEQENSVVLFDEIEKGQPELWNLLLQVMEDGEILLLNGGDG

SEQ ID NO: 6936 - protein, 839 aa, Synechococcus sp.
MPVLESAYRHAGREAMFERFTEKAIKVIMLAQEEARRLGHNFVGTEQILLGLIGEGTGVAAKVLKSMGVNLKDARIEVEKIIGRGSGFVAVEIPFTPRAKRVLELSLEEARQLGHNYIGTEHLLLGLIREGEGVAARVLENLGVDLSKVRTQVIRMLGETAEVSTGGGQGRTKTPTLDEFGSNLTQQAADGKLDPVVGRQKEIERVIQILGRRTKNNPVLIGEPGVGKTAIAEGLAQRIATGDIPDILEDKRVVTLDIGLLVAGTKYRGEFEERLKKIMDEIRSAGNVILVIDEVHTLIGAGAAEGAIDAANILKPALARGELQCIGATTLDEYRKHIERDAALERRFQPVMLGEPSVDDTIEILRGLRERYEQHHKLKIADEALEAAAKLADRYISDLFLPDKAIDLIDEAGSRVRLMNSQLAPAAKELDKELRQVLKDKDDAVRSQDFDKAGELRDREMEIKTQIRSIAQSKKADGTSSTDDSPIVTEEDIAHIVASWTGVPVNKLTESESTKLLNMEETLHSRLIGQDEAVKAVSRAIRRARVGLKNPNRPIASFIFSGPTGVGKTELTKALAAYFFGSEEAMIRLDMSEYMERHTVSKLIGSPPGYVGYNEGGQLTEAVRRRPYTVVLLDEIEKAHPDVFNLLLQLLEDGRLTDAKGRTVDFKNTLIILTSNIGSKVIEKGGGGLGFEFSGVDEAENQYNRIRSLVNEELKQYFRPEFLNRLDEIIVFRQLNKEEVKEIADIMLREVFGRMLEKGISLSVTEKFKDRLVEEGYNPSYGARPLRRAIMRLLEDSLAEEFLSGKLREGDTAVVDIGEEGKVQVLAQEKRELLPQAVD

SEQ ID NO: 6937 - protein, 883 aa, Synechococcus sp. PCC 7942
MGSSLELLTMQPTNPNQFTEKAWEAIVRTTDVAKQAQHQQIESEHLFLALLQEPGLALNILKKAGLEAAQLQQFTERFIARQPKVSGGNQSVYLGRSLDQLLDQADQFRKDFGDEFISVEHLILSFPRDSRFGRLLSQEFKVDEKQLRQIIQQIRGSQKVTDQNPEGKYEALEKYGRDLTEMARRGKLDPVIGRDDEIRRTIQILSRRTKNNPVLIGEPGVGKTAIAEGLAQRIINGDVPQSLKDRRLIALDMGALIAGAKFRGEFEERLTAVLKEVTDSEGIIILFIDEMHTVVGAGAVQGSMDAGNLLKTMLARGELRCIGATTLGKYRQYIEKDAALERRFQQVFVDQPTVEDTISILRGLKERYEVHHGVRISDNALVAAAVLSTRYISDRFLPDKAIDLVDESAARLKMEITSKPEELDEIDRKILQLEMERLSLQKESDLASQERLQRLEKELADLKEEQRSLSSQWQAEKDVITDIQSVKEEIDQVNLLIQQAERDYDLNKAAELKYGKLTELQRKLNEMEGGLATTHTSGKSLLREEVTEVDIAEIISKWTGIPVSKLVESEMQKLLNLDEELHQRVIGQEEAVSAVADAIQRSRAGLSDPKRPIASFIFLGPTGVGKTELAKALAAYLFDTEDAMIRIDMSEYMEKHAVSRLIGAPPGYVGYDEGGQLTEAVRRRPYSVILFDEIEKAHPDVFNVMLQILDDGRVTDSRGRTVDFKNTILILTSNIGSQYILDVAGDDSRYEEMRSRVTEALRANFRPEFLNRVDETIIFHSLRKDQLQQIVRIQLHRLEERLSDRKLSLSMSPEAIDFLVEIGFDPVYGARPLKRVIQRELETAIAKAILRGQFSDGDTIQVAVENERLVFKAIATPTAVPLS

SEQ ID NO: 6938 - protein, 895 aa, Synechococcus sp. PCC 7942
MQPTDPNRFTDQAWDAIVESQTVARQLRQQQLEVEHVLLALLDQESGVAAEILAKAGVAVANLRQPLEDFARRQPRNASGTQLYLGRGLDRLLDLAERARELWQDEFIGVEHLLMGFVEDDRIGRRLAQGLKLDAKTLETTIQALRSPAADEAEAEESEPSYPFLSKYGRDLTALAEQEKLDPVIGRDLEIRRVIQVLSRRSKNNPVLIGEPGVGKTAIAEGLAQRIVAGEVPDSLKQRRLISLDMGSLIAGAKYRGEFEERLRAVLHEVTHSDGQMVLFIDELHTVVGAGAGQQGSAMDAGNLLKPMLARGELRCIGATTTDEYRRTIEKDPALERRFQQVYVSQPSVEDTIAILRGLKERYEGHHGVKITDGALMAAAKLSHRYISDRFLPDKAIDLIDEASAQLKMEITSKPSELEDLERRLLQLEMEQLSLSGENGQASVHSDRLQQIQTELQTLQEQQARLNQQWQQEKQLLEELGRLQEEEETLRQQVNQAEREHDLNKGAELKFGQLEALQQQRQAIEEQIQALHANGQTLLREQVEEADIAEIVARWTNIPVQRLLESERQKLLQLESFLHQRVIGQDEAVVAVAAAIRRARAGMKDPSRPIGSFLFLGPTGVGKTELARALANCLFDAEDALIRFDMSEYMEKNSISRLIGAPPGYIGYEEGGQLSEAIRRHPYAVVLFDEVEKAHPDVFNLLLQVLDDGRITDSQGRTIDFCNAVIVMTSNIGSQFILEMGEEEASLDAVELKVLGALRQHFRPEFLNRIDDTILFQPLSRGQLQQIVDIQLQRLKRLLAEQAIALNVTPAAAANLADRGYDPVYGARPLKRAIQRLIENPVASLILEQQFDAGDALIVDVDAEGQLQFQVSKPVTATVVEPDDSPAIAVEAIPS

SEQ ID NO: 6939 - protein, 872 aa, Synechocystis sp. PCC 6803; identical to SEQ ID NO: 426

SEQ ID NO: 6940 - protein, 898 aa, Synechocystis sp. PCC 6803
MQPTDPTKFTEQAWDAIVKSQEVARRYKNTNLEVEHILLALLEQDMGLAARIFQRAAVDGEGLRQQLEIFTNRQPKQAYVEQLYLGRSLDVMLDRADAARSSWEDKFISVEHLLVGFAEDDRVGRKTLRAFNLDPQDLELAIKAIRGSQKVTEPNQEEKYEALDKYGRDLTEQARQGKLDPVIGRDEEIRRVIQVLSRRSKNNPVLIGEPGVGKTAIAEGLAQRIINGDVPESLKNRQLISLDMGSLIAGAKYRGEFEERLRSVMKEVTNSDGQIILFIDEVHTVVGAGGREGSGSMDAGNLLKPMLARGELRCIGATTLDEYRKNIEKDPALERRFQQVYVKQPSVDDTISILRGLKEKYEVHHGVKITDSALVAAATLSHRYIQDRFLPDKAIDLVDEAAARLKMEITSKPVELEDIDRRLMQLQMEKLSLEGEEKRPGLGADKSSKERLEKIQQEITELEGQQQELSGQWLSEKQMLEEINTLKEKEQELRLQVEKAERATDWEKAAKIKYGELEVLQHDIEEKESKLLEIQGSGNTLLREQVTESDIAEIVAGWTGIPMNRLMETERQKLLQLEGHLHQRVIGQKEAVAAVSAAIRRARAGMKDPSRPIGSFLFMGPTGVGKTELARALAGFLFDSEEAMVRIDMSEYMEKHAVSRLIGAPPGYVGYEEGGQLSEAVRRRPYSVVLLDEVEKAHLDVFNILLQVLDDGRITDSQGRVVDFRNTIIVMTSNIGSDHILSLSADDADYDKMQKQVLQSLRKHFRPEFLNRIDDLIIFHTLKRDELRRIVVLQIKRIEKLLDEQKITLSLSDAALDHIVSAGYDPTYGARPLKRAIQRQLENPIATKILENTFVAGDKILIDCVDGQLIFDKEIEPTTLPEEPEENITAVEVEVLSS

SEQ ID NO: 6941 - protein, 821 aa, Synechocystis sp. PCC 6803
MFERFTEKAIKVIMLAQEEARRLGHNFVGTEQILLGLIGEGTGVAAKVLKSMGVNLKDARIEVEKIIGRGSGFVAVEIPFTPRAKRVLELSLEEARQLGHNYIGTEHLLLGLIREGEGVAARVLENLGVDLSKVRTQVIRMLGETAEVAAGGGSGGRTKTPTLDEFGSNLTQMAAEGKLDPVVGRQKEIERVIQILGRRTKNNPVLIGEPGVGKTAIAEGLAQRIANKDIPDILEEKRVVTLDIGLLVAGTKYRGEFEERLKKIMDEIRQAGNIILVIDEVHTLIGAGAAEGAIDAANILKPALARGELQCIGATTLDEYRKHIERDAALERRFQPVMVGEPSVEETIEILYGLRERYEQHHKLKILDEALEAAAKLSDRYISDRFLPDKAIDLIDEAGSRVRLINSQLPPAAKELDKELRQILKEKDDAVRNQDFEQAGELKDREDEIKKQIRAIASSKKAEGDNGEPEVTSEEIAHIVASWTGVPVNKLTESESEKLLHMEDTLHQRLIGQEDAVKAVSRAIRRARVGLKNPNRPIASFIFSGPTGVGKTELTKALAAYFFGSEEAMIRLDMSEFMERHTVSKLIGSPPGYVGYNEGGQLTEAVRRRPYTVVLFDEIEKAHPDIFNMLLQILEDGRLTDAKGRTVDFKNTLLIMTSNIGSKVIEKGGGGLGFDFADDQAESQYNRIRSLVNEELKNYFRPEFLNRLDEIIVFRQLNKEEVKEISEILLRDVFARLVEKEISLQVTDKFKERIVEEGFNPAYGARPLRRAIMRLLEDVLAEEILSGRLKEGSQALVDIGEDNQVVVIPGETRELIAPGVE

SEQ ID NO: 6942 - protein, 845 aa, Chlamydophila pneumoniae AR39
MFEKFTNRAKQVIKLAKKEAQRLNHNYLGTEHILLGLLKLGQGVAVNVLRNLGIDFDTARQEVERLIGYGPEIQVYGDPALTGRVKKSFESANEEASLLEHNYVGTEHLLLGILHQSDSVALQVLENLHIDPREVRKEILKELETFNLQLPPSSSSSSSSSRSNPSSSKSPLGHSLGSDKNEKLSALKAYGYDLTEMVRESKLDPVIGRSSEVERLILILCRRRKNNPVLIGEAGVGKTAIVEGLAQKIILNEVPDALRKKRLITLDLALMIAGTKYRGQFEERIKAVMDEVRKHGNILLFIDELHTIVGAGAAEGAIDASNILKPALARGEIQCIGATTIDEYRKHIEKDAALERRFQKIVVHPPSVDETIEILRGLKKKYEEHHNVFITEEALKAAATLSDQYVHGRFLPDKAIDLLDEAGARVRVNTMGQPTDLMKLEAEIENTKLAKEQAIGTQEYEKAAGLRDEEKKLRERLQSMKQEWENHKEEHQVPVDEEAVAQVVSLQTGIPSARLTEAESEKLLKLEDTLRRKVIGQNDAVTSICRAIRRSRTGIKDPNRPTGSFLFLGPTGVGKSLLAQQIAIEMFGGEDALIQVDMSEYMEKFAATKMMGSPPGYVGHEEGGHLTEQVRRRPYCVVLFDEIEKAHPDIMDLMLQILEQGRLTDSFGRKVDFRHAIIIMTSNLGADLIRKSGEIGFGLKSHMDYKVIQEKIEHAMKKHLKPEFINRLDESVIFRPLEKESLSEIIHLEINKLDSRLKNYQMALNIPDSVISFLVTKGHSPEMGARPLRRVIEQYLEDPLAELLLKESCRQEARKLRATLVENRVAFEREEEEQEAALPSPHLES

SEQ ID NO: 6943 - protein, 845 aa, Chlamydophila pneumoniae CWL029
MFEKFTNRAKQVIKLAKKEAQRLNHNYLGTEHILLGLLKLGQGVAVNVLRNLGIDFDTARQEVERLIGYGPEIQVYGDPALTGRVKKSFESANEEASLLEHNYVGTEHLLLGILHQSDSVALQVLENLHIDPREVRKEILRELETFNLQLPPSSSSSSSSSRSNPSSSKSPLGHSLGSDKNEKLSALKAYGYDLTEMVRESKLDPVIGRSSEVERLILILCRRRKNNPVLIGEAGVGKTAIVEGLAQKIILNEVPDALRKKRLITLDLALMIAGTKYRGQFEERIKAVMDEVRKHGNILLFIDELHTIVGAGAAEGAIDASNILKPALARGEIQCIGATTIDEYRKHIEKDAALERRFQKIVVHPPSVDETIEILRGLKKKYEEHHNVFITEEALKAAATLSDQYVHGRFLPDKAIDLLDEAGARVRVNTMGQPTDLMKLEAEIENTKLAKEQAIGTQEYEKAAGLRDEEKKLRERLQSMKQEWENHKEEHQVPVDEEAVAQVVSLQTGIPSARLTEAESEKLLKLEDTLRRKVIGQNDAVTSICRAIRRSRTGIKDPNRPTGSFLFLGPTGVGKSLLAQQIAIEMFGGEDALIQVDMSEYMEKFAATKMMGSPPGYVGHEEGGHLTEQVRRRPYCVVLFDEIEKAHPDIMDLMLQILEQGRLTDSFGRKVDFRHAIIIMTSNLGADLIRKSGEIGFGLKSHMDYKVIQEKIEHAMKKHLKPEFINRLDESVIFRPLEKESLSEIIHLEINKLDSRLKNYQMALNIPDSVISFLVTKGHSPEMGARPLRRVIEQYLEDPLAELLLKESCRQEARKLRATLVENRVAFEREEEEQEAALPSPHLES

SEQ ID NO: 6944 - protein, 883 aa, Plectonema boryanum
  unsure (1)..(883): unsure at all Xaa locations
MHDRHRRGNTMQPTNSEKFTEKVWEAIYRTQEMYKQAQQQQIETEHLMKALLEQDGLAISIFNKLAVPVDRVRDRTDDFIRRQPKVSGSGTSVYWGRRADALLXRAEEYRKQFEDSFISIEHLLLGYAQDSRFGKALLSEFRYPDEAKLRNAIEQVRGNQKVTDQTPENKYESLEKYGRDLTQYAREGKLDPVIGRDDEIRRTIQILSRRTKNNPVLIGEPGVGKTAIAEGLAQRILSGDVPQSLKDRKLIALDMGALIAGAKYRGEFEERLKAVLKEVTDSRGNIILFIDEIHTVVGAGATQGAMDAGNLLKPMLARGELRCIGATTLDEYRKYIEKDAALERRFQQVFVDQPSVEDTISILRGLKERYEVHHGVKISDSALVAAATLSTRYISDRFLPSKAIDLVDEAAAKLKMEITSKPEELDEVDRKVLQLEMERLSLQKENDAGSRDRLERLERELADFKEDQSKLNAQWQAEKSVITDLQKLKEEIDRVNLEIQQAERDYDLNRAAELKYGKLNELNRKVEETESQLSQIQKSGATLLREEVLESDIAEIISKWTGIPVSKLVESEMQKLLQLDDVLHQRVIGQDEAVTAVSDAIQRSRAGLSDPNRPTASFIFLGPTGVGKTELAKALAAFLFDTEEAMVRIDMSEYMEKHSVSRLIGAPPGYVGYEEGGQLTEAVRRRPYSVILFDEIEKAHPDVFNVMLQILDDGRVTDSQGRTVDFKNTIIIMTSNIGSQYIFEYGGDDDRYEEILSRVMEAMLSNFRPEFLNRIDEIIIFHSLQKAQLREIVKIQTHRLESRLARKMSLKLSDAALDFLAEGFDPVYGARPLKRAIQRELETTIAKEILRSNFTEGDTIFVDVGETERLEFKRLPSEVLTTQ

SEQ ID NO: 6945 - protein, 816 aa, Thermoanaerobacter tengcongensis
MAMFGRFTERAQKALYLAQEEARSFYHNYVGTEHILLGLLKEDEGIAARVLKKLGVTYEATREKVLSLIGMGNIPGDVVGYTPRAKRVLELSLSEARRFNTSYVGTEHILLGLLREGEGVAVRILMEQGIDFNRVREEIVKMLSEEPAAGPSKVSKAKNTNTPTLNQFGRDLTDLARDGKLDPVIGREKEIERVIQILSRRTKNNPVLIGEPGVGKTAIVEGLAQKIVEGEVPEILKDKRVVTLDLASLVAGTKYRGEFEDRLKTVINEVIKAGNVILFVDEMHTLIGAGAAEGAIDASNILKPALARGEIQVIGATTLDEYRKYVERDPALERRFQPIMVEEPTVEETIEILKGLRDKYEAHHRVKITDEALEAAAKLSHRYITDRFLPDKAIDLIDEAASRVRLKTVTAPPEIKELEDKINDLIKEKEEAIRTQEYEKAAKIRDEEQKLREQLEELKAKWQQNSLSEEKSVGPEEIAQVVSMWTGIPVKKLAEEESERLLHLEEILHERVIGQDEAVEAVAKAIRRARVGLKDPKRPIGSFIFLGPTGVGKTELSKALAEALFGDENAMIRLDMSEYMERHTVSKLIGSPPGYVGFEEGGQLTEKVRRRPYSVILLDEIEKAHPDVFNILLQILEDGRLTDSKGRTVDFKNTVIIMTSNVGAELLKKQTTLGFMPQEKEDKASFEKIKETLMAELRKTFRPEFLNRVDEIIVFHPLSKEHIEKIADIMIKELNKRLEENNIKLEFTPEAKEEIIKQGYDPNYGARPLRRVIQRIVENQLSELMLQGEVKPGDELIVTAEDGKIKFVKKDVVQKA

SEQ ID NO: 6946 - protein, 114 aa, Paracoccidioides brasiliensis
EDQRDSLNKYTVDLTERALAGKLDPVIGRDDEIRRTVQVLSRRTKNNPVLIGEPGVGKTAIVEGLAQRIVNGEVPESLKGKRVLSLDLGSLLAGAKYRGEFEERLKAVLKDLAK

SEQ ID NO: 6947 - protein, 671 aa, Burkholderia fungorum
MVIEIGGLLMRIDKLTTKFQEALADAQSLAVGHDNQYIEPVHVLSALVAQQDGSARSLLSRAGVHVQALQTALGDAITRLPQVQGTDGNVQIGRDLTGLLNQADKEAQKLNDTFIASEMFLLAVADDKGEAGRLARQHGLSRKSLESAIAAVRGGSQVHSQDAESQREALKKYTVDLTERARAGKLDPVIGRDDEIRRSIQILQRRTKNNPVLIGEPGVGKTAIVEGLAQRIVNGEVPETLKGKRVLSLDMAALLAGAKYRGEFEERLKAVLNDIAKDEGQTIVFIDEIHTMVGAGKAEGAMDAGNMLKPALSRGELHCVGATTLDEYRKYIEKDAALERRFQKVLVDEPTVEATIAILRGLQEKYELHHGVDITDPAIVAAAELSHRYITDRFLPDKAIDLIDEAASKIKMEIDSKPEEMDRLDRRLIQLKIEREAVKKEKDEASQKRLQLIEEEIERLNREYSDLDEIWTAEKAAVQGSAQLKEEIEKTRAEITRLQREGKLEKVAELQYGKLPGLEAQLKEVTKAEASEQNNPTRPRLLRTQVGAEEIAEVVSRATGIPVSRMMQGEREKLLQIEEKLHARVVGQDEAISAVADAIRRSRAGLSDPNRPYGSFLFLGPTGVGKTELCKALASFLFDSEDHLIRIDMSEFMEKHSVARLIGAAGIRARR

SEQ ID NO: 6948 - protein, 961 aa, Burkholderia fungorum
MAEHLCELCGVRPATIRVAVIQGGRRRQLDVCDYHYAQLTRHQRQVSPLESLFRGGLFEGLLDSGMDGSGPEPAATRHDGPVSKGVDLQQHFSDQAKEILQRAAERAVQFGRHEVDTEHVLYELVESEAVQRILSALKISASDLQKHIEANAPKGHATSKAPQGEISVSPRLKSALERAVIASREFGQNYVGPEHILTGLAEVTDSFAGDLLMKYGLSSHQLRQQTLKQAGQEEAAQAPSNTPQLDKYSRDVTRLAREGKLDPVIGRSKETETLVEVLARRKKNNPVLIGEPGVGKTAIVEGLAQRMISGDVPETLREKRLIELNVNSLVAGSKYRGEFEERVRQVMDEIAAHKDQLVLFVDEVHTIVGAGQGGGEGGLDIANVFKPPMARGELNLIGATTLAEYQKYIEKDAALERRFQPVLVGEPSVEQTIGILRGLRDRLEAHHKVTILDEACVAAAELSDRYVTGRFLPDKAVDLIDQAAAREHLSSTSRPAEVLELESEIAQIRREQEYAASHKQFERATALGEQLSGKQTRLDDATQAWKRRVSTSTAEVTRTLVAEIVAKMTGIPVADLTQEEKTRLLQMEDRLHRRVIGQEEAISAVSDAVRRSRAGLQARHQPLAVFLFLGPTGVGKTELAKALAEVVFGDEDAIVRIDMSEYMERHAVARLIGAPPGYVGYDEGGQLTERVRRRPHSVILLDEIEKAHPDVYNVLLQVFDDGRLTDGKGRVIDFANTLIIATSNLASDVIMGTPRKRPGFIAADNDLAADKGARKDRQPDGVREGVMTVLRSHFRPEFLNRIDEIIIFESLNADQIRSIVRLQLDKVAHIAKSQDIDIVFDDSIVDQLAKEAYRPEYGARELRRRIRQVIENPLAKQMLDGAVREGNRVVCRFDPLADDTVFELGEAPQQELAGTTQQQDQKDPEAGNGAADAGPAAKPARKRASPARKRGNTDGGDHAAG

SEQ ID NO: 6949 - protein, 916 aa, Burkholderia fungorum
MAISRQALFGKLGTTLYRSIESATAFCKLRGNPYIELVHWLHQLLQQPDSDLHRLVRHCGIERETLDRDMARALAALPAGASSISDFSHHVELAVERAWVLATLSFNDRRIRSAWLVAALVQTPELRRVLLSISPAFGKLSVVGLDEALPAYMENSPEAAEAPYDNSNFSTAVPGEASHALPAQSKGSPLEQFCTDLTVRAHSGEIDPVVGRELEIRTMIDVLLRRRQNNPLLTGEAGVGKTAVVEGLACAIATGNVPPRLVGVRLLSLDVGALLAGASMKGEFELRLRGVLEAALKSAVPVILFVDEIHTLIGAGGQAGTGDAANLLKPALARGAIRMIGATTWAEYKRHIEKDAALTRRFQVLQVRQPQEPAAIDMVRGLANTFSRHHGVVVRDQAIRAAVRLSHRYIPSRQLPDKAISLLDTACARVALSQHAPPRELQDARQRVLAARVESELLVAESRIGLDTASALAAARTRIGELVAVEERIEARWKAQLAAAQALLAARDAALGADHGAPHTGANSDACASPDSLKDLERALTQLQGDAPLVFPEVSEAIVAEVVSDWTGIPVGRMVTDEVAAVQSLPATLEARVIGQPDALRQIGERVQTARAGLTDPKKPLGVFLLAGPSGVGKTETALALAEALYGGEQNLITVNMSEYQEAHTVSGLKGAPPGYVGYGEGGVLTEAVRRRPYSVVLLDEIEKAHRDVHEMFFQVFDKGYMEDGDGRYIDFRNTTILLTSNAGSELIASLCADAPLPPDAEGLREALTPALLNAFPAAFLGRVTVVPYRPLAHESLARIVRLHLDRVVTRMAQVHDIALAYSGQVVDYIVGRCLVQETGARVLIGFIEQHVLPRLSALWLDALASKQPITRIEIGVVDASAPPTAALAFPCTYAHAPAMPAAAATPSTLSVAQVD

SEQ ID NO: 6950 - protein, 335 aa, Enterococcus faecium
MIKLEIDELVQEKEAAIQKQDFENAAQLRRQEKALRKKLQKVSAIEAKQEQGYSDRVTEEDVATVVSEWTGVPLQQLEKKESERLLELEGLLHERVVGQDEAVKAVSRAIRRARSGLKDPDRPIGSFMFLGPTGVGKTELAKALSEVMFGSEDALIRVDMSEFMEKYSTSRLIGSPPGYVGYDEGGQLTEKIRQKPYSVILLDEVEKAHPDVFNLLLQVLDDGHLTDSKGRKVDFRNTIMIMTSNIGATQIREEKNVGFNVQDVTKDHKAMQKRILEELKKAFRPEFLNRIDETVVFHSLSKDEIHTIVQIMSKAIIKRLKEQDIQVKITPSASM

SEQ ID NO: 6951 - protein, 358 aa, Enterococcus faecium
MNIEKMTTTLQEAIAEAQQIAVTRKHQDIDIAHVWKIFLQSNHFGRNFYTDAGLDVESFEHEIDRLLDEYPVVSGGNVQYGQNLSQNFFRLLNEADQIRESFGDEFLSTEVVILALMKLKNYPLTVYLNKNGLSEKELRKNIEEMRGGERVTSQNQEEQYKALEKYGVDLVQQVKSGKMDPIIGRDEEIRDVIRILSRKTKNNPVLIGEPGVGKTAIVEGLAQRIVRKDVPENLKDKTIFSLDMGALIAGAKFRGEFEERLKAVLKEVKKSDGRILLFIDEIHNIVGAGKTEGSMDAGNLLKPMLARGELHLIGATTLDEYRQYMEKDKRWNVAFKGISQRTNSGRYDQYSAWIKRTF

SEQ ID NO: 6952 - protein, 450 aa, Enterococcus faecium
MHLYATVNGQRTQLDYCQSCYQKIKNQQNGGLTNMAQNDPFGFGSLDDLFRSMSRQMQQQGNYEQTPPTQFGGNNNFNGGQPPQGNTEGLLGEYGINITEQARQGDIDPVIGRDDEIKRVIEILNRRTKNNPVLIGEPGVGKTAVVEGLAQKIVDGDVPQKLMDKEVIRLDVVSLVQGTGIRGQFEERMQKLIEEIRQAENVILFIDEVHEIVGAGSAGDGNMDAGNILKPALARGELQMVGATTLNEYRIIEKDAALERRMQPVRVDEPTVEETISILKGLQKRYEDYHHVKYTDEAIEAAATLSNRYVQDRFLPDKAIDLLDETGSKKNLTIQIVDPKTIEKKLQEAEEQKVLASREEDFEKAAYYRDQINKLQKMKERQLTEEETPVITEKDMEKIVEQRTGIPVGELKEKEQTQLKNLADDLKAHVIGQDNAVDRVAKAIRRNRVD

SEQ ID NO: 6953 - protein, 244 aa, Enterococcus faecium
MIRFDMSEYMEKHSVSKLIGSPPGYVGYEEAGQLTEKVRRNPYSLVLLDEVEKAHPDVLHMFLQILDDGRLTDAQGRTVSFKDTIIIMTSNAGTGKVEANVGFGAAREGVTRSVLNQLNNYFTPEFLNRFDGIIEFSALSKENLMTIVTLMLDDVNQMLAAQQLHIEVPTNVKEKLVDLGYDPSMGARPLRRTIQEQIEDGIAEFYLDHPSIHELKAKLDKDGKIIVTSKPERLAKESAEETAE

SEQ ID NO: 6954 - protein, 111 aa, Enterococcus faecium
MKRLIQILSRRTKNNPVLVGEPGVGKTAIAEGLAQKIILGEVPEDMQEKRLMMLDMGSLVAGTKYRGEFEDRMKKVIDEIYNDGQVILFIDELHTLIGAGGAEGAMMLRIS

SEQ ID NO: 6955 - protein, 169 aa, Enterococcus faecium
MKLIVYWMSIQLFLVETSIWTNLSQNFFRLLNEADQIRESFGDEFLSTEVVILALMKLKNYPLTVYLNKNGLSEKELRKNIEEMRGGERVTSQNQEEQYKALEKYGVDLVQQVKSGKMDPIIGRDEEIRDVIRILSRKTKNNPVLIGEPGVGKTASLKGLLNVSYARCA

SEQ ID NO: 6956 - protein, 66 aa, Enterococcus faecium
MVRIDMSEYMEKHAVSRLVGAPPGYVGYEEGGQLTEAVRRNPYTSSCWMKSKKRIPMSSISCYSPR

SEQ ID NO: 6957 - protein, 748 aa, Lactococcus lactis subsp. cremoris
MLCQNCNINEATIHLYTSVNGQKKQIDLCQNCYQIMKSGGQEALFGAGNASNGNSDEPFNPFNDIFSALQGQDFNGAASNQTPPTQTGGRGPRGPQNPRAKQPKGMLEEFGINITESARRGEIDPVIGRDEEIKRVIEILNRRTKNNPVLIGEPGVGKTAVVEGLAQKIVDGDVPQKLQNKEVIRLDVVSLVQGTGIRGQFEERMQKLMDEIRKRNDVIMFIDEIHEIVGAGSAGDGNMDAGNILKPALARGELQLVGATTLNEYRIIEKDAALERRMQPVKVDEPSVDETITILRGIQARYEDYHHVKYTDEAIEAAAHLSNRYIQDRFLPDKAIDLLDESGSKKNLTLKFVDPEDINRRIADAESKKNEATKAEDFEKAAHFRDQISKLRELQKQEVTDEDMPVITEKDIEQIVEQKTQIPVGDLKEKEQTQLINLADDLKAHVIGQDEAVDKISKAIRRSRVGLGKPNRPIGFFLFVGPTGVGKTELAKQLAKELFGSSESMIRFDMSEYMEKHSVAKLIGAPPGYVGYEEAGQLTERVRRNPYSLILLDEIEKAHPDVMHMFLQILEDGRLTDAQGRTVSFKDSLIIMTSNAGTGKVEASVGFGAAREGRTKSVLGQLGDFFSPEFMNRFDGIIEFSALSKENLLKIVDLMLDEVNEQIGRNDIHLSVTQAAKEKLVDLGYNPAMGARPLRRIIQENIEDSIADFYIEHPEYKQLVADLIDDKIVISNQTQETAETTDEEVPAE

SEQ ID NO: 6958 - protein, 816 aa, Lactococcus lactis subsp. lactis
MKFENIKYTPTLDRILEKAEEYAHQYQYGTIESAHLLAAMATTSGSIAYSLLAGMNVDSSDLLIDLEDLSSHVKVKRSTLRFSPRAEEVMTAASFLAIHNNSEAVGTEHLLYALLQVEDGFGLQLLKLQKINIVSLRKELEKRTGLKVPESKKAVTPMSKRKMAKGVAENSTTPTLDSVSSDLTEEARLGKLDPMIGREAEIDRLIHILSRRTKNNPVLVGEPGVGKSAIIEGLAQRIVNGQVPIGLMNSRIMALNMATVVAGTKFRGEFEDRLTAIVEEVSSDPDVIIFIDELHTIIGAGGGMDSVNDAANILKPALARGDFQMVGATTYHEYQKYIEKDEALERRLARINVDEPSPDEAIAILQGLREKFEDYHQVKFTDQAIKSAVMLSVRYMTSRKLPDKAIDLLDEAAAAVKISVKNQQTKRLDLEKELTEAQEELSEAVIKLDIKASRTKEKAVEKIADKIYKFSVKEDKRQEVTDQAVVAVASTLTGVPITQMTKSESDRLINLEKELHKRVVGQEEAISAVSRAIRRARSGVADSRRPMGSFMFLGPTGVGKTELAKALADSVFGSEDNMIRVDMSEFMEKHSTSRLIGAPPGYVGYDEGGQLTERVRNKPYSVVLLDEVEKAHPDVFNIMLQILDDGFVTDTKGRKVDFRNTIIIMTSNLGATALRDDKTVGFGAKNITADYSAMKSRILEELKRHYRPEFLNRIDENIVFHSLESQEIEQIVKIMSKSLIKRLAEQDIHVKLTPSAVKLIAEVGFDPEYGARPLRKALQKEVEDLLSEQLLSGEIKAGNHVSIGASNKKIKIAQIV

SEQ ID NO: 6959 - protein, 748 aa, Lactococcus lactis subsp. lactis
MLCQNCNINEATIHLYTSVNGQKKQIDLCQNCYQIMKSGGQEALFGAGNASNGNSDEPFNPFNDIFSALHGQDFNGAASTQTPPTQTGGRGPRGPQNPRAKQPKGMLEEFGINITESARRGEIDPVIGRDEEIKRVIEILNRRTKNNPVLIGEPGVGKTAVVEGLAQKIVDGDVPQKLQNKEVIRLDVVSLVQGTGIRGQFEERMQKLMDEIRKRNDVIMFIDEIHEIVGAGSAGDGNMDAGNILKPALARGELQLVGATTLNEYRIIEKDAALERRMQPVKVDEPSVDETITILRGIQARYEDYHHVKYTDEAIEAAAHLSNRYIQDRFLPDKAIDLLDESGSKKNLTLKFVDPEDINRRIADAETKKNEATQAEDFEKAAHFRDQITKLRELQNHEVSDDEIPVITEKDIEQIVEQKTHIPVGDLKEKEQTQLINLADDLKAHVIGQDEAVDKIAKAIRRSRVGLGKPNRPIGSFLFVGPTGVGKTELAKQLAKELFGSSESMIRFDMSEYMEKHSVAKLIGAPPGYVGYEEAGQLTERVRRNPYSLILLDEIEKAHPDVMHMFLQILEDGRLTDAQGRTVSFKDSLIIMTSNAGTGKVEASVGFGAAREGRTKSVLGQLGDFFSPEFMNRFDGIIEFSALSKENLLKIVDLMLDEVNEQIGRNDIHLSVTQAAKEKLVDLGYNPAMGARPLRRTIQENIEDSIADFYIEHPEYKELVADLIDDKIVISNQAQETAETTDEEVPAE

SEQ ID NO: 6960 - protein, 763 aa, Lactococcus lactis subsp. lactis
MKLISLLFKQISVVILIDSISTLPSDTEKLCYNSVIVLKLSWSLTLHIQIFMEVWQYGKFQWNDPFFNNDMDDVFNQLFRRMDNQNSEVRGISLMDNRCHRMSLLNTEQLASYPKIIKQWKYLKMVNRLLKKEGFIEKLGTNLTEQARDGLLDPVIDRENEIQKPAQKFCRRRKKNPLLVGESGVGKTAVVEGLAQRIVAGKVPETIQDKEIYSIDLSSLEAGTQYRGSFEENIKQLVEEVKAAGNIILFIDEIHQILGTGALAGEEVKGLADIIKPLLCHVAKLSVIGATTQDEYRNTILKNAALARRFNDVVINEPTAADTLRILQGIKELYEKHHHVVLPDDEKKAAVDYSIKYIHNRHLPDKAIDLIDDCGSFSGKNSQTDVETLDQRLKNKRQLRRPAIKSEDFAKAADIKRVDRGTKQKIKKTHQKEKITATIDDVAQSVERLTGIPVSDMGANDIEHLKNLDKRLKVMVIGEDEAVKMVAKAIRRNRAGFSEGDQPKGSFLFVGPTGVGKTELSQALALDMFGNENALFGIDMSEYADRTAVSKLIGTSAGYVGYEDNANTLTERVRRNPYSVILLDEIEKADPQVLTLLLQVMDDGRLTDGQGSVIDFRNTIIIMTSNAGFGNEALSGDKQRVQSLMDKLAPFFAQNFRPEFRNRLDNIVEFSHLTKQDLSQIVDLMLADVQKTLAKKSIKLEVTKAAKDWLMEQGYDEAMGARPLRRVIEQQIRDKVTDFYLDHLDVKNLKADLVDAEIVISAA

SEQ ID NO: 6961 - protein, 865 aa, Clostridium acetobutylicum
MDVDKLTLKVQQAINDCQTIAVRYNHQQIDTIHLFMAIISQEDGLIPNILGKMGADVETVKRDTEAELDRMPKVLGEGAQNASIYATRRFEEVFVRGEKISRDFKDLYISVEHVMLALMDIDSGAIKSILDKNNISKKEFLKALREVRGNQRVDTSDPEGTYDALNKYGRDLVKDAKKHKLDPVIGRDEEIRRVIRILSRRTKNNPVLIGEPGVGKTAIVEGLAERIVRGDVPEGLKNKIIFSLDMGSLVAGAKYRGEFEERLKAVLKEVERSEGKIILFIDEIHTIVGAGKTEGAMDAGNIIKPMLARGELHCIGATTFDEYRKYIEKDKALERRFQKVQIDEPTVDDAISILRGLKERFEIHHGVRIHDNAIVAAAKLSDRYITGRFLPDKAIDLIDEAGAMVRMEIDSMPTELDMLKRKIFQMEIEKEALSKESDKFSRERLESIQKELSDLKDKDKAMTAKYDKEKAQIQGIKELKTKLDEIRGQIEKAEREYDLNKAAELKYGEVPKLEHEIEEKENLIKQNGQNAMLKEEVTEEQVSNIVSKWTGIPVSKLVEGERNKLMRLSDELEKRVVGQTEAVKSVADAVIRARAGLKDMSKPIGSFIFLGPTGVGKTELAKTLARVMFDSEDNIIRIDMSEYMEKYSVSRLIGSPPGYVGYEEGGQLTEAVRRKPYSVILFDEIEKAHSDVFNIFLQIFDDGRLTDNKGNTIDFKNSIIIMTSNIGSEHLLNNKGVSNVDEETKDKVMNELKGRFKPEFLNRLDDIIMFKPLSINEIGKIIDIFLENIKSKLKEKNIKIDIAEEAKKIIAEEGYDPVYGARPLKRYIENTIETHIAKMFISGEISEGDILKIEGSDSKLTIVKK

SEQ ID NO: 6962 - protein, 813 aa, Clostridium acetobutylicum
MMFGRFSDRAQKMIYYAQEEAQNFKHGYVGTEHILLGILRDENGKAQSLLANMGVTIEKVRRLIEEYEGFGDSDLYKEEPPLTPRTKRLLEISLLEARNLNHNYINPEHVLLALIRESEGVAFTILGNLGVDFERLRKEILDSLSGREENTGIKTSFSSNTSVTPTLNQYGTDLTQMALEGKLDPVIGRDNETQRILEILCRRTKNNPCLIGDPGVGKTAIAEGLAQKIVEGNIPEILKDKRVITLDVSSLVAGSKYRGEFEERLKKVMTEIKAAKNVILFIDEIHTIVGAGGAEGAIDASNILKPSLARGEIQCIGATTTEEYRRYIEKDAALERRFQPVDVGEPSKEEAVQILEGLRDKYEAHHGVKITDDAIEAAVNLSTRYIQDRFLPDKAIDLIDEAAAKVRIQNLTAPPDLKNQEEELEKTTREKSDAIRLQDFEKAAKLRDKEKKLRIAIEEFKKNWKNTSDNENYIVTQKQVAAVVAKWTSIPVEKLTEKESERLLKLESILHKRVIGQEEAVEYVSRAVRRARVGLKDPKRPIGSFIFLGPTGVGKTELSKALAEAMFGDENNIIRIDMSEYMEKHTVSRLVGSPPGYVGYDEGGQLTEKVRRKPYSVVLFDEIEKAHPDVFNILLQILDDGRLTDSKGKTVSFTNTIIIMTSNVGASTIRKQKTLGFETAKDAVRQEYDKMKENIMEELKNSFRPEFLNRIDEIVVFHKLEEKDLRQIVKLMLESVKGRLKEQNIKINFTEKAEEVLAEKGFDPTYGARPLRRTIIKAVEDKLSEEILKGTISKNDNISVDVDKDKELLFTKA

SEQ ID NO: 6963 - protein, 752 aa, Clostridium acetobutylicum
MVTCSVCKKNVAVIFTNKVIDGKQELVGLCLPCAKKLGISPLTQIIDTKDMKEDDFQNLSSQMNDMLKNIDLDKVSDESGNGGGLLNFFNNAFNNSEQPENKNSEYNNTKNDKTHKKNKKKKYLDSYGINLTLKAKNGEIDTVIGREREVDRLIQILNRRTKNNPILIGEAGVGKTAIAEGFAVRIAEKNVPARFLDTEVYMLELNSIVAGTQFRGQFEARMKGIIDEINQFKNVILIIDEIHNIIGAGNAESGSLSAANILKPALAKGELQLIGATTIEEYRKYIEKDSALERRFQPIMVEEPTIEQTIEIVKGIKSYYEIYHKITIPDDVIESAVRLSGRYISDRFFPDKAIDVIDEAGSRANLKNKGLVELEALKTELSNIQNEITKCAESNDFEKAAEYKVEECKVQTKIDNFSKEYSNVVLTLDDVASVVESWTKIPVQKITEIEAEKLLNLEERLHKRVIGQNEAVSSVARTIRRNRSGFKKLKKPSSFIFVGPTGVGKTELVKTLASELFQNEKALIRVDMSEYMEKHTVSKLIGAPPGYVGYDNGGQLTEKVRRNPYSVILLDEIEKAHPDVFNILLQILEDGRLTDSQGRTVNFENTIIIMTSNAGTNLKSSGIGFSRDDYSSLSGKIKDVLRETFRPEFLNRIDETIIFTELNKDELMKIIDLMLKEIINEGKDKDIAIEISEDVKDFIFSNGYDKKYGARPLRRTIQKYIEDELAEFYIKGIYKEGSKVRIYIQDEKIAFE

SEQ ID NO: 6964 - protein, 861 aa, Escherichia coli O157:H7 EDL933
MGGVMRLDRLTNKFQLALADAQSLALGHDNQFIEPLHLMSALLNQEGGSVSPLLTSAGINAGQLRTDINQALNRLPQVEGTGGDVQPSQDLVRVLNLCDKLAQKRGDNFISSELFVLAALESRGTLADILKAAGATTANITQAIEQMRGGESVNDQGAEDQRQALKKYTIDLTERAEQGKLDPVIGRDEEIRRTIQVLQRRTKNNPVLIGEPGVGKTAIVEGLAQRIINGEVPEGLKGRRVLALDMGALVAGAKYRGEFEERLKGVLNDLAKQEGNVILFIDELHTMVGAGKADGAMDAGNMLKPALARGELHCVGATTLDEYRQYIEKDAALERRFQKVFVAEPSVEDTIAILRGLKERYELHHHVQITDPAIVAAATLSHRYIADRQLPDKAIDLIDEAASSIRMQIDSKPEELDRLDRRIIQLKLEQQALMKESDEASKKRLDMLNEELSDKERQYSELEEEWKAEKASLSGTQTIKAELEQAKIAIEQARRVGDLARMSELQYGKIPELEKQLEAATQLEGKTMRLLRNKVTDAEIAEVLARWTGIPVSRMMESEREKLLRMEQELHHRVIGQNEAVDAVSNAIRRSRAGLADPNRPIGSFLFLGPTGVGKTELCKALANFMFDSDEAMVRIDMSEFMEKHSVSRLVGAPPGYVGYEEGGYLTEAVRRRPYSVILLDEVEKAHPDVFNILLQVLDDGRLTDGQGRTVDFRNTVVIMTSNLGSDLIQERFGELDYAHMKELVLGVVSHNFRPEFINRIDEVVVFHPLGEQHIASIAQIQLKRLYKRLEERGYEIHISDEALKLLSENGYDPVYGARPLKRAIQQQIENPLAQQILSGELVPGKVIRLEVNEDRIVAVQ

SEQ ID NO: 6965 - protein, 923 aa, Escherichia coli O157:H7 EDL933
MIQIDLPTLVKRLNLFSRQALEMAASECMSQQAAEITVSHVLIQMLAMPRSDLRVITRQGDIGMEELRQALTVENYTTARSADSYPAFSPMLVEWLKEGWLLASAEMQHSELRGGVLLLALLHSPLRYIPPAAARLLTGINRDRLQQDFVQWTQESAESVVPDADGKGAGTLTDASDTLLARYAKNMTEDARNGRLAPVLCRDHEIDLMIDILCRRRKNNPVVVGEAGVGKSALIEGLALRIVAGQVPDKLKNTDIMTLDLGALQAGASVKGEFEKRFKGLMAEVISSPVPVILFIDEAHTLIGAGNQQGGLDISNLLKPALARGELKTIAATTWSEYKKYFEKDAALSRRFQLVKVSEPNAAEATIILRGLSAVYERSHGVLIDDDALQAAATLSERYLSGRQLPDKAIDVLDTACARVAINLSSPPKQISALTTLSHQQEAEIRQLERELRIGLRTDTSRMTEVLVQYDETLTALDELEAAWHQQQTLVREIIALRQQLLGVAEDDAAPLPDADTVEDTQPESESESEQDNTGAVPADETDREQPEETAETVSPVQRLAQLTAELDALHNDRLLVSPHVDKKQIAAVIAEWTGVPLNRLSQNEMSVITDLPKWLGDTIKGQDLAIASLHKHLLTARADLRRPGRPLGAFLLAGPSGVGKTETVLQLAELLYGGRQYLTTINMSEFQEKHTVSRLIGSPPGYVGYGEGGVLTEAIRQKPYSVVLLDEVEKAHPDVLNLFYQAFDKGEMADGEGRLIDCKNIVFFLTSNLGYQVIVEHADDPETMQEALYPVLADFFKPALLARMEVVPYLPLSKETLATIIAGKLARLDNVLRSRFGAEVVIEPEVTDEIMSRVTRAENGARMLESVIDGDMLPPLSLLLLQKMAANTAIARIRLSAVDGAFTADVEDAQNDESVTKDETVL

SEQ ID NO: 6966 - protein, 861 aa, Xylella fastidiosa Dixon
MRMDKLTSRFQNALADAQSLAVGRDHTIIEPVHVFSALLDQQGGSTRPLLVQAGVNVPLLRERLTEILEALPKVSGQTVNVSPSNELSRLFHRTDKLAQQHGDQFMASEWFVLAVVDDSGGLGQALRAAGAEKKKIEAAIDKLRGGETVQTENAEEQRQALEKYTIDLTARAESGKLDPVIGRDEEIRRTIQVLQRRTKNNPVLIGEPGVGKTAIVEGLAQRIVNGEVPEGLRSKRLLSLDLGALIAGAKFRGEFEERLKGVLNDLAKNEGRVILFIDELHTMVGAGKADGAMDAGNMLKPALARGELHCIGATTLDEYRKYIEKDAALERRFQKVFVGEPTVEDTIAILRGLKEKYALHHGVEITDPAIVAAATLSNRYITDRQLPDKAIDLMDEAASRIRMEIDSKPEELDRLERRLIQLKIQREMLKKEKDEASKQRLADLERDIEVLDREFSDLEEVWRSEKAALQGATKIKESIEQAKLDLEAAQRRQDYAKMSEIQYGVLPALEKQLVAASQAEQHDFTLVQEKVTAEEIAEVVSRWTGIPVSKMLEGERDKLLRMEADLGRRVVGQEEAIKVVSDAVRRSRTGLSDPNRPSGSFLFLGPTGVGKTELCKALAEFLFDSQDAMVRIDMSEFMEKHSVARLIGAPPGYVGYEEGGYLTELVRRRPYSLILLDEVEKAHSDVFNILLQVLDDGRLTDGQGRTVDFRNTVIVMTSNLGSHQIQELSGDDSPEVYTQMKAAVMGVVQAHFRPEFINRLDDIVVFHPLDKAQIKQIARIQLRGLEKRLAESELKLDLDDRALELLGNVGFDPVYGARPLKRAIQSQLENPLAQQILAGAFVSGDTVQVGVDGGKLVFAKV

SEQ ID NO: 6967 - protein, 861 aa, Xylella fastidiosa Ann-1
MRMDKLTSRFQNALADAQSLAVGRDHTIIEPVHVFSALLDQQGGSTRSLLVQAGVNVPLLRERLTEILEALPKVSGQTVNVSPSNELSRLFHRTDKLAQQHGDQFMASEWFVLAVVDDSGGLGQALRAAGAEKKKIEAAIDKLRGGETVQTENAEEQRQALEKYTIDLTARAESGKLDPVIGRDEEIRRTIQVLQRRTKNNPVLIGEPGVGKTAIVEGLAQRIVNGEVPEGLRSKRLLSLDLGALIAGAKFRGEFEERLKGVLNDLAKNEGRVILFIDELHTMVGAGKADGAMDAGNMLKPALARGELHCIGATTLDEYRKYIEKDAALERRFQKVFVGEPTVEDTIAILRGLKEKYALHHGVEITDPAIVAAATLSNRYITDRQLPDKAIDLMDEAASRIRMEIDSKPEELDRLERRLIQLKIQREMLKKEKDEASKQRLVDLERDIEVLDREFSDLEEVWRSEKAALQGATKIKESIEQAKLDLEAAQRRQDYAKMSEIQYGVLPALEKQLVAASQAEQHDFTLVQEKVTAEEIAEVVSRWTGIPVSKMLEGERDKLLRMEADLGRRVVGQDEAIKVVSDAVRRSRTGLSDPNRPSGSFLFLGPTGVGKTELCKALAEFLFDSQDAMVRIDMSEFMEKHSVARLIGAPPGYVGYEEGGYLTELARRRPYSLILLDEVEKAHSDVFNILLQVLDDGRLTDGQGRTVDFRNTVIVMTSNLGSHQIQELSGDDSPEVYTQMKAAVMGVVQVHFRPEFINRLDDIVVFHPLDKAQIKQIARIQLRGLEKRLAESELKLDLDDRALELLGNVGFDPVYGARPLKRAIQSQLENPLAQQILAGAFVSGDTVQVGVDGGKLVFSKV

SEQ ID NO: 6968 - protein, 818 aa, Staphylococcus aureus subsp. aureus Mu50
MLFGRLTERAQRVLAHAQEEAIRLNHSNIGTEHLLLGLMKEPEGIAAKVLESFNITEDKVIEEVEKLIGHGQDHVGTLHYTPRAKKVIELSMDEARKLHHNFVGTEHILLGLIRENEGVAARVFANLDLNITKARAQVVKALGNPEMSNKNAQASKSNNTPTLDSLARDLTVIAKDGTLDPVIGRDKEITRVIEVLSRRTKNNPVLIGEPGVGKTAIAEGLAQAIVNNEVPETLKDKRVMSLDMGTVVAGTKYRGEFEERLKKVMEEIQQAGNVILFIDELHTLVGAGGAEGAIDASNILKPALARGELQCIGATTLDEYRKNIEKDAALERRFQPVQVDEPSVVDTVAILKGLRDRYEAHHRINISDEAIEAAVKLSNRYVSDRFLPDKAIDLIDEASSKVRLKSHTTPNNLKEIEQEIEKVKNEKDAAVHAQEFENAANLRDKQTKLEKQYEEAKNEWKNAQNGMSTSLSEEDIAEVIAGWTGIPLTKINETESEKLLSLEDTLHERVIGQKDAVNSISKAVRRARAGLKDPKRPIGSFIFLGPTGVGKTELARALAESMFGDDDAMIRVDMSEFMEKHAVSRLVGAPPGYVGHDDGGQLTEKVRRKPYSVILFDEIEKAHPDVFNILLQVLDDGHLTDTKGRTVDFRNTIIIMTSNVGAQELQDQRFAGFGGSSDGQDYETIRKTMLKELKNSFRPEFLNRVDDIIVFHKLTKEELKEIVTMMVNKLTNRLSEQNINIIVTDKAKDKIAEEGYDPEYGARPLIRAIQKTIEDNLSELILDGNQIEGKKVTVDHDGKEFKYDIAEQTSETKTPSQA

SEQ ID NO: 6969 - protein, 701 aa, Staphylococcus aureus subsp. aureus Mu50
MNNGFFNSDFDSIFRRMMQDMQGSNQVGNKKYYINGKEVSPEELAQLTQQGSNQSAEQSAQAFQQAAQRQQGQQGGNGNYLEQIGRNLTQEARDGLLDPVIGRDKEIQETAEVLSRRTKNNPILVGEAGVGKTAIVEGLAQAIVEGNVPAAIKDKEIISVDISSLEAGTQYRGAFEENIQKLIEGVKSSQNAVLFFDEIHQIIGSGATGSDSGSKGLSDILKPALSRGEISIIGATTQDEYRNNILKDAALTRRFNEVLVNEPSAKDTVEILKGIREKFEEHHQVKLPDDVLKACVDLSIQYIPQRLLPDKAIDVLDITAAHLSAQSPAVDKVETEKRISELENDKRKAVSAEEYKKADDIQNEIKSLQDKLENSNGEHTAVATVHDISDTIQRLTGIPVSQMDDNDIERLKNISNRLRSKIIGQDQAVEMVSRAIRRNRAGFDDGNRPIGSFLFVGPTGVGKTELAKQLAIDLFGNKDALIRLDMSEYSDTTAVSKMIGTTAGYVGYDDNSNTLTEKVRRNPYSVILFDEIEKANPQILTLLLQVMDDGNLTDGQGNVINFKNTIIICTSNAGFGNGNDAEEKDIMHEMKKFFRPEFLNRFNGIVEFLHLDKDALQDIVNLLLDDVQVTLDKKGITMDVSQDAKDWLIEEGYDEELGARPLRRIVEQQVRDKITDYYLDHTDVKHVDIDVEDNELVVKGK

SEQ ID NO: 6970 - protein, 200 aa, Lactobacillus sakei
MLCQNCQKNPATIHLYTSVNGQNQAINLCQNCYQALKQQGMSSQYNDPFGFSNLDELFNAINNPNAERNAANQGPQTQGGRNGGGNNGQNGESLFSQFGVNLTNLAKGGQIDPVIGRDKEIARVIEILNRRTKNNPVLIGEAGVGKTAVVEGLAQKIADGDVPAKLKDRQVIRLDVVSLVQGTGIRGQFEERMQQLITEL

SEQ ID NO: 6971 - protein, 814 aa, Treponema pallidum
MLQDLSANARKVLLELGQTVAREARASLLQPEHILLALIQHKVGRGYKLIEKLIEDVATVRLILEQHVLTNEGDVASPQDLPVSGRVKHLLDIAAMEARSLRCAYIGTEHLVIAFAREEQNPLFQSLIREGLSLDDLRNASIISSPHSDTTRTRLERKVASVLDEYGTDLTERARAGALNPVIGRNKEITRVIQILCRRGKNNPVLIGEPGVGKTSIVEGLAYAIVREEVPHILLHTRVVSLDLAAVIAGTKYRGQFEERLKRIIKEVEETEKVILFIDELHTLIGAGGTQGSLDAANMLKPALARGQIQCIGATTLAEYRRYFEKDAALTRRFRSVLVREPSFEETCTILRKIKSHYERHHQVIYQSDALEKIVELSRRYIPERFFPDKAIDLMDEVGAMKRVQQRADTQVLRSFSIKVANLTTETERAIALEDWARARSLHTDVVQLRRRLHALKVEWSAREALSIFAEDVAQAVSLMTDIPVHSLEGDELCRFTNIERDLCATVRGQREAIATLARAIVRARVGISSDTRPIGSFLFLGPTGVGKTLLAKTLAEFLFGSADALIRIDMSDYMERYNTSRLMGAPPGYVGFENGGLLTERVRHRPFSVILLDEIEKAHPDVFNVLLQVLEEGELQDNLGHTVNFRNTIIIMTSNAGTRGLGENVPGFQTARARNIEYRQLRVQALREIKRIFSPEFLNRVDECVVFAPLERETLQEILECELKKLAERLRGKDIVLRYSAAAKAYCLEHGFDPFLGARPLRRVLQQEIENELALRMIHGTLRAGSCVHIDSDGARLHLSTEKSYLTLHPQEI

SEQ ID NO: 6972 - protein, 940 aa, Pseudomonas putida KT2440
MLRQAPSRHLNDSRSARMASKQCQVCGQPATTRVEAKVNGRHSIMLLCDDHYRQLVRQQKRTLSPLEALFGSRSGLFEEFMGSDLLRIGEDSASVATDADEVAEASSGEPGRAASGTPRRRSSGLASRISEHSEALLQEAAKRATEFGRSEVDTEHLLLALADSDVVKTILSQFKIKVDELKRQIEAEAKRGDKPFEGEVGVSPRVKDALSRAFVASNELGHAYVGPEHFLIGLAEEGEGLAANLLRRYGLMPQALRQCVSKVVGKGAEDGRAEAPTETPELDKYSRDLTRMARDGKLDPVIGRAQEIETTIEVLARRKKNNPVLIGEPGVGKTAIVEGLAQRMVAGEVPETLRDKRLVELNINSLVAGAKYRGEFEERVQKVLKEIAEHQGELILFIDEVHTIVGAGQGGGEGGLDVANVFKPMMARGELNLIGATTLNEYQKYIEQDAALERRFQPVVVPEPTVAQTIMILRGLRDTFEAHHKVSITEEAIIAAAELSDRYVSARFLPDKAIDLLDQAAARVKLSATARPVAVQEMESELHQLRREQDYAASRKQYDNAAQISKRVEATEAELKQRVEEWERERGSGSTEVKAEHVAQIVSRLTGIPVNELTVEEREKLLHLEQRLHERLVGQDEAVRAVADAVRLSRAGLREGSKPVATFLFLGSTGVGKTELAKALAETIYGDESALLRIDMSEYGERHSVARLVGAPPGYVGYDEGGQLTEKVRRKPYSVLLLDEIEKAHADVYNILLQVFDDGRLTDGKGRVVDFTNTIIIATSNLGSDIIQRRLKAPGAAGEEYEKTKVEVMEVLRGHFRPEFLNRIDEIIVFHALGKQEIRHIVGLQLERVARNAASQGVTLTFDETLVDHLAQVGYKPEFGARELKRLIRSELETALAREMLGGGIGKGDHAHVRWDDKAERVGFDRRQAAPAKELDSENA

SEQ ID NO: 6973 - protein, 878 aa, Pseudomonas putida KT2440
MRRLPHSLRWGRLVNLKSLFAKLNETSRTATESAAALCLSEHHYEVEVEHLLLQLLDNNDSDLAPILRHYQVVAERLQAQLVTALGTFKKGNTRTPALSPHITRMIEQAWLLASIEYGVGQVRSAHLLQALLDDAELRRVVIASAPELEKINADDLRLNLAALVEGSAESRQASPLASPAAPVSTSSKASGKTPALDQYTVNLTQSAREGRIDPVLGREFEVRQMVDILTRRRQNNPILTGEAGVGKTAVVEGLALRIAQGDVPAVLKDVALHTLDLGLLQAGAGVKGEFENRLKAVIEEVKRSLHPIILFIDEAHTLIGSGGQAGQNDAANLLKPALARGELRTIAATTWAEYKKYFEKDAALARRFQVVKVEEPDEDKAIHMLRGLLGKMREHHKVAVMDEALVQAVRLSNRYITGRQLPDKAVSVLDTACARIALAQSSLPGALEDCRRQIDNLQAEIDVLGHEAGKGHDHARRLESLQAALQAEQQQEQQLNAQWQQELELVEQLKALDAANDADAQQLNTLRAELARVQGDQPLVHALVDSGAIAQVISGWTGIPLGKMLRDEIDTVQRLPALLGERVLGQDHALHEIGKRIKISRARMEDPNKPIGVFLLLGPSGVGKTETALALADTLYGGERNLITINMSEYQEAHTVSSLKGSPPGYVGYGEGGVLTEAVRRKPYSVVLLDEVEKAHPDVLELFFQVFDKGVLDDGEGREINFRNTVIILTSNTGTERIMQTCLNATELPTPEAIVEDLRDQLNHVFKPAFLGRLSIVPFYPVQDQILERIVALKLERIAKRFARNHQAELSYDQALVKAIAARCTEVDSGARNIDNILSQTLMPELAQRVLERMAQDAPIQHLAIELGSDGDFAYRLA

SEQ ID NO: 6974 - protein, 861 aa, Xylella fastidiosa 9a5c; identical to SEQ ID NO: 427

SEQ ID NO: 6975 - protein, 825 aa, Listeria monocytogenes
MMFGRFTQRAQKVLALSQEEAMRLNHSNLGTEHILLGLVREGEGIAAKALYELGISSEKVQQEVEGLIGHGEKAVTTIQYTPRAKKVIELSMDEARKLGHTYVGTEHILLGLIREGEGVAARVLSNLGISLNKARQQVLQLLGGGDATGAGRQTNTQATPTLDSLARDLTVIAREDNLDPVIGRSKEIQRVIEVLSRRTKNNPVLIGEPGVGKTAIAEGLAQQIVRNEVPETLRGKRVMTLDMGTVVAGTKYRGEFEDRLKKVMDEIRQAGNVILFIDELHTLIGAGGAEGAIDASNILKPPLARGELQCIGATTLDEYRKYIEKDRALERRFQPIKVDEPTVEESIQILHGLRDRYEAHHRVAITDEALEAAVRLSDRYISDRFLPDKAIDVIDESGSKVRLKSFTTPKNVKEMENNLSDLKKEKDAAVQGQEFEKAASLRDKEQKLKKSLDKKSLEETKANWQEKQGLDHSEVTEDIVAEVVASWTGIPVAKLAETETNKLLNMEKLLHERVIGQDAAVKAVSLAVRRARAGLKDPKRPIGSFIFLGPTGVGKTELARALAESMFGDEDSMIRIDMSEYMEKFSTARLVGAPPGYVGYEEGGQLTEKVRQKPYSVVLLDEIEKAHPDVFNMLLQVLDDGRLTDSKGRVVDFRNTVIIMTSNIGAQEMKQDKSMGFNVTDPLKDHKAMEHRVLQDLKQAFRPEFINRIDETIVFHSLQEKELKQIVTLLTAQLTKRLAERDIHVKLTEGAKSKIAKDGYDPEYGARPLKRAIQKEVEDMLSEELLRGNIKVGDYVEIGVKDGKLEVRKKDAPKKKTTSKKVKAK

SEQ ID NO: 6976 - protein, 728 aa, Listeria monocytogenes
MNCEKCNQNPATIQLYMNINGKRVEMPLCASCYAEVRNQANLGRMSPRSKWSPFDDVFRQLSGAANQANREQRSQANAQVQTQTAGGGNGILDEFGTNLTDMAKNEQLDPVIGRDKEIKRVIEILNRRNKNNPVRVIGEPGVGKTAVCEGLANAIVAGDVPEQTGMNKREVILLDVAFACFQEAGIRGQFEERMKQLIKELQERKNTILFIDEVHTIVGAGSAEGSMDAGNILKPALARGDLQMIGATTLKEYRTIEKDAALERRFQSRTSNCNRTIHKRNANYLNGLKPKYEDFHEVVYSPEALTAAVELSARYIQDRHLPDKAIDLMDEVGSKYNLSIEKLDENTVSERVARLEDEKIKALQMEDYEKAAKVRDEITRLEENKTIPSQNALSYKHQTYKRLLQEKTGLPVGRLREDEQSKMKNLERNLTGKVIGQEDAVKKVAKAIRRSRVGLKSKNRPIGSFLFVGPTGVGKTELGRTLARELFGTSEAWIRLDMSEFMEKHSISKLIGSPPGYVGHEEAGQLTEKVRRNPYSIILLDEIEKAHPDVQHMFLQILEDGRLTDSQGRTASFKDTVIIMTSNAGATDTEASVGFNTTTETKLEKGSDILAKLGAYFKPEFLNRLDSVIEFKSLEKDDLVQIIDLIARDLNEMLAQEGVTIDVSKEVKEHLVDLGYDPKFGARPLRRTIQEHLEDTIADSLIDQPEAKDLVATLNDNKEITITEQVTA

SEQ ID NO: 6977 - protein, 81 aa, Listeria monocytogenes
EKDAALERRFQKVLVPEPTVEDTVSILRGLKERFEIHHGVNIHDNALVAAASLSNRYITDRFLPDKAIDLVDEACATIRCR

SEQ ID NO: 6978 - protein, 866 aa, Listeria innocua
MDLQKFTQQVQQTIADAQNLAIASEHQEIDVIHVFKVLLTESDFAKRAYDVAEVNVEALQKVVDESLRKIPVVSGSGVNYGQAMSQALFQLMRDAEKEQKQLDDDFVSTEHLILAVMDQKSNPITVELKKQNKSKKQINEAILKIRGGKKVTSQNAEENYEALTKYGRDLVAEVRSGKLDPVIGRDAEIRNVIRILSRKTKNNPVLIGEPGVGKTAIVEGLAQRIVRKDVPEGLKDKTIISLDIGSLIAGAKYRGEFEERLKAVLQEVKQSDGQILLFIDEIHTIVGAGKTDGAMDAGNMLKPMLARGELHCIGATTLDEYRQYIEKDAALERRFQKVLVPEPTVEDTVSILRGLKERFEIHHGVNIHDNALVAAASLSNRYITDRFLPDKAIDLVDEACATIRVEIDSMPSELDEVTRKVMQLEIEEAALKEEKDPASERRLEMLQRELADYKEEANKMKSKWESEKSEISKIREVREQIDHLRHELEEAENNYDLNKAAELRHGKIPAVEKELLALETENREKTAQEDRILQEEVTENEIAEIVGRWTGIPVTKLVEGEREKLLKLADVLHQKVIGQDDAVQLVSDAVLRARAGIKDPKRPIGSFIFLGPTGVGKTELAKALAYNMFDSEDHMIRIDMSEYMEKHSVSRLVGAPPGYVGYEEGGQLTEAVRRNPYSIVLLDEIEKAHPDVFNILLQVLDDGRITDSQGRLIDFKNTVIIMTSNIGSNLLLERTEEGEISPELESDVMQILQSEFKPEFLNRVDDIILFKPLTLADIKGIVEKLVEELQIRLADQEITITISDNAKAFIAEEAYDPVYGARPLKRYIVRHVETPLAREIVSGKIMPHSSVEIDLQDKEFTFKVTE

SEQ ID NO: 6979 - protein, 820 aa, Listeria innocua
MMFGRFTQRAQKVLALSQEEAMRLNHSNLGTEHILLGLVREGEGIAAKALYELGISSEKVQQEVEGLIGHGEKAVTTIQYTPRAKKVIELSMDEARKLGHTYVGTEHILLGLIREGEGVAARVLSNLGISLNKARQQVLQLLGGGDATGAGRQTNTQATPTLDSLARDLTVIAREENLDPVIGRSKEIQRVIEVLSRRTKNNPVLIGEPGVGKTAIAEGLAQQIVRNEVPETLRGKRVMTLDMGTVVAGTKYRGEFEDRLKKVMDEIRQAGNVILFIDELHTLIGAGGAEGAIDASNILKPPLARGELQCIGATTLDEYRKYIEKDAALERRFQPIKVDEPTVEESIQILHGLRDRYEAHHRVAITDEALEAAVRLSDRYISDRFLPDKAIDVIDESGSKVRLKSFTTPKNVKEMENNLSELKKEKDAAVQGQEFEKAAALRDKEQKLKKSLEETKANWQEKQGLDHSEVTEDIVAEVVASWTGIPVAKLAETETNKLLNMEKLLHERVIGQDAAVKAVSLAVRRARAGLKDPKRPIGSFIFLGPTGVGKTELARALAESMFGDEDSMIRIDMSEYMEKFSTARLVGAPPGYVGYEEGGQLTEKVRQKPYSVVLLDEIEKAHPDVFNMLLQVLDDGRLTDSKGRVVDFRNTVIIMTSNIGAQEMKQDKSMGFNVIDPLKDHKAMEHRVLQDLKQAFRPEFINRIDETIVFHSLQEKELKQIVTLLTSQLTKRLAERDIHVKLTEGAKAKIAKDGYDPEYGARPLKRAIQKEVEDMLSEELLRGNIKVGDNVEIGVKDGKLEVRKKAATKKKAAPKKVKSK

SEQ ID NO: 6980 - protein, 724 aa, Listeria innocua
MNCEKCNQNQATIQLYMNINGKRVEMPLCASCYAEVRNQANFGANEFPGAGGSPFDDIFRQLSGAANQASREQQSQRNAQVQTQTGGAGNGLLDEFGTNLTDMAKNDQLDPVIGRDKEIKRVIEILNRRNKNNPVLIGEPGVGKTAVVEGLANAIVAGEVPSKLMNKEVILLDVASLVSGTGIRGQFEERMKQLIKELQERKNTILFIDEVHTIVGAGSAEGSMDAGNILKPALARGDLQMIGATTLKEYRTIEKDAALERRFQPVTVNEPSNEETLTILNGLKSKYEDFHEVVYSPEALKAAVELSSRYIQDRHLPDKAIDLMDEVGSKYNLSIEKLDENTVSERVARLEEEKNQALQMEDYEKAAKVRDEITRLEENKTSNSFSERPVIQSSDIQAIIEEKTGIPVGRLQEDEQSKMKNLESNLTGKVIGQDDAVKKVAKAIRRSRVGLKAKNRPIGSFLFVGPTGVGKTELGRTLARELFGTSEAMIRLDMSEFMEKHSVSKLIGSPPGYVGHEEAGQLTEKVRRNPYSIILLDEIEKAHPDVQHMFLQILEDGRLTDSQGRTVSFKDTVIIMTSNAGTTDTEASVGFNTATDNKLEKGSDILAKLGAYFKPEFLNRLDSVIEFKSLEKDDLVQIIDLMLVDLNSMLAQEGVTIDVSKEVKEHLIELGYDPKFGARPLRRTIQEHLEDAIADSLIDQPEAKKLNATLNDDKNIVITEQVTV

SEQ ID NO: 6981 - protein, 866 aa, Listeria monocytogenes EGD-e
MDLQKFTQQVQQTIADAQNLAIASEHQEIDVAHVFKVLLTESDFAKRVYDVAEVDTDALQKVIENTLEKIPVVSGSGVNYGQAMSQALFQLMRDAEKEQQQLEDDFVSTEHLILAVMDQKSNPITAELKNQHKAKKQIKEAILKIRGGKRVTSQNAEENYEALTKYGRDLVAEVRSGKLDPVIGRDAEIRNVIRILSRKTKNNPVLIGEPGVGKTAIVEGLAQRIVRKDVPEGLKDKTIISLDIGSLIAGAKYRGEFEERLKAVLQEVKQSDGQILLFIDEIHTIVGAGKTDGAMDAGNMLKPMLARGELHCIGATTLDEYRQYIEKDAALERRFQKVLVPEPTVEDTVSILRGLKERFEIHHGVNIHDNALVAAASLSNRYITDRFLPDKAIDLVDEACATIRVEIDSMPSELDEVTRKVMQLEIEEAALKEEKDPASERRLEILQRELADYKEEANQMKSKWESEKNEISKIREVREQIDHLRHELEEAENNYDLNKAAELRHGRIPAVEKELLELEAENREKTAQEDRILQEEVTENEIAEIVGRWTGIPVTKLVEGEREKLLKLADVLHQKVIGQDDAVQLVSDAVLRARAGIKDPKRPIGSFIFLGPTGVGKTELAKALAFNMFDSEDHMIRIDMSEYMEKHSVSRLVGAPPGYIGYEEGGQLTEAVRRNPYSIVLLDEIEKAHPDVFNILLQVLDDGRITDSQGRLIDFKNTVIIMTSNIGSNLLLERTEEGEISPELESDVMQILQSEFKPEFLNRVDDIILFKPLTLADIKGIVEKLVEELQIRLADQEITITISDDAKAFIAEEAYDPVYGARPLKRYIVRHVETPLAREIVSGKIMPHSSVEIDLADKEFTFKVTE

SEQ ID NO: 6982 - protein, 820 aa, Listeria monocytogenes EGD-e
MMFGRFTQRAQKVLALSQEEAMRLNHSNLGTEHILLGLVREGEGIAAKALYELGISSEKVQQEVEGLIGHGEKAVTTIQYTPRAKKVIELSMDEARKLGHTYVGTEHILLGLIREGEGVAARVLSNLGISLNKARQQVLQLLGGGDATGAGRQTNTQATPTLDSLARDLTVIAREDNLDPVIGRSKEIQRVIEVLSRRTKNNPVLIGEPGVGKTAIAEGLAQQIVRNEVPETLRGKRVMTLDMGTVVAGTKYRGEFEDRLKKVMDEIRQAGNVILFIDELHTLIGAGGAEGAIDASNILKPPLARGELQCIGATTLDEYRKYIEKDAALERRFQPIKVDEPTVEESIQILHGLRDRYEAHHRVAITDEALEAAVRLSDRYISDRFLPDKAIDVIDESGSKVRLKSFTTPKNVKEMENNLSDLKKEKDAAVQGQEFEKAASLRDKEQKLKKSLEETKANWQEKQGLDHSEVTEDIVAEVVASWTGIPVAKLAETETNKLLNMEKLLHERVIGQDAAVKAVSLAVRRARAGLKDPKRPIGSFIFLGPTGVGKTELARALAESMFGDEDSMIRIDMSEYMEKFSTARLVGAPPGYVGYEEGGQLTEKVRQKPYSVVLLDEIEKAHPDVFNMLLQVLDDGRLTDSKGRVVDFRNTVIIMTSNIGAQEMKQDKSMGFNVTDPLKDHKAMEHRVLQDLKQAFRPEFINRIDETIVFHSLQEKELKQIVTLLTAQLTKRLAERDIHVKLTEGAKSKIAKDGYDPEYGARPLKRAIQKEVEDMLSEELLRGNIKVGDYVEIGVKDGKLEVRKKDAPKKKTTSKKVKAK

SEQ ID NO: 6983 - protein, 724 aa, Listeria monocytogenes EGD-e
MNCEKCNQNPATIQLYMNINGKRVEMPLCASCYAEVRNQANFGSNEFPGASGSPFDDIFRQLSGAANQANREQRSQANAQVQTQTAGGGNGILDEFGTNLTDMAKNEQLDPVIGRDKEIKRVIEILNRRNKNNPVLIGEPGVGKTAVVEGLANAIVAGDVPSKLMNKEVILLDVASLVSGTGIRGQFEERMKQLIKELQERKNTILFIDEVHTIVGAGSAEGSMDAGNILKPALARGDLQMIGATTLKEYRTIEKDAALERRFQPVTVSEPSTKETLTILNGLKPKYEDFHEVVYSPEALTAAVELSARYIQDRHLPDKAIDLMDEVGSKYNLSIEKLDENTVSERVARLEDEKNQALQMEDYEKAAKVRDEITRLEENKTSNSFSERPVIQASDIQAIIEEKTGIPVGRLQEDEQSKMKNLERNLTGKVIGQEDAVKKVAKAIRRSRVGLKSKNRPIGSFLFVGPTGVGKTELGRTLARELFGTSEAMIRLDMSEFMEKHSISKLIGSPPGYVGHEEAGQLTEKVRRNPYSIILLDEIEKAHPDVQHMFLQILEDGRLTDSQGRTVSFKDTVIIMTSNAGATDTEASVGFNTTTETKLEKGSDILAKLGAYFKPEFLNRLDSVIEFKSLEKDDLVQIIDLMLVDLNEMLAQEGVTIDVSKEVKEHLIDLGYDPKFGARPLRRTIQEHLEDTIADSLIDQPEAKNLVATLNDNKEITITEQVTA

SEQ ID NO: 6984 - protein, 817 aa, Staphylococcus epidermidis ATCC 12228
MLFGRLTERAQRVLAHAQEEAIRLNHSNIGTEHLLLGLMKEPEGIAAKVLVSFNITEDKVIEEVEKLIGHGQEQMGTLHYTPRAKKVIELSMDEARKLHHNFVGTEHILLGLIRENEGVAARVFANLDLNITKARAQVVKALGSPEMSNKNAQANKSNNTPTLDGLARDLTVIAKDGTLDPVVGRDKEITRVIEVLSRRTKNNPVLIGEPGVGKTAIAEGLAQAIVKNEVPETLKDKRVMSLDMGTVVAGTKYRGEFEERLKKVMEEIHQAGNVILFIDELHTLVGAGGAEGAIDASNILKPALARGELQCIGATTLDEYRKNIEKDAALERRFQPIQVDEPTVEDTIEILKGLRDRYEAHHRINISDEALEAAAKLSDRYVSDRFLPDKAIDLIDEASSKVRLKSHTTPSNLKEIEQEIDKVKNEKDAAVHAQEFENAANLRDKQSKLEKQYEDAKNEWKNAQGGLDTALSEENIAEVIAGWTGIPLTKINETESDRLLNLEDTLHKRVIGQNDAVNSISKAVRRARAGLKDPKRPIGSFIFLGPTGVGKTELARALAESMFGEDDAMIRVDMSEFMEKHAVSRLVGAPPGYVGHDDGGQLTEKVRRKPYSVILFDEIEKAHPDVFNILLQVLDDGHLTDTKGRTVDFRNTVIIMTSNVGAQELQDQRFAGFGGASEGSDYETVRKTMMKELKNSFRPEFLNRVDDIIVFHKLTKDELKEIVTMMVNKLTHRLSEQNINIVVTDKAKEKIAEEGYDPEYGARPLIRAIQKTVEDNLSELILDGNKIEGKEVTIDHDGKEFKYDIYEITAKKETTES

SEQ ID NO: 6985 - protein, 848 aa, Mycobacterium leprae
MFERFTDRARRVVVLAQEEARMLNHNYIGTEHILLGLIHEGEGVAAKSLDSLGISLEAVRSQVEDIIGQGQQAPSGHIPFTPRAKKVLELSLREALQLGHNYIGTEHILLGLIREGEGVAAQVLVKLGAELTRVRQQVIQLLSGYQGKEAAEAGTGGRGGESGSPSTSLVLDQFGRNLTAAAMESKLDPVIGREKEIERVMQVLSRRTKNNPVLIGEPGVGKTAVVEGLAQAIVHGEVPETLKDKQLYTLDLGSLVAGSRYRGDFEERLKKVLKEINTRGDIILFIDELHTLVGAGAAEGAIDAASILKPKLARGELQTIGATTLDEYRKYIEKDAALERRFQPVQVGEPTVEHTIEILKGLRDRYEAHHRVSITDSAMVAAATLADRYINDRFLPDKAIDLIDEAGARMRIRRMTAPPDLREFDEKIAEARREKESAIDAQDFEKAASLRDREKQLVAQRAEREKQWRSGDLDVIAEVDDEQIAEVLGNWTGIPVFKLTEAETTRLLRMEEELHKRIIGQEDAVKAVSKAIRRTRAGLKDPKRPSGSFIFAGPSGVGKTELSKALANFLFGDDDALIQIDMGEFHDRFTASRLFGAPPGYVGYEEGGQLTEKVRRKPFSVVLFDEIEKAHQEIYNSLLQVLEDGRLTDGQGRTVDFKNTVLIFTSNLGTSDISKPVGLGFTQGSGENDYERMKQKVNDELKKHFRPEFLNRIDDIIVFHQLSRDEIIRMVDLMISRVANQLKVKDMTLELTNKAKALLAKRGFDPVLGARPLRRTIQREIEDQLSEKILFEEVGPGQVVTVDVDNWDGEGPGEDVKFTFTGIRKPSTEPDLAKAGVHSAGGPEPVEQ

SEQ ID NO: 6986 - protein, 649 aa, Mycobacterium leprae
MFERFTDRARRVVVLAQEEARMLNHNYIGTEHILLGLIHEGEGVAAKSLDSLGISLEAVRSQVEDIIGQGQQAPSGHIPFTPRAKKVLELSLREALQLGHNYIGTEHILLGLIREGEGVAAQVLVKLGAELTRVRQQVIQLLSGYQGKEAAEAGTGGRGGESGSPSTSLVLDQFGRNLTAAAMESKLDPVIGREKEIERVMQVLSRRTKNNPVLIGEPGVGKTAVVEGLAQAIVHGEVPETLKDKQLYTLDLGSLVAGSRYRGDFEERLKKVLKEINTRGDIILFIDELHTLVGAGAAEGAIDAASILKPKLARGELQTIGATTLDEYRKYIEKDAALERRFQPVQVGEPTVEHTIEILKGLRDRYEAHHRVSITDSAMVAAATLADRYINDRFLPDKAIDLIDEAGARMRIRRMTAPPDLREFDEKIAEARREKESAIDAQDFEKAASLRDREKQLVAQRAEREKQWRSGDLDVIAEVDDEQIAEVLGNWTGIPVFKLTEAETTRLLRMEEERHKRIIGQEDAVKAVSKAIRRTRAGLKDPKRPSGSFIFAGPSGVGKTELSKALANFLFGDDDALIQIDMGEFHDRFTASRLFGAPPGYVGYEEGGQLTEKVRRKPFSVVLFDEIEKAHQEIYNSLLQVLEDGRLEF

SEQ ID NO: 6987 - protein, 649 aa, Mycobacterium leprae
MFERFTDRARRVVVLAQEEARMLNHNYIGTEHILLGLIHEGEGVAAKSLDSLGISLEAVRSQVEDIIGQGQQAPSGHIPFTPRAKKVLELSLREALQLGHNYIGTEHILLGLIREGEGVAAQVLVKLGAELTRVRQQVIQLLSGYQGKEAAEAGTGGRGGESGSPSTSLVLDQFGRNLTAAAMESKLDPVIGREKEIERVMQVLSRRTKNNPVLIGEPGVGKTAVVEGLAQAIVHGEVPETLKDKQLYTLDLGSLVAGSRYRGDFEERLKKVLKEINTRGDIILFIDELHTLVGAGAAEGAIDAASILKPKLARGELQTIGATTLDEYRKYIEKDAALERRFQPVQVGEPTVEHTIEILKGLRDRYEAHHRVSITDSAMVAAATLADRYINDRFLPDKAIDLIDEAGARMRIRRMTAPPDLREFDEKIAEARREKESAIDAQDFEKAASLRDREKQLVAQRAEREKQWRSGDLDVIAEVDDEQIAEVLGNWTGIPVFKLTEAETTRLLRMEEELHKRIIGQEDAVKAVSKAIRRTRAGLKDPKRPSGSFIFAGPSGVGKTELSKALANFLFGDDDALIQIDMGEFHDRFTASRLFGAPPGYVGYEEGGQLTEKVRRKPFSVVLFDEIEKAHQEIYNSLLQVLEDGRLEF

SEQ ID NO: 6988 - protein, 874 aa, Agrobacterium tumefaciens str. C58 (U. Washington)
MNIDKYSERVRGFLQSAQTFALAENHQQFSPEHVLKVLLDDEQGMAASLIERAGGDAKEARLANDAALAKLPKVSGGNGGLSLTAPLAKVFSTAEDLAKKAGDSFVTVERLLQALAIESSASTSASLKKAGATAQALNQVINDIRKGRTADSANAEQGFDALKKYARDLTEEAREGRLDPVIGRDDEIRRTIQVLSRRTKNNPVLIGEPGVGKTAIAEGLALRIVNGDVPESLKDKKLMALDMGALIAGAKYRGEFEERLKAVLNEVQAENGGIILFIDEMHTLVGAGKADGAMDASNLLKPALARGELHCVGATTLDEYRKHVEKDPALARRFQPVLVDEPNVEDTISILRGLKEKYEQHHKVRISDSALVAAATLSNRYITDRFLPDKAIDLMDEAASRLRMQVDSKPEELDELDRRIIQLKIEREALKQETDQSSVDRLRKLEDELADTEEKADALTARWQAEKQKLGHAADLKKRLDEARNELAIAQRNGQFQRAGELTYGIIPGLEKELAAAEARDSSGAGSMVQEVVTPDNIAHVVSRWTGIPVDKMLEGQREKLLRMEDELAKSVVGQGEAVQAVSKAVRRSRAGLQDPNRPIGSFIFLGPTGVGKTELTKSLARFLFDDETAMVRLDMSEYMEKHSVARLIGAPPGYVGYEEGGALTEAVRRRPYQVVLFDEIEKAHPDVFNVLLQVLDDGRLTDGQGRTVDFKNTIIIMTSNLGSEFMTQMGDNDDVDSVRELVMERVRSHFRPEFLNRIDDIILFHRLRRDEMGAIVEIQLKRLVSLLADRKITLELDEDARSWLANKGYDPAYGARPLKRVIQKSVQDRLAEMILGGEIPDGSRVKVTSGTDRLLFKVKPAKGEAETETADAA

SEQ ID NO: 6989 - protein, 892 aa, Agrobacterium tumefaciens str. C58 (U. Washington)
MSHIDLNRLVGALEPDLRVTLEAAASVAVRMGHRYVDIPHWLLAVVDAGIYAETFDELKIPLPVLKAEIGRSLEEAIIGDGEALSLSQNILTAAREAWILASLEAGRDRVTLCDLLLAMDEETSLRSFVRSAFPSLKAMDRGALERLRSSAENGAGVDVPSALTSSGEAGSAQAAGQNDFLRLYTHDMTTDARNGKVDPVIGRDDELRQLVDILTRRRQNNPILVGEAGVGKTAVAEALALEIASGNVPEKLRNVCLLNLDISLLQAGAGVKGEFERRLHGVIDAVKRSAEPVILFIDEAHGLVGAGGAAGQGDAANILKPALARGEVRTVAATTWSEYKKYFEKDAALTRRFQPVHVREPDEATAIRMLRGVADTFVSHHNVTVRDEAIVAAVQLSARYMPARQLPDKAVSLLDTAAAAVSLARQTLPERLRAMESERHLLSDELNWLLREPQDEDMQNRIQSIRDELERLEAGIDDLRGRYDAEMAELAALSEEQPAETGASNVSHLRPATEMRPANAERLVPTVVDREAIAAVVSRWTGIPLGKLLADQIESARTLDVRMRQRVVGQDAAITRIADAMRTARAGLSDPRRPPAVFFLVGMSGTGKTETALSLADLLYGGNSHLTTINMSEFKEEHKVSLLLGSPPGYVGFGEGGVLTEAVRRRPFGVLLLDEIDKAHPGVQDIFYQVFDKGVLRDGEGRDVDFKNTTIFMTANTGSELLSALSADPDTMPEGEALEALLMPELTKQFKPAFLGRTIILPFMPLGAEELASVVDMQIGKIRDRVLATYGTDLRLSDAARDALVARAGASEIGARAIEIMIGKDLLPPLSSFFLEKVIAGERVGKIVVDFGENGFGIRAEAAGEADEFAVTEEVGVDKVAASDGATRRMRH

SEQ ID NO: 6990 - protein, 887 aa, Agrobacterium tumefaciens str. C58 (Cereon)
MPKAGGPVYGGSTMNIDKYSERVRGFLQSAQTFALAENHQQFSPEHVLKVLLDDEQGMAASLIERAGGDAKEARLANDAALAKLPKVSGGNGGLSLTAPLAKVFSTAEDLAKKAGDSFVTVERLLQALAIESSASTSASLKKAGATAQALNQVINDIRKGRTADSANAEQGFDALKKYARDLTEEAREGRLDPVIGRDDEIRRTIQVLSRRTKNNPVLIGEPGVGKTAIAEGLALRIVNGDVPESLKDKKLMALDMGALIAGAKYRGEFEERLKAVLNEVQAENGGIILFIDEMHTLVGAGKADGAMDASNLLKPALARGELHCVGATTLDEYRKHVEKDPALARRFQPVLVDEPNVEDTISILRGLKEKYEQHHKVRISDSALVAAATLSNRYITDRFLPDKAIDLMDEAASRLRMQVDSKPEELDELDRRIIQLKIEREALKQETDQSSVDRLRKLEDELADTEEKADALTARWQAEKQKLGHAADLKKRLDEARNELAIAQRNGQFQRAGELTYGIIPGLEKELAAAEARDSSGAGSMVQEVVTPDNIAHVVSRWTGIPVDKMLEGQREKLLRMEDELAKSVVGQGEAVQAVSKAVRRSRAGLQDPNRPIGSFIFLGPTGVGKTELTKSLARFLFDDETAMVRLDMSEYMEKHSVARLIGAPPGYVGYEEGGALTEAVRRRPYQVVLFDEIEKAHPDVFNVLLQVLDDGRLTDGQGRTVDFKNTIIIMTSNLGSEFMTQMGDNDDVDSVRELVMERVRSHFRPEFLNRIDDIILFHRLRRDEMGAIVEIQLKRLVSLLADRKITLELDEDARSWLANKGYDPAYGARPLKRVIQKSVQDRLAEMILGGEIPDGSRVKVTSGTDRLLFKVKPAKGEAETETADAA

SEQ ID NO: 6991 - protein, 864 aa, Agrobacterium tumefaciens str. C58 (Cereon)
MRMGHRYVDIPHWLLAVVDAGIYAETFDELKIPLPVLKAEIGRSLEEAIIGDGEALSLSQNILTAAREAWILASLEAGRDRVTLCDLLLAMDEETSLRSFVRSAFPSLKAMDRGALERLRSSAENGAGVDVPSALTSSGEAGSAQAAGQNDFLRLYTHDMTTDARNGKVDPVIGRDDELRQLVDILTRRRQNNPILVGEAGVGKTAVAEALALEIASGNVPEKLRNVCLLNLDISLLQAGAGVKGEFERRLHGVIDAVKRSAEPVILFIDEAHGLVGAGGAAGQGDAANILKPALARGEVRTVAATTWSEYKKYFEKDAALTRRFQPVHVREPDEATAIRMLRGVADTFVSHHNVTVRDEAIVAAVQLSARYMPARQLPDKAVSLLDTAAAAVSLARQTLPERLRAMESERHLLSDELNWLLREPQDEDMQNRIQSIRDELERLEAGIDDLRGRYDAEMAELAALSEEQPAETGASNVSHLRPATEMRPANAERLVPTVVDREAIAAVVSRWTGIPLGKLLADQIESARTLDVRMRQRVVGQDAAITRIADAMRTARAGLSDPRRPPAVFFLVGMSGTGKTETALSLADLLYGGNSHLTTINMSEFKEEHKVSLLLGSPPGYVGFGEGGVLTEAVRRRPFGVLLLDEIDKAHPGVQDIFYQVFDKGVLRDGEGRDVDFKNTTIFMTANTGSELLSALSADPDTMPEGEALEALLMPELTKQFKPAFLGRTIILPFMPLGAEELASVVDMQIGKIRDRVLATYGTDLRLSDAARDALVARAGASEIGARAIEIMIGKDLLPPLSSFFLEKVIAGERVGKIVVDFGENGFGIRAEAAGEADEFAVTEEVGVDKVAASDGATRRMRH

SEQ ID NO: 6992 - protein, 861 aa, Xylella fastidiosa Temecula1
MRMDKLTSRFQNALADAQSLAVGRDHTIIEPVHVFSVLLDQQGGSTRPLLVQAGVNVPLLRERLTEILEALPKVSGQTVNVSPSNELSRLFHRTDKLAQQHGDQFMASEWFVLAVVDDSGGLGQALRAAGAEKKKIEAAIDKLRGGETVQTENAEEQRQALEKYTIDLTARAESGKLDPVIGRDEEIRRTIQVLQRRTKNNPVLIGEPGVGKTAIVEGLAQRIVNGEVPEGLRSKRLLSLDLGALIAGAKFRGEFEERLKGVLNDLAKNEGRVILFIDELHTMVGAGKAEGAMDAGNMLKPALARGELHCIGATTLDEYRKYIEKDAALERRFQKVFVGEPTVEDTIAILRGLKEKYALHHGVEITDPAIVAAATLSNRYITDRQLPDKAIDLMDEAASRIRMEIDSKPEELDRLERRLIQLKIQREMLKKEKDEASKQRLVDLERDIEVLDREFSDLEEVWRSEKAALQGATKIKESIEQAKLDLEAAQRRQDYAKMSEIQYGVLPALEKQLVAASQAEQHDFTLVQEKVTAEEIAEVVSRWTGIPVSKMLEGERDKLLRMEADLGRRVVGQDEAIKVVSDAVRRSRTGLSDPNRPSGSFLFLGPTGVGKTELCKALAEFLFDSQDAMVRIDMSEFMEKHSVARLIGAPPGYVGYEEGGYLTELVRRRPYSLILLDEVEKAHSDVFNILLQVLDDGRLTDGQGRTVDFRNTVIVMTSNLGSHQIQELSGDDSPEVYTQMKAAVMGVVQAHFRPEFINRLDDIVVFHPLDKAQIKQIARIQLRGLEKRLAESELKLDLDDRALELLGNVGFDPVYGARPLKRAIQSQLENALAQQILAGAFVSGDTVQVGVDGGKLVFSKV

SEQ ID NO: 6993 - protein, 864 aa, Yersinia pestis KIM
MTNIGGVMRLDRLTSKFQLALADAQSLALGRDNQFIEPLHLMSALLNQDGGTVRPLLTSAGINVARLRSDIEQALGRLPQVEGTGGDVQPSNELVRVLNLCDKLAQKRSDKFISSELFVLAVLEDRGTLTDMLKAAGATVAIIDKAIETMRGGDKVDDQGAEDQRQALKKFTIDLTERAEQGKLDPVIGRDEEIRRTIQVLQRRTKNNPVLIGEPGVGKTAIVEGLAQRIVNGEVPEGLKHKRVLSLDMGSLIAGAKYRGEFEERLKGVLNDLSKQEGSVILFIDELHTMVGAGKGDGAMDAGNMLKPALARGELHCVGATTLDEYRQYIEKDAALERRFQKVYVAEPTVEDTIAILRGLKERYELHHHVQITDPAIVAAATLSHRYISDRQLPDKAIDLIDEAGSSIRMQMDSKPESLDRLERRIIQLKLEQQALKKESDDASKKRLEMLNTELEQKEREYSELEEEWKAEKASLTGTQNIKTELEQAKITLEQARRVGDLARMSELQYGTIPELEKQLAAATALEGKTMKLLRNRVTEIEVAEVLARWTGIPVSRMLESERDKLLRMEQDLHQRVIGQDEAVEAVSNAIRRSRAGLSDPNRPIGSFLFLGPTGVGKTELCKALATFLFDSDDAMVRIDMSEFMEKHSVSRLVGAPPGYVGYEEGGYLTEAVRRRPYSVILLDEVEKAHPDVFNILLQVLDDGRLTDGQGRTVDFRNTVVIMTSNLGSDLIQEHFGQMNYSEMKTVVMDVVSHHFRPEFINRIDEVVVFHPLGRAHLASIANIQLERLYKRLEERGYEVKITQPALEFLGEAGFDPVYGARPLKRAIQQEIENPLAQQILSGKLIPGIPVTLDVENGHIIAKQ

SEQ ID NO: 6994 - protein, 879 aa, Yersinia pestis KIM
MTTHSAHLLRRLNPYCAQALAGAATLCQTRAHAEITVEHWLLKLLEQGEGDITVIARRYEWDMDSLWQGLLSHLDTLPRTVQGKPQLSAALQQLIKNAWLDASLQENADAVRSVHLMAALIATPSLLVAEAAWPLLSLSTTQLQRLLPLLDNQSDERPEVQQAAALADSPVNLTDEAATVTSASGQPQLNDALQAALDKFTLDVTAKARANQIDPIFGRDSEIRQMIDILSRRRKNNPILVGEPGVGKTALVEGLALRIADGNVPDSLKTVSVRTLDLGLLQAGAGVKGEFEQRLKNVIEAVQQSPSPVLLFIDEAHTIIGAGNQAGGADAANLLKPALARGELRTIAATWSEYKQYFERDAALERRFQMVKVDEPDDDTACLMLRGLKERYATHHGVHILDAAITAAVTLSRRFLTGRQLPDKAVDLLDTAGARVRMSIDTLPTALMEINAELAALAMEQQAIEQDLLLLPNVSSTRLPEIEQRRAALAVGQHTLEQQYKEEKRLTTLIIEARQDIANAAHLVALQEELVQIQGNAPLLSLDVDVRTVAAVIADWTGVPLGSLLKDEQTNLLSLENRLGERVIGQDAALGALAQRLRAAKTGLTSENGPLGVFLLVGPSGIGKTETALALADSLFGGEKSLITINLSEYQEAHTVSQLKGSPPGYVGYGQGGVLTEAVRKRPYSVVLLDEVEKAHRDVLNLFYQVFDRGFMRDGEGREIDFRNTVIVMTANLGSDHLMQLLDEQPDAPDSTLHELLRPILRDHFQPALLARFQTLIYRPLQVDALKRIVAIKLNQVAQRLHCHYGLSCQIEDSLTDTLVAACLLPDTGARNIDSLLNQQILPVLSQQLLSRMSEQQRTTSLTLGWHEEDGITLTFEGE

SEQ ID NO: 6995 - protein, 916 aa, Yersinia pestis KIM
MVHQALFHEQFKLHMNAVKKTRIKNVAITRKHLFGKLDATLFKGIESATTICKLRGNPYVELVHWLNQLWHQEDNDLKQIIRYFAVDVDAFERELAQALAKLPVGATSISDFSYHIELATERAWIYASLECLDTRIRSGHLLLALLTTMELRRAFFAIAPSMEKIPLEHLSKDLNFITQASPEANEAASDGSPLYDGALPGEASNAIGAAKSGGALAQYTTDLTALAREGKIDPVLGRNHEINTMVDILLRRRQNNPLLTGDAGVGKTAIVEGLALAIAAGSMPPALSQVSLLSLDIVALSAGASMKGEFEARLKSVLDEAIAAEKPVILFIDEVHTLIGAGGNAGTGDAANLLKPALARGQLRTIGATTWSEFKRHIEKDPALTRRFQVLQVDEPDENTAISMLRGLIPALEKHHGVWIMDEALQAAVRLSHRYIPARQLPDKAISLLDTACARIAVAQFSQPIELQHLTFQSETAQTELVSLEKARHFGKAQDARTEQLKTSIAEHGEAADKLDQRWQAERELVSAITTIRTALYDLVSQPEPDEEKRRAYQAQLVQLEAQLSQVRTSLPLVQTEVNAEVIASIVADWTGIPVGQMLKDDIRAVMELPQRLEARVIGQPHALMQLGENIMTARAGLSDPRKPLGVFMLVGPSGVGKTETALAIAESMYGGEQNMITINMSEYQESHTVSSLKGSPPGYVGYGEGGVLTEAVRRKPYSVVLLDEIEKAHSDVHELFFQVFDKGQMEDGEGRFIDFKNTILLLTSNVGSELLSNLLADPDTAPDQDGILSALQPELLKVFPAAFLGRVTVIPYLPLQQDALQHIVRLHLDRIGARLYSQHQLTLKYSDEVVEDVVSRCAVSETGARMLIRYIEQNITPKIGKYILGDSDVKPEQIIFVHKNENGFVIALQCKDDEN

SEQ ID NO: 6996 - protein, 797 aa, Micromonospora echinospora
MRVRGVAAKALESLGISLEGVRQQVEEIIGQGQQAPSGHIPFTPRAKKVLELSLREALQLGHNYIGTEHILLGLIREGEGVAAQVLVKLGADLNRVRQQVIQLLSGYQGKEPAAAGAAAGEAAPSTSLVLDQFGRNLTQAAREGKLDPVIGREKEIERVMQVLSRRTKNNPVLIGEPGVGKTAVVEGLSQKIIKGEVPETLKDKQLYTLDLGALVAGSRYRGDFEERLKKVLKEIRTRGDIILFIDEIHTLVGAGAAEGAIDAASILKPMLARGELQTIGATTLDEYRKHLEKDAALERRFQPIQVGEPSLAHTIEILKGLRDRYEAHHRVSITDAALVAAATLADRYISDRFLPDKAIDLIDEAGARMRIRRMTAPPDLRDFDERIAQVRRDKESAIDAQDFERAAQLRDKEKQLLGQKAQREKEWKAGDLDVVSEVDDEQIAEVLGNWTGIPVYKLTEEETSRLLRMEDELHKRVIGQEDAVKAVSKAIRRTRAGLKDPKRPSGSFIFAGPSGVGKTELSKALAEFLFGSEDALIQLDMSEFHDRYTVSRLVGAPPGYVGYDEGGQLTEKVRRRPFSVVLFDEIEKAHPDVFNTLLQILEDGRLTDGQGRIVDFKNTVIILTTNLGTRDVAKAVSLGFQASEDSESNYDRMKQKVNDELKQHFRPEFLNRIDDTIVFHQLRENEILSIVDIMIARIETQLRNKDMGLELTDNAKKYLAKKGFDPVLGARPLRRTIQRDIEDNLSERILFNELTPGQIVVVDCEGDPSNTAKSKLVFRGADKPPTGPVPDAGAVTA

SEQ ID NO: 6997 - protein, 726 aa, Magnetospirillum magnetotacticum
AHGQEDGRAGGTCPGKISRKPRGKKLGRDQGPTGLPIFAFARRRRRVPASVTARIQNMELCDQHYSEMARRSGRSASPLESLFGRRSLLDEFFGESGFGSLFGDSPLRGGTLGSMGDGDDAVVDATVGEGAPRRGSRRGGGRTIADRLSEQGNKLLQDAAQKAGEFGRSEVDTEHLLLALTSSDVVKTILEQFKVDVDDLRRQIEKEAKRGDAKTEGEIGVSPRLKDALNRAFIASNELGHSYVGPEHLLIGLAEEGEGLAAAMLRKLGLTPQALRQQVTKVVGKGAEEGRVETPSNTPDLDQFSRDLTKLARDGKLDPVIGRAREIETTIEVLARRKKNNPVLIGEPGVGKTAIVEGLAQRIVAGEVPEALRDKRLVELNINSMVAGSKYRGEFEERVQKILKEITEEKDSLILFIDEMHTIVGAGQGGGEGGLDIANTFKPALARGELNLIGATTLNEYQKYIEKDAALERRFQPVYVDEPTVAQTIMILRGLRDTLESHHKVTITDEAIIAAAELSDRYITGRFMPDKAIDLIDQAAARVKISATARPVDVQELEAEVAQIKREQDYAAARKQFDRAAELKKELEQKQKELDELLEIWKRDQASATAEVRADHVAQIVSKITGVPVTELTAEEKDKLLKLEEKLHERVIGQEEAIRAWADAVRLARAGLREVSVPTATFLFLGPTGVGKTELAKTLAEVIFGDQHALIRIDMSEYGERHSVPG

SEQ ID NO: 6998 - protein, 846 aa, Leptospira interrogans serovar lai str. 56601
MLEFTKRAKRVINEIAQDEAKRLGSDYIGPEHILLGLLKEEDSVAIKILNNLNINLNELRKEVERRTREASGALLMDVAGGQDRYQKIIELSKEEAKRLKHNYVGTEHILLALLRDNNNIAGGALYSFSVNYNVIKSEILRLLGAPPTSSVGVSSTTQSGPQPRQEKTKTPILDEFARDLTQLARDKKLDPVVGRATEIQRVIQILSRKTKNNPVLVGESGVGKTAIVEGLALAIVEKSVPDLLFEKRVLSLDLASLIAGTKYRGEFEERLKKIMKEITSSTNIIIFIDELHTLIGAGAAEGAVDAANILKPALARGELQCIGATTSAEYRKYIEKDSALERRFQVVKVAEPSVDDAIQILQGLKKAYETHHKVRYSDKALEQSVKLSHRYINDRYLPDKAIDIIDEAGAKARLANCARPQTIKDLEEEIKSLASKKEELVRAQEYEKAAGVRDEVNRKKQAMEEKLRSWQEKMEDFAVNIEEDDILSVISLWTGIPLEKMEESESDKLLRLEEELKKRVVGQAEAIEKIAKAVRRARTGFKSERRPTGSFIFLGPTGVGKTELAKALANFLFGNDDAMLRVDMSEYMEPHAVSRLIGAPPGYVGYDDGGQLTEFVRKRPYSIILLDEIEKAHHDIFNILLQIMEEGNLTDTKGRKVNFRDTIIIMTSNIGAKEIQAGGRLGFEDRKDEALKYKSDQTRDQLKKYFNPEFLNRVDEVIYFGSLTKENIMSIIDIMVIDTNKRLHEKTIQISITQAAKDHIMDIGYDEKFGARPLRRVFQRELEDHMAVQTLKGAYKEPTKIEIDFKEGKLEFLETPWTDYKPVDPKTGGNDNSSGNPERSEEIALV

SEQ ID NO: 6999 - protein, 235 aa, Streptomyces coelicolor
KAIDVIDEAGSRMRIRRMTAPPDLREFDEKIAGVRRDKESAIDSQDFEKAASLRDKEKQLLAAKAKREKEWKAGDMDVVAEVDGELIAEVLATATGIPVFKLTEEESSRLLRMEDELHKRVIGQKDAVKALSKAIRRTRAGLKDPKRPGGSFIFAGPSGVGKTELSKALAEFLFGDEDALISLDMSEFSEKHTVSRLFGSPPGYVGYEEGGQLTEKVRRKPFSVVLFDEIEKAHP

SEQ ID NO: 7000 - protein, 861 aa, Xanthomonas campestris pv. campestris str. ATCC 33913
MRMDKLTSRFQQALADAQSLAVGRDHNIIEPVHVLAALLDQSGGSTRPLLSQSGVNVPALRERLGEALDTLPKVSGQEGNLSIGNDLNRLLNQTDKLAQQHGDAFIASEWFVLAAADDASPLGVALRAAGGDKKKIEAAIDKLRGGETVQSENAEEQRQALEKYTIDLTARAESGKLDPVIGRDEEIRRTIQVLQRRTKNNPVLIGEPGVGKTAIVEGLAQRIINGEVPEGLRGKRVLSLDMGALIAGAKFRGEFEERLKAVLSDLSKNEGQIILFIDELHTMVGAGKADGAMDAGNMLKPALARGELHCIGATTLDEYRKYIEKDAALERRFQKVFVGEPTVEDTIAILRGLKERYAVHHGVEITDPAIVAAATLSNRYITDRQLPDKAIDLMDEAASRIRMEIDSKPEELDRLERRLIQLKIQREMLKKEKDEASRQRLADLESDIDKLEREFSDLNEVWKSEKAALQGTTKIKEQIEHAKLELEAAQRRQDYAKMSEIQYGVLPQLEKQMLLANEVEHHDFKLVQDRVTAEEIAEVVSRWTGIPVNKMLEGERDKLLRMEDELHRRVVGQEEAIKVVSDAVRRSRAGLSDPNRPSGSFLFLGPTGVGKTELCKALADFLFDSTEAMIRIDMSEFMEKHSVSRLIGAPPGYVGYEEGGYLTEAVRRRPYSLILLDEVEKAHADVFNILLQVLDDGRLTDGQGRTVDFRNTVIVMTSNLGSHQIQELSGDGSAEAYTQMKAAVMGVVQAHFRPEFINRLDDIVVFHPLDKAQIKSIARIQLQGLEKRLAERGLKLDLDDPALELLGNVGFDPVYGARPLKRAIQSQVENPLAQQILSGQYTSGDTVRVRTEGGHLAFTKG

SEQ ID NO: 7001 - protein, 871 aa, Xanthomonas axonopodis pv. citri str. 306
MPATCSEDLPMRMDKLTSRFQQALADAQSLAVGRDHNIIEPVHVLAALLDQSGGSTRPLLSQAGVNVPLLRERLGEALDTLPKVSGQEGNLSIGNDLNRLLNQTDKLAQQHGDAFIASEWFVLAAADDASPLGVALRAAGGDKKKIEAAIDKLRGGETVQSENAEEQRQALEKYTIDLTARAESGKLDPVIGRDEEIRRTIQVLQRRTKNNPVLIGEPGVGKTAIVEGLAQRIINGEVPEGLRGKRVLSLDMGALIAGAKFRGEFEERLKAVLSDLSKNEGQIILFIDELHTMVGAGKADGAMDAGNMLKPALARGELHCIGATTLDEYRKYIEKDAALERRFQKVFVGEPTVEDTIAILRGLKERYAVHHGVEITDPAIVAAATLSNRYITDRQLPDKAIDLMDEAASRIRMEIDSKPEELDRLERRLIQLKIQREMLKKEKDDASRQRLADLETDIDKLEREFYDLNELWKSEKAALQGTTKVKEQIEHAKLELEAAQRRQDYAKMSEIQYGVLPQLEKQMALANEVEHHDFKLVQDRVTAEEIAEVVSRWTGIPVNKMLEGERDKLLRMEDELHHRVVGQNEAIKVVSDAVRRSRAGLSDPNRPSGSFLFLGPTGVGKTELCKALADFLFDSTEAMIRIDMSEFMEKHSVARLIGAPPGYVGYEEGGYLTEAVRRRPYSLILLDEVEKAHPDVFNILLQVLDDGRLTDGQGRTVDFRNTVIVMTSNLGSHQIQELSGDDSAEAYTQMKAAVMGVVQAHFRPEFINRLDDIVVFHPLDKAQIKSIARIQLQGLEKRLAERGLKLDLDDAALEVLGSVGFDPVYGARPLKRAIQSQVENPLAQQILSGQYLSGDSVRVRADGGRLVFTKD

SEQ ID NO: 7002 - protein, 926 aa, Xanthomonas axonopodis pv. citri str. 306
MAEISRSSLFGKLNPLAYRGIESATVFCKLRGNPYVELVHWLHQLLQLQDSDLHRIIRHFQLNPSTLARDVTAALDGLPRGSTAVTDLSANVEEAVERGWVYASLGFGEAQVRTGYLVVGMLSVRGLRHALLAISKEFDKLKPAVLNERFAEIVAGSPEDGLLPSDGFSLGQAAAPGETSGAIAPAALGKQEALKKFTTDLTAQAREGKLDPIIGRDDEIRQVVDILMRRRQNNPILVGEAGVGKTAVVEGFAQRIARGDVPPALKDVQLRALDVGLLQAGASMKGEFEQRLRAVIDEVQASPKPIILFVDETHTLIGAGGAAGTGDAANLLKPALARGTLRTVGATTFAEYKKYIEKDPALTRRFQAVQVDEPDESKAVRMMRGVASMMEQHHRVQILDEALEAAVKLSHRYIPARQLPDKSVSLLDTACARVAVSLHATPAEVDDSRRRIESLDTEQAIIERERAIGIVVEERAAACAGLLESEHGRLQALEQRWVAEKALVDELLSLRAQLRSDNAPVEGTGSALEAEADTAQAASGDIAVLDAPVQVDRDTLLARLQLVQAGLGALQGESPLILPTVDHQAVAAVVADWTGIPVGRMARDEIDTVLRLPELLAKRVIGQDHAMEMIAKRIQTSRAGLDNPDKPIGVFLLAGTSGVGKTETALALAETLYGGEQNLITINMSEYQEAHTVSSLKGAPPGYVGYGEGGVLTEAVRRKPYSVVLLDEVEKAHPDVHELFFQVFDKGWMEDGEGRRIDFRNTLIILTSNAGTDLIASLCKDPDLMPDPEGMAKAIREPLLKVFPPALLGRLVAIPYYPLSNAMLGQIVRLQLNRIKTRIEERYKIPFDYDDSVVELVISRCTESESGGRMIDAILTNSVLPEISREFLERVNSGDPVLRIELGACDRSFVYDFLKNRHQETKNGNL

SEQ ID NO: 7003 - protein, 859 aa, Caulobacter crescentus CB15
MNIDLYSDRAKQAVQSAQSLALARGHQQFAPEHILKVLLEEKDGLSRALIQSAGGRPDQLDGGVETLLAKTPRVDGAGGQLYMKPDTARVFAEAEKSAKAAGDAFVTTERLLIAIAKEGGEAAKLFKEAGVSAQSLETAANAMRKGRTADSANAEEGYEALKRYARDLTAAARDGKLDPVIGRDEEIRRTIQVLSRRTKNNPVLIGEPGVGKTAIVEGLALRIVNGDVPESLKDKKLLSLDMGSLIAGAKYRGEFEERLKAVLGEVTAAEGSIILFIDEMHTLVGAGKGDGAMDASNLLKPALARGELHCVGATTLDEYRKHVEKDAALARRFQPVFVSEPTVEDTVSILRGLKEKYEVHHGVRISDSAIVAAATLSNRYIADRFLPDKAIDLVDEASSRVRMQIDSKPEELDEIDRRLVQLKIEREALSKETDAASKQRLENLEVEIDDLQFRSDEMTARWKAEKEKVGGAAQAREALDRLRADLANAQRAGDFARAGQIQYGEIPALERRLAEAEAGDTQALTPEVVDAEQIAAVVSRWTGVPVEKMLEGEREKLLKMEDELRGRVVGQDEALEAVSDAVRRARAGLQDPSKPIGSFLFLGPTGVGKTELTKSLAEFLFADEAAITRMDMSEYMEKHSVSRLIGAPPGYVGYDEGGALTEAIRRRPYQVVLFDEIEKAHPDVFNVLLQVLDDGRLTDGQGRTVDFRNTLIIMTSNLGAEYLASQEDGEDVEAVRPMVMNTVRGHFRPEFLNRIDEIILFKRLSRHNMGDIVRIQLQRVEKLLADRRMALALDAEALNWLADKGYDPVYGARPLKRVIQKELVDPIAKKLLAGEIEDGGVIAVGVTDGQLSFGKAVLQ

SEQ ID NO: 7004 - protein, 811 aa, Bacillus anthracis str. A2012
MMFGRFTERAQKVLALSQEEAIRIGHNNIGTEHILLGLVREGEGIAAKALIALGLSPEKVQKEVEALIGRGTEASQTVHYTPRAKKVIELSMDEARKLGHSYVGTEHILLGLIREGEGVAARVLNNLGVSLNKARQQVLQLLGSNEASSGHQGGSSTNANTPTLDSLARDLTVVARENRLDPVIGRGKEIQRVIEVLSRRTKNNPVLIGEPGVGKTAIAEGLAQQIVNNEVPETLRDKRVMTLDMGTVVAGTKYRGEFEDRLKKVMDEIRQAGNIILFIDELHTLIGAGGAEGAIDASNILKPSLARGELQCIGATTLDEYRKYIEKDAALERRFQPIHVDEPSLDESTQILKGLRDRYEAHHRVSITDDAIDAAVKLSDRYITDRFLPDKAIDLIDEAASKVRLRSYTTPPNLKELEVKLEEIRKEKDAAVQSQEFEKAASLRDMEQRLREKLEDTKRQWKEQQGKENSEVTVEDIANVVSTWTRIPVSKLAQTETDKLLNLESILHDRVIGQDEAVVAVAKAVRRARAGLKDPKRPIGSFIFLGPTGVGKTELARALAESMFGDEDAMIRIDMSEYMEKHSTSRLVGSPPGYVGYEEGGQLTEKVRRKPYSVVLLDEVEKAHPDVFNILLQVLEDGRLTDSKGRTVDFRNTIVIMTSNVGAEALKRNKHLGFNVQDESRDYSDMKGKVMDELKKAFRPEFLNRIDEIIVFHMLEKKHIQEIVTLMVNQLVNRLKEQEIELHLTEGAISAIADKGFDREYGARPLRRAIQKHVEDRLSEELLKGAIEKGQKVIFDVEGESFVIHSAEKVK

SEQ ID NO: 7005 - protein, 438 aa, Chlorobium tepidum TLS
MNTADTRQRLLDIEKQIASLREEQATVKAQWEAEKELIHTSRRLKEELEDLRVQAENYERSGDYGKVAEIRYGKIAEIEKALEENNRKIEARQASGDLIMKEEIDAGDIADIVSRWTGIPVSKMLQSERQKLLGIESELHRRVVGQDEAVRAVSDAVKRSRAGMGDEKRPIGSFIFLGPTGVGKTELARTLAEYLFDDEDALIRIDMSEYMEAHTVSRLVGAPPGYVGYEEGGQLTEAVRRKPFSVVLLDEIEKAHPDVFNILLQILDDGRLTDSKGRTVNFKNTIIIMTSNIGAQLIQSEMEHLEGRDADAALAGLKEKLFQLLKQQVRPEFLNRIDEVILFTPLTRENLREIVTIQFNRIKETARRQRITLEISDEALMWLAKTGFDPAFGARPLKRVMQRQITNRLSEMILAGQVGEDDTVEIGLENDAIVMKKK

SEQ ID NO: 7006 - protein, 866 aa, Clostridium perfringens str. 13
MNADKMTLRVQQSLNDAYEIAVKYNNQQLDIIHLFSALVNQKDGLIPNIFEKMGVNIDSLKRDIHVQIDRMPKVLGEAAQSSGVTATRRINEVLIKAEEISKQFEDSYISVEHVMLAMIDIDKNGAVGEILRKNNITKDGFLKVLNEVRGSQRVDSQDPEGTYEALDKYGTNLIELVKQHKLDPVIGRDEEIRRAVRILSRKTKNNPILIGEPGVGKTAIVEGLAERIVRGDVPEGLKDKVIISLDMGALIAGAKYRGEFEERLKAVLKEVQSSEGKILLFIDEIHTIVGAGKTDGAMDAGNLIKPMLARGELHCIGATTFDEYRQYIEKDKALERRFQPVIVEEPTVEETVSILRGLKERFEIHHGIRIHDSAIVAAAKLSHRYIQDRYLPDKAIDLIDEAGAMIRSEIDSLPTELDIIRRKILMLETEKEALSKENDDASKERLVALEKELAELQDKNDEMTIKYEKEKSHISAVRDLKAELDEARGLAEKYEREYDLNKVAELKYGKIPELERKIKEQEASMEKDNENALLKEEVTENEISEIISKWTGIPVTKLVESEREKLLRLEEELRERVIGQDEATTAVANAVIRARAGLKDERKPIGSFIFLGPTGVGKTELAKTLARNLFDSEDNIVRIDMSEYMEKHAVSRLIGPPPGYVGYEEGGQLTEAVRRNPYSVILFDEIEKAHDDVFNLFLQILDDGRLTDNKGKTVDFKNTIIIMTSNIGSGYLLENKSGEGIEDDIRENVMNEMKLRFKPEFLNRVDDIIMFRPLSSEGIKKIIDIFLRDVENRLRERNITLEVTDRAKEILAEEGYDPVYGARPLKRYISNVLETEIAKKIIAGEIYDGSVALIDGVDGKIIVSRK

SEQ ID NO: 7007 - protein, 814 aa, Clostridium perfringens str. 13
MRLDNFNENSKIVINKGKESSLMLKHGYMGTEHLLIGLINENGQCSKILEESNVTEEKVLSFIKLYVGIGEVNYSLDEVPFTPRCKKILDRSVEIAKEYGHSISRPEHILLALIKEREGVANLILTKIVKNDIKNISDKLNNILGRIPSKESKSLKEKEKPKRKDTPTLNLYGINLIERADKNKLDPVIGRKDETQRLLEILCRRMKNNPCLIGEPGVGKTAVVEGLAQRILLGEVPDIIKDKRIFTLDVTSMLAGAKYRGEFEERLKKVLNEVKDSDDIILFIDEMHNIVGAGGAEGAIDASNILKPALARGEIQCIGATTTDEYRKNIEKDSALERRFQPVVVKEPSKEDSVLILKGLREKYEVHHNVKLTDEAIEAAVNLSSRYITDRFLPDKAIDLIDEAAAKVRIESMIVPPRLFKQEELIANLKVEKEEAIKLQDFELAAKLRDEELMLQEELERDKELWREENYNKIYEVNKEHIAKVVSKWTQIPVERLTEKESSRLLKLEEKLSKRVIGQLEAIRTISKAVRRSRVGLKDPKRPIGSFAFLGPTGVGKTELCKALAEAMFGDENKFIRLDMSEYMEKHGVSRLIGAPPGYVGYEEGGQLTEKVRRNPYSVILFDEIEKAHPDIFNVLLQILEDGVLTDGKGKTVDFKNTIIIMTSNIGADKLDKKNAVGFSAKEDKERDYDKMKGIMLEELKQNFKPEFVNRLDDIVVFHSLEKDHLLKIVDLMICSLKERLNDLQLSLNFSQECKEFLVKKGTELKYGARPLRRVITKYIEDRLSEELLSGNILRGSKVDVFLEDDVVKFKKTV

SEQ ID NO: 7008 - protein, 852 aa, Corynebacterium efficiens YS-314
MSSFNPTTKTSEAMQAALQQASANGNPDIRPAHLLVAILDQADGVAAPVLTAAGVDPKTILAEAQKLVDGYPKASGSNLANPNFNRDALNALTASQELAGELGDEYVSTEVLLAGIARGKSDAADLLKGKGATYDAIKAAFQSVRGSQKVTSQDPEGQFQALEKYSTDLTKLAREGKIDPVIGRDQEIRRVVQVLSRRTKNNPVLIGEPGVGKTAIVEGLARRIVAGDVPESLKGKTLISLDLGSMVAGAKYRGEFEERLKAVLDEIKGANGEIVTFIDELHTIVGAGASGESAMDAGNMIKPLLARGELRLVGATTLNEYRKYIEKDTALERRFQQVYVGEPSVEDTVGILRGLKERYEVHHGVRIQDSALVAAAELSHRYITSRFLPDKAIDLVDEAASRLRMEIDSSPQEIDELERIVRRLEIEEVALTKETDVASRERLERLRSELADEREKLSELKARWQNEKAVIDDVRKFKEELEALRSESDIAEREGDYGRVAELRYGRIPELEKKIAEAEEKIGGADNSMLTEEVTPEVIAEVVSAWTGIPAGKMMQGETEKLLNMERFLGKRVVGQHEAVTAVSDAVRRSRAGVADPNRPTGSFLFLGPTGVGKTELAKAVSEFLFDDERAMVRIDMSEYSEKHSVARLVGAPPGYVGYDQGGQLTEAVRRRPYTTVLFDEVEKAHPDVFDILLQVLDDGRLTDGQGRTVDFRNTILILTSNLGAGGTREQMMDAVKMAFKPEFINRLDDIVVFDPLSQEQLASIVEIQISQLAERLSDRRLTLRVSDAAKLWLAERGYDPAYGARPLRRLIQQAIGDQLAKELLAGEIRDGDRVLVDVADGGQYLAVSREH

SEQ ID NO: 7009 - protein, 927 aa, Corynebacterium efficiens YS-314
MFERFTDRARRVIVLAQEEARMLNHNYIGTEHILLGLIHEGEGVAAKALESMGISLDAVRQEVEEIIGHGSKPTTGHIPFTPRAKKVLELSLREGLQMGHKYIGTEFLLLGLIREGEGVAAQVLVKLGADLPRVRQQVIQLLSGYEGGQGGSPDSPQGGQGGDAVGAGSAPGGRATGSGAGERSNSLVLDQFGRNLTQAAKDGKLDPVVGRDKEIERIMQVLSRRTKNNPVLIGEPGVGKTAVVEGLALDIVNGKVPETLKDKQVYSLDLGSLVAGSRYRGDFEERLKKVLKEINQRGDIILFIDEIHTLVGAGAAEGAIDAASLLKPKLARGELQTIGATTLDEYRKHIEKDAALERRFQPVQVPEPSVELSIEILKGLRDRYEAHHRVSITDGALVAAAQLSDRYINDRFLPDKAVDLIDEAGARMRIKRMTAPESLREVDERIADVRREKEAAIDAQDFEKAAGLRDKERKLGEERAEKEKQWRSGDLEEIAEVGEEQIAEVLATWTGIPVFKLTEAESSRLLNMEEELHKRIIGQDEAVKAVSRAIRRTRAGLKDPKRPSGSFIFAGPSGVGKTELSKALAEFLFGDDDSLIQIDMGEFHDRFTASRLFGAPPGYVGYEEGGQLTEKVRRKPFSVVLFDEIEKAHKEIYNTLLQVLEDGRLTDGQGRIVDFKNTVLIFTSNLGTQDISKAVGLGFSGSNETDSDAQYDRMKNKVHDELKKHFRPEFLNRIDEIVVFHQLTREQIIQMVELLIGRVSRALADKDMGIELTDKAKALLASRGFDPVLGARPLRRTIQREIEDAMSEKILFGEIGAGEIVTVDVDGWDGESKNTDGATFTFTPRPKPLPDGKFSEISVEAAEAIQDVDSAADGDVPETGSLDGIDPETLRELDEDASSNPTESERVTGDYYGTDDQPGGAAPQREQ

SEQ ID NO: 7010 - protein, 818 aa, Staphylococcus aureus subsp. aureus MW2
MLFGRLTERAQRVLAHAQEEAIRLNHSNIGTEHLLLGLMKEPEGIAAKVLESFNITEDKVIEEVEKLIGHGQDHVGTLHYTPRAKKVIELSMDEARKLHHNFVGTEHILLGLIRENEGVAARVFANLDLNITKARAQVVKALGNPEMSNKNAQASKSNNTPTLDSLARDLTVIAKDGTLDPVIGRDKEITRVIEVLSRRTKNNPVLIGEPGVGKTAIAEGLAQAIVNNEVPETLKDKRVMSLDMGTVVAGTKYRGEFEERLKKVMEEIQQAGNVILFIDELHTLVGAGGAEGAIDASNILKPALARGELQCIGATTLDEYRKNIEKDAALERRFQPVQVDEPSVVDTVAILKGLRDRYEAHHRINISDEAIEAAVKLSNRYVSDRFLPDKAIDLIDEASSKVRLKSHTTPNNLKEIEQEIEKVKNEKDAAVHAQEFENAANLRDKQTKLEKQYEEAKNEWKNAQNGMSTSLSEEDIAEVIAGWTGIPLTKINETESEKLLSLEDTLHERVIGQKDAVNSISKAVRRARAGLKDPKRPIGSFIFLGPTGVGKTELARALAESMFGDDDAMIRVDMSEFMEKHAVSRLVGAPLGYVGHDDGGQLTEKVRRKPYSVILFDEIEKAHPDVFNILLQVLDDGHLTDTKGRTVDFRNTIIIMTSNVGAQELQDQRFAGFGGSSDGQDYETIRKTMLKELKNSFRPEFLNRVDDIIVFHKLTKEELKEIVTMMVNKLTNRLSEQNINIIVTDKAKDKIAEEGYDPEYGARPLIRAIQKTIEDNLSELILDGNQIEGKKVTVDHDGKEFKYDIAEQTSETKTPSQA

SEQ ID NO: 7011 - protein, 701 aa, Staphylococcus aureus subsp. aureus MW2
MNNGFFNSDFDSIFRRMMQDMQGSNQVGNKKYYINGKEVSPEELAQLTQQGGNHSAEQSAQAFQQAAQRQQGQQGGNGNYLEQIGRNLTQEARDGLLDPVIGRDKEIQETAEVLSRRTKNNPILVGEAGVGKTAIVEGLAQAIVEGNVPAAIKDKEIISVDISSLEAGTQYRGAFEENIQKLIEGVKSSQNAVLFFDEIHQIIGSGATGSDSGSKGLSDILKPALSRGEISIIGATTQDEYRNNILKDAALTRRFNEVLVNEPSAKDTVEILKGIREKFEEHHQVKLPDDVLKACVDLSIQYIPQRLLPDKAIDVLDITAAHLSAQSPAVDKVETEKRISELENDKRKAVSAEEYKKADDIQNEIKSLQDKLENSNGEHTAVATVHDISDTIQRLTGIPVSQMDDNDIERLKNISNRLRSKIIGQDQAVEMVSRAIRRNRAGFDDGNRPIGSFLFVGPTGVGKTELAKQLAIDLFGNKDALIRLDMSEYSDTTAVSKMIGTTAGYVGYDDNSNTLTEKVRRNPYSVILFDEIEKANPQILTLLLQVMDDGNLTDGQGNVINFKNTIIICTSNAGFGNGNDAEEKDIMHEMKKFFRPEFLNRFNGIVEFLHLDKDALQDIVNLLLDDVQVTLDKKGITMDVSQDAKDWLIEEGYDEELGARPLRRIVEQQVRDKITDYYLDHTDVKHVDIDVEDNELVVKGK

SEQ ID NO: 7012 - protein, 925 aa, Corynebacterium glutamicum ATCC 13032
MFERFTDRARRVIVLAQEEARMLNHNYIGTEHILLGLIHEGEGVAAKALESMGISLDAVRQEVEEIIGQGSQPTTGHIPFTPRAKKVLELSLREGLQMGHKYIGTEFLLLGLIREGEGVAAQVLVKLGADLPRVRQQVIQLLSGYEGGQGGSPEGGQGAPTGGDAVGAGAAPGGRPSSGSPGERSTSLVLDQFGRNLTQAAKDGKLDPVVGRDKEIERIMQVLSRRTKNNPVLIGEPGVGKTAVVEGLALDIVNGKVPETLKDKQVYSLDLGSLVAGSRYRGDFEERLKKVLKEINQRGDIILFIDEIHTLVGAGAAEGAIDAASLLKPKLARGELQTIGATTLDEYRKHIEKDAALERRFQPVQVPEPSVDLTVEILKGLRDRYEAHHRVSITDGALTAAAQLADRYINDRFLPDKAVDLIDEAGARMRIKRMTAPSSLREVDERIADVRREKEAAIDAQDFEKAAGLRDKERKLGEERSEKEKQWRSGDLEDIAEVGEEQIAEVLANWTGIPVFKLTEAESSRLLNMEEELHKRIIGQDEAVKAVSRAIRRTRAGLKDPKRPSGSFIFAGPSGVGKTELSKALAGFLFGDDDSLIQIDMGEFHDRFTASRLFGAPPGYVGYEEGGQLTEKVRRKPFSVVLFDEIEKAHKEIYNTLLQVLEDGRLTDGQGRIVDFKNTVLIFTSNLGTADISKAVGLGFSGSSETDSDAQYDRMKNKVHDELKKHFRPEFLNRIDEIVVFHQLTKDQIVQMVDLLIGRVSNALAEKDMSIELTEKAKDLLANRGFDPVLGARPLRRTIQREIEDQMSEKILFGEIGAGEIVTVDVEGWDGESKDTDRAKFTFTPRPKPMPEGKFSEISVEAAEAIQDVDSAADGDVPETDSLSDIDLETLEKFEEDVENGTDIDQVSGDYYGTDDQGGTAPSKE

SEQ ID NO: 7013 - protein, 871 aa, Thermosynechococcus elongatus BP-1
MQPSNPNQFTEKAWAAIARTPDLAKQAQHQNLESEHLMKSLLEQEGLATQIFQKAGCSVQRIRDLTDEFISRQPKISHPSGVYLGQSLDKLLDRAEEARKQFGDEFISIEHLVLAFAQDDRFGKKLFQDIGLSEKVLREAIQQIRGSQKVTDQNPEGKYAALEKYGRDLTLLARQGKLDPVIGRDDEIRRVIQILSRRTKNNPVLIGEPGVGKTAIAEGLAQRIVARDVPDSLRDRQLIALDMGALIAGAKYRGEFEERLKAVLKEVTDSNGQIILFIDEIHTVVGAGATQGAMDAGNLLKPMLARGELRCIGATTLDEYRKYIEKDAALERRFQQVYVDQPSVEDTISILRGLKERYEIHHGVKISDTALVAAATLSARYISDRFLPDKAIDLVDEAAAKLKMEITSKPEELDEIDRKILQLEMERLSLQKETSAASRDRLEKLERELADLKEEQSRLNAQWQAEKEVIDRLQSIKEEIEKVNIEIQQAERNYDLNRAAELKYGKLTELHKKLAEAEAKLREIQVGGRSLLRDEVTEADIAEIISKWTGIPVSKLVESEAQKLLHLEEELHKRVVGQDEAVSAVAEAIQRSRAGLADPNRPIASFIFLGPTGVGKTELAKALAAFMFDTEEALVRIDMSEYMEKHAVSRLIGAPPGYVGYDEGGQLTEAIRRRPYAVVLFDEIEKAHPDVFNVFLQILDDGRVTDSQGRTVDFKNTIIIMTSNIGSQYILDVAGDDSRYSEMYNRVMEAMRAHFRPEFLNRVDEFIIFHSLRKDQLRQIVQLQVQRLQQRLSDRHITLSLTEKAIDFLAEVGYDPVYGARPLKRAIQKQLETPIAKAILRGDFFDGDTILVDVGEDERLSFRRQVELATV

SEQ ID NO: 7014 - protein, 887 aa, Thermosynechococcus elongatus BP-1
MQPTDPTKFTDKAWEAIVKSQDVAREYRSQYLETEHVMIALLREEGLGQVILERSDIDTEWVLKRLMDFARQQPRVPAGSELYCGRSLDALLDEANRLRQEEEDQFISIEHLLLAFVGDRRIGQRLFRALNCDRQQLAATVKAIRGAQKVLDQNPENKYAALEKYGRDLTEAARQGKLDPVIGRDEEIRRVIQVLSRRTKNNPVLIGEPGVGKTAIAEGLAQRIINGDVPESLKNRRLISLDLGSLVAGAKFRGDFEDRLKAVLHEVTHSEGQIVLFIDELHTVVGAGANQNSSMDASNLLKPMLARGELRCIGATTLDEYRKYIEKDAALERRFQQVYIGQPSVEDTISILRGLKDRYEIHHNVKITDSALVAAAMLSDRYISDRYLPDKAIDLVDEAAAKLKMEITTKPAELEALERRLRQLEMERLSLKQEESLPLSQAPLQATRDRLQRIEAEIAQLQPRQQAMQARWQAEKELLERINSLKEEEDQVKLQIEQAERDYNLNKAAQLKYGRLETLQRELEATEAQLLELQAAGGTFLRDQVTEADIAEIVAKWTGIPLQKLMASERQKLLQLEQVLHQRVIGQSDAVAAVAAAIRRARAGMKDPARPIGSFLFMGPTGVGKTELARALAEALFDDENALVRIDMSEYMEKHAVSRMIGAPPGYVGFDSGGQLTEAIRRRPYAVVLFDEVEKAHPEVFNVLLQVLDDGRITDSQGRTVDFRNTVIIMTSNLGSEHILDLAADDSRYEEMRQRVLQSAQKYFRPEFLNRIDDVILFHGLGRTELAQIAQIQLRRVEKLLADQKIHLRLTPAALDHLVAVGFDPVYGARPLKRAIQRELENPLAVKLLEEVFTPGDTILVDLVGSELTFRAVSPAGTGDRDTVSAS

SEQ ID NO: 7015 - protein, 824 aa, Thermosynechococcus elongatus BP-1
MFERFTEKAIKVIMLAQEEARRLGHNFVGTEQILLGLIGEGTGVAAKVLRSMGVNLKDARIEVEKIIGRGSGFVAVEIPFTPRAKRVLELSLEEARQLGHNYIGTEHLLLGLIREGEGVAARVLENLGVDLSKVRTQVIRMLGETAEVTAGASQGRTKTPTLDEFGVNLTQLAIEGKLDPVVGRQKEIERVIQILGRRTKNNPVLIGEPGVGKTAIAEGLAQRIANKDVPDILEDKRVVTLDIGLLVAGTKYRGEFEERLKKIMDEIRQAGNVILVIDEVHTLIGAGAAEGAIDAANILKPALARGELQCIGATTLDEYRKHIERDAALERRFQPVMVGEPSVEETIEILYGLRERYEKHHKLKISDEALEAAAKLSDRYISDRYLPDKAIDLIDEAGSRVRLINSQLPPAAKELDRELRQVLKEKDDAVRAQNFDKAGELRDREMELKAQIRAIAQQKKAEIANGEEETPVVTEEDIAHIVASWTGVPVSKLTESESEKLLHMEETLHQRVIGQDEAVKAISRAIRRARVGLKNPNRPIASFIFSGPTGVGKTELTKALAAYFFGSEEAMIRLDMSEYMERHTVSKLIGSPPGYVGYNEGGQLTEAVRRRPYTVVLFDEIEKAHPDVFNLLLQILEDGRLTDSKGRTVDFKNTLLIMTSNIGSKVIEKGAAGLGFEFGTEDAAESQYNRIRSLVNEELKQYFRPEFLNRLDEIIVFRQLTKDEVKQIADILLKEVFSRLTEKGITLEVTERFKERLIDEGYNPSYGARPLRRAIMRLLEDTLAEEMLSGRIREGDTALIDVDESGQVKIQAQPRRELLPQAVE

SEQ ID NO: 7016 - protein, 861 aa, Shigella flexneri 2a str. 301
MGGVMRLDRLTNKFQLALADAQSLALGHDNQFIEPLHLMSALLNQEGGSVSPLLTSAGINAGQLRTDINQALNRLPQVEGTGGDVQPSQDLVRVLNLCDKLAQKRGDNFISSELFVLAALESRGTLADILKATGATTANITQAIEQMRGGESVNDQGAEDQRQALKKYTIDLTERAEQGKLDPVIGRDEEIRRTIQVLQRRTKNNPVLIGEPGVGKTAIVEGLAQRIINGEVPEGLKGRRVLALDMGALVAGAKYRGEFEERLKGVLNDLAKQEGNVILFIDELHTMVGAGKADGAMDAGNMLKPALARGELHCVGATTLDEYRQYIEKDAALERRFQKVFVAEPSVQDTIAILRGVKERFELLHHVQITDPAIVAAATLSHRYIADRQLPDKAIDLIDEAASSIRMQIDSKPEELDRLDRRIIQLKLEQQALMKESDEASKKRLDMLNEELSDKERQYSELEEEWKAEKASLSGTQTIKAELEQAKIAIEQARRVGDLARMSELQYGKIPELEKQLEAATQLEGKTMRLLRNKVTDAEIAEVLARWTGIPVSRMMESEREKLLRMEQELHHRVIGQNEAVDAVSNAIRRSRAGLADPNRPIGSFLFLGPTGVGKTELCKALANFMFDSDEAMVRIDMSEFMEKHSVSRLVGAPPGYVGYEEGGYLTEAVRRRPYSVILLDEVEKAHPDVFNILLQVLDDGRLTDGQGRTVDFRNTVVIMTSNLGSDLIQERFGELDYAHMKELVLGVVSHNFRPEFINRIDEVVVFHPLGEQHIASIAQIQLKRLYKRLEERGYEIHISDEALKLLSENGYDPVYGARPLKRAIQQQIENPLAQQILSGELVPGKVIRLEVNEDRIVAVQ

SEQ ID NO: 7017 - protein, 857 aa, Shigella flexneri 2a str. 2457T
MRLDRLTNKFQLALADAQSLALGHDNQFIEPLHLMSALLNQEGGSVSPLLTSAGINAGQLRTDINQALNRLPQVEGTGGDVQPSQDLVRVLNLCDKLAQKRGDNFISSELFVLAALESRGTLADILKATGATTANITQAIEQMRGGESVNDQGAEDQRQALKKYTIDLTERAEQGKLDPVIGRDEEIRRTIQVLQRRTKNNPVLIGEPGVGKTAIVEGLAQRIINGEVPEGLKGRRVLALDMGALVAGAKYRGEFEERLKGVLNDLAKQEGNVILFIDELHTMVGAGKADGAMDAGNMLKPALARGELHCVGATTLDEYRQYIEKDAALERRFQKVFVAEPSVEDTIAILRGLKERYELHHHVQITDPAIVAAATLSHRYIADRQLPDKAIDLIDEAASSIRMQIDSKPEELDRLDRRIIQLKLEQQALMKESDEASKKRLDMLNEELSDKERQYSELEEEWKAEKASLSGTQTIKAELEQAKIAIEQARRVGDLARMSELQYGKIPELEKQLEAATQLEGKTMRLLRNKVTDAEIAEVLARWTGIPVSRMMESEREKLLRMEQELHHRVIGQNEAVDAVSNAIRRSRAGLADPNRPIGSFLFLGPTGVGKTELCKALANFMFDSDEAMVRIDMSEFMEKHSVSRLVGAPPGYVGYEEGGYLTEAVRRRPYSVILLDEVEKAHPDVFNILLQVLDDGRLTDGQGRTVDFRNTVVIMTSNLGSDLIQERFGELDYAHMKELVLGVVSHNFRPEFINRIDEVVVFHPLGEQHIASIAQIQLKRLYKRLEERGYEIHISDEALKLLSENGYDPVYGARPLKRAIQQQIENPLAQQILSGELVPGKVIRLEVNEDRIVAVQ

SEQ ID NO: 7018 - protein, 830 aa, Thermobifida fusca
MFERFTDRARRVVVLAQEEARMLNHNYIGTEHILLGLIHEGEGVAAKALESLGISLEAVRQQVEEIIGQGQQAPSGHIPFTPRAKKVLELSLREALQLGHNYIGTEHILLGLIREGEGVAAQVLVKLGADLNRVRQQVIQLLHGYQGKEPQAAGTAAESAPSTSLVLDQFGRNLTQAAREGKLDPVIGRDKEIERVMQVLSRRTKNNPVLVGDPGVGKTAVVEGLAQKIVKGEIPETLKDKQLYTLDLGALVAGSRYRGDFEERLRKVLKEIRSRGDIILFIDELHTLVGAGAAEGAIDAASILKPMLARGELQTIGATTLDEYRKYLEKDAALERRFQPIQVEEPTISHTIEILKGLRDRYEAHHRVSITDGALVAAAQLADRYISDRYLPDKAIDLIDEAGSRMRIRRMTAPPDLREFDEKIAKVRRDKEAAIDAQDFERAAALRDEEKRLQAQRAQKEKEWKAGDMDTVAEVNEELIAEVLATATGIPVFRLTEEESSRLLRMEEELHKRVIGQDDAIKALSQAIRRTRAGLKDPKRPGGSFIFAGPSGVGKTELCKALAEFLFGDEDALIQLDMSEFMEKHTVSRLFGSPPGYVGYEEGGQLTEKVRRKPFSVVLFDEIEKAHGDIFNSLLQVLEEGRLTDAQGRNVDFKNTIIVMTTNLGTRDISKGQPMGFARPDDTQTTYDRMKAKVNEELKQHFRPEFLNRVDDTIVFHQLTQKEITAIVDLMVARLDERLKDRDMGIEVRPHAKKILAERGYDPVLGARPLRRTIQREIEDALSEKILYGELKSGQIVIVDAEGEGADAKFTFRGVPKPQALPETAEVGAQ

SEQ ID NO: 7019 - protein, 818 aa, Clostridium thermocellum ATCC 27405
MYGRFTEKAQKAINISQNMAIELGHNYVGTEHLLLGLVKEGSGVAARVLQSQGVTEEKVIREIEELIGRGEMMGQPLDFTPRTKRVLELSYREARRMGHNYIGTEHLLLGIMKEGESVAVRILKDLGVEHQKLVQEIMNMLSEEAPNSTGVPKGHSSYSNTPTLNQFGRDLTEMAREAKFDPVIGRDKEIERVIQILSRRTKNNPCLIGEPGVGKTAIAEGLAQKIVEGNIPEILKDKRVVTLDLSSMVAGAKYRGEFEERLKKALDEIRRAGNVILFIDEMHTIIGAGAAEGAIDASNILKPSLARGEIQVIGATTIDEYRKHIEKDAALERRFQPILVGEPTKEEAIEILRGLRDKYEAHHSVKITDEALVAAVNMSDRYITDRFLPDKAIDLIDEAASRVRLKSFTAPPDLKHLEEKVERLRKEKEDAIVCQEFEKAARIRDEEQRLKNELEKAKDSWRQKNQTTTNVVSEDDIAVIVSDWTGIPVKRLAEEESERLMKMEDILHKRVIGQDEAVKAISKAIRRGRVGLKDPKRPVGSFIFLGPTGVGKTELSKALAEALFGEENAMIRIDMSEYMEKHSVSRLVGSPPGYVGYEEGGQLTEKVRRKPYSVVLFDEIEKAHPDIFNILLQILEDGRLTDSQGRVVDFRNTVIIMTSNIGARLITEPKQLGFAPVAQDKKKSYEDMKNNVMNELKKNFRPEFLNRIDEIIVFHPLEEEHLKQIVGLMIDNLAERLKQNSIEIEVSDEAKALLAKKGFDPVYGARPLRRAVQSMVEDRLAEEMLEGRVKSGDKVFVDVKDDELVFVKDKSELVSNKG

SEQ ID NO: 7020 - protein, 803 aa, Clostridium thermocellum ATCC 27405
MMMCSICKENLAVVFITKIINGKQTQEGLCFSCAKKQGIQPINQILEQTGISEEEIDGLNKQMETFFEDMDFSGTSDPEGGTATANPFFNLINKSLNKTMESMGFKSSKDETESDGKTDREVKDDKNNTRTKTQDKKMPKKKKYLDTYGTNLIVKAKEGKIDRVIGRNREIERVIQILNRRNKNNPVLIGEPGVGKTAIAEGLALRIVNRDVPVKLFNAEVYVLDLTSIVAGTQFRGQFENRMKGIIEECKALGNIILVIDEIHNIMGAGEAEGAMNAANILKPALAKGEIQVIGATTLDEYRKHIEKDSALERRFQPVLVDEPSVEETIEILRGIKDYYESYHRVKISDEVIRAAVILSERYITDRFLPDKAIDVLDEAGSRANIKNVVLLEYEALKEELKKVQEEKENAVSADSIEDYQKAADLKVRECKLLQQIKELEQKSKDMELTVDDIAYVIESWTKIPVQRLTEIEAEKLLNLEERLHKRVIGQHEAVKSVARAIRRNRADFKKRKKPASFIFVGPTGVGKTELVKALAVELFGSEEALIRLDMSEYMEKHTVSKLIGAPPGYVGYDEGGQLTEKVRRKPYSVILLDEIEKAHPDVFNMLLQILDDGRATDSHGRTVSFENTVLIMTSNAGTSLKASSIGFANDNYIALENKVKEVLKETFRPEFLNRVDEIIVFNHLTKDELKQIVDLMFKDVVEEVENKKMTVKFQDGVREFILEKGYDPKYGARPLRRTIQRYIEDELAEMYLKGLLAEGCSIVVGVRDGNIVFNVEKPAENAVVDTENSTTDNMKTDNTTAE

SEQ ID NO: 7021 - protein, 235 aa, Microbulbifer degradans 2-40
LDQFTTNLTQQAKDGKIDSILGRDDEIRQIIDVLCRRKQNNPILTGEAGVGKTAVVEGLAVKIAQGDVPTAIENVEIRSLDLGLLQAGAGVKGEFENRLKNVIKEVQQSVQSIILFIDEAHTLIGAGNQAGSGDAANLLKPALARGELRTIAATTWAEYKKYFESDAALTRRFQVVKVEEPSVDKAIIMLRNAAPTLEQHHKVVILDAAVSASVNLSHRYIPGRQLPDKCVSLLD

SEQ ID NO: 7022 - protein, 137 aa, Microbulbifer degradans 2-40
QVLEDGRLTDGQGRTVDFRNTVVVMTSNLGSSAIQDIAQNKSFDTISFDNESGAEEQNQYRYQAMKDAVMEVVTGHFRPEFINRIDEAVVFHPLAQQQIAGIADIQLETLRKRLAERDLRLNVTPEVMAKLAEAGFD

SEQ ID NO: 7023 - protein, 870 aa, Trichodesmium erythraeum IMS101
MQPNNPNQFTEKAWEAISRTPDIAKTSQNQQIEAEHLMKALLEQNGLVASLFSKVGVSTTKIQEYTDSFIKRQPKVKNIPNNIYLGRSLDALLDNAEKYRQEYKDEYISIEHLILAYLKDDHFGKNLYKEFKLDEVKLKKTISQVRGKQKVTDKNPEGKYEALEKYGRDLTEFAREGKLDPVIGRDDEIRRTIQILSRRTKNNPVLIGEPGVGKTAIAEGLAQRIITLDVPQSLKDRKLIALDMGALIAGAKFRGEFEERLKAVLKEVTDSEGKIILFIDEIHTVVGAGATQGAMDAGNLLKPMLARGELRCIGATTLDEYRKYIEKDAALERRFQQVYVDQPSVEDAISILRGLKERYEVHHGVKISDSSLVAAATLSTRYISDRFLPDKAIDLVDEAAAKLKMEITSKPEELDEIDRKILQLEMEKLSLQKESDTASKERLGRLEKDLANLKEGQRALNAQWESEKGIISTIQTVKEEIDKVNIEIQQAERNYDLNRAAELKYGRLINLQKQVEEAEAKLATTQTSGQTLLREEVTEADIAEIISKWTGIPISKLVESEKEKLLHLEGELHKRVIGQNEAVSAVSDAIQRSRAGLADPNRPVASFIFLGPTGVGKTELGKALAAYLFDTEDAMVRIDMSEYMEKHSVSRLIGAPPGYVGYDEGGQLTEAIRRRPYTVILFDEIEKAHPDVFNIMLQILDDGRVTDSQGHKVDFKNSVIIMTSNIGSQYILDVTDDYEQMQGRVMEALRAAFRPEFLNRIDETIIFHGLQKEQLREIVQLQVVRLEKRLAERKMSLKLTDAAINFLADVGYDPVYGARPLKRAIQRELETQIAKSILRSEFNDGDTIFVDIENERLSLKRLPMELVTAK

SEQ ID NO: 7024 - protein, 905 aa, Trichodesmium erythraeum IMS101
MQPTDPSKFTEQAWDAIVKSQDVAKRYQNQQLEVEHLIIALLEQQGTANKILSRSGIEPEKLLQQVDAFVRRQPKVGSIEHLYLGQGLETFLDLADQAKEKWEDKFIAVEHFLLAFHEDKRLGNKLIGGGTPQLPTRPGFAPPQTTLQIEFKELEATIKAFRGSSKVEDQNPEATYDALAKYGRDLTELAKVGKLDPVIGRDEEVRRVVSCLSRRTKNNPVLIGEPGVGKTAIAEGLAQRIVNGDVPESLKERQLISLDMGSLIAGAKFRGEFEERLRSVLREVTHSDGQIVLFIDELHTVVGAGSGGGNSSGVDAGNLLKPMLARGELRCIGATTIDEYRKHIEKDAALERRFQKVEVGQPSVEDTISILRGLKDRYETHHGVKITDAALVAAATLSNRYISDRFLPDKAIDLVDEAAAQLKMEITSKPVELEAIDRRIMQLEMEKLSIEGELSGTNKEKNSEAILSTKVSPALERITNEINSLKQKQEKFSSQWSGEKELLNSINSLKAEEDKIKVQIEQAERAYDLNTAAQLKYGQLETVHRDREAQEAELLKVQAQGSFLLREQVTDGDIATIVAKWTGIPVNRLLESERQKLLQLEKHLHQRVIGQSEAVAAVAAAIRRARAGMKDPGRPIGSFMFLGPTGVGKTELARALAGFLFDRDDALVRVDMSEYMEKHAVARLVGAPPGYVGYDQGGQLSEAVRRHPYSLVLFDEVEKAHPDVFNILLQVLDDGRITDSQGRVIDFSNTVIVMTSNIGSEYILDVAGDDSKYEEMYKRVMGALRKHFRPEFLNRVDEIILFHTLRKSELRQIVEIQVKRIERLLGEQKISLQLTDATLDHITEVGYDPVYGARPLKRAIQRELENPLANQILENRFVCGDVVIIDFVDSGLVFKKKEEGKLVKR

SEQ ID NO: 7025 - protein, 825 aa, Trichodesmium erythraeum IMS101
MFERFTEKAIKVIMLAQEEARRLGHNFVGTEQILLGLIGEGTGVAAKVLKSMGVNLKDARIEVEKIIGRGSGFVAVEIPFTPRAKRVLELSLEEARQLGHNYIGTEHLLLGLIREGEGVAARVLENLGVDLTKVRTQVIRMLGETAEVTAGGGGGRTKTPTLDEFGSNLTQMASEGKLDPVVGRQTEIERVIQILGRRTKNNPVLIGEPGVGKTAIAEGLAQRIANNDIPDILEEKRVVTLDIGLLVAGTKYRGEFEERLKKIMDEIRSAGNVILVIDEVHTLIGAGAAEGAIDAANILKPALARGELQCIGATTLDEYRKHIERDAALERRFQPVMVGEPSVDETIEILYGLRERYEQHHKLKILDTALEAAAKLSDRYISDRYLPDKAIDLIDEAGSRVRLINSQLPPAAKELDKELRSILKEKDEAVRSQDFDKAGELRDREMEIKSEIRSLAQNKKLDSTNEDDSPMVTEEDIAHIVASWTGVPVNKLTESESEKLLHMEDTLHQRLIGQEEAVKAVSRAIRRARVGLKNPNRPIASFVFSGPTGVGKTELTKALAAYFFGSEEAMIRLDMSEYMERHTVSKLIGSPPGYVGYNEGGQLTEAVRRRPYTVVLFDEIEKAHPDVFNMLLQILEDGRLTDAKGRTVDFKNTLIIMTSNIGSKVIEKGGGGLGFEFSENEADAQYNRIRNLVNEELKQYFRPEFLNRLDEIIVFRQLTKDEVKEISVILLKEVFSRLTEKGIKLEITDRFQERLVEEGYNPSYGARPLRRAIMRLLEDSLAEEILAGKINEGDTAVVDVGESGQIIVSKGEEKEKRELVPQGAE

SEQ ID NO: 7026 - protein, 825 aa, Trichodesmium erythraeum IMS101
MFERFTEQSIKVIMLAQEEARRLGHNFVGTEQILLGLIGEGTGIASKVLKENGVNLKDARNEVEKIIGRGSGFTPAEIPFTPRVKRMLEISLEEARKLDHNYIGTEHLLLGLLQDSEGVAAKVLDNLGVDKGKIRTQVIRSLGEVAAVAPGGSTPSGKKAVTLEEFGTDLTKLAAEGKIDPIVGRKTEIERVIQVLGRRTKNNPVLIGEPGVGKTALAEGLAQRIINQDVPDILENKQVVSLNIGSLIAGTRFRGEFEERLKKIMDEIRANGNIILVIDEIHTVVGAGAIEGSMDAANILKPALARGELQCIGATTLDEYRKHIERDAALERRFQPVKVGEPSVEQTIEILYGVRSAYEQHHRLTISDEALRAAAQLSDRYISDRFLPDKAIDLIDEAGSRVRVKNSMVSPQLRELRRELSRVIKDKEETVRQQDFEKASQLRDRELGIQAEIEETTSNKQDKKNSKSPVVTEDDIADIVASWTGVPVSKLTESESEKLLHIEDTLHQRLIGQEDAVKAVSRALRRARVGLKNPKRPIASFIFSGPTGVGKTELTKALAAYFFGSEEAMIRLDMSEYMERHTVSKLVGSPPGFVGYDEGGQLTEAVRRRPYTVVLFDEIEKAHPDVFNIMLQVLEDGRLTDSKGRVVDFKNTLIIMTSNIGSQVIEKGGGGLGFEFAEDKEEAQYNRIRNLVNEELKQYFRPEFLNRLDEIIVFRQLTKDEVKEIAEIMLREVFSRLGDREITLTVSDKFKDRLIEDGFDPSYGARPLRRAIMRLLEDVLAEALLAGKIQDGENVYVDLDENREVKVTPIGNSEKQLPEFAYSNN

SEQ ID NO: 7027 - protein, 172 aa, Trichodesmium erythraeum IMS101
MRSFIKLSTKPKRIFFFVRPTGMGKTEVAKALTELVFGDEKAFARFDMSEYKEQHAAEKLTGSPPGFVGYGEGGKLTNRVLENPYSILLFDEIEKSHSTVLDKFLQILEDGRLTDGQGKTAYFNQSIIIFTSNIGASKLLQEKANLQTKDYTEIESFFKYKVRDFFLENSRA

SEQ ID NO: 7028 - protein, 840 aa, Tropheryma whipplei str. Twist
MGEDMFERFTDKARRVIVLAQEEARTLSHNYIGTEHVLLGLISEGDGIAAQALESLDITLERAREGVAELIGRGQNATSGHIPFTPRAKKVLELSLREALQLGHNYIGTEHILLGILHEGEGIAAQVLVNMGAELPAIQQRVMHLLEDGREQEPVSVGPSESGKISGSQILDQFGRHLTRAAKEGKLDPVIGREKEIERVMQVLSRRTKNNPILIGEPGVGKTAVVEALAQAIVNGDVPVNLRNKQVYSLDLGSLIAGSRYRGDFEERLKKVTKEIRSRGDIIVFIDEIHSLVGAGSAEGAIDAATILKPLLARGELQTIGATTLDEYRKNIEKDSALERRFQPVNVSEPSIPMCIQILKGLRDRYEAHHKVKITDEAIYAAVTLSSRYINDRFLPDKAIDLIDEAGARLRLSVLSNPSQLRAVEKKILAVVARKDKAVEKQDFDKVGELKRKEKALRAELRKIKRDYENGNIASAGTVDEGLIAEVLASATGVPVFRLTEDESVRLMMMERSLHQRVIGQDEAISSLSRAMRRTRAGLKDPNRPSGSFIFAGPTGVGKTELAKALAEFLFDNEDALVSLDMSEYGERHTVSRLFGAPPGFVGFEEGGQLTEKIRRKPFSVVLFDEIEKAHPDVFNSLLQILEEGRLSDAQGRMVDFRNTIIVMTTNLGSRDIASGPVGFQSGDGSFLAYEAMKAKVNEELRRSLKPEFLNRIDEVIVFPPLNRDELLQILKIFIKKLDDRLRDRTMRLSVTDAALEQLVQIGYEPTMGARPLRRAVQREVEDRISEKILLGEIKPNQEIEMDFVNDNFTIVSRDMDYPLSPLVPSVTTGLVTPDLASHV

SEQ ID NO: 7029 - protein, 874 aa, Brucella suis 1330
MNIEKYTERVRGFIQSAQTFALSSGNQQFTPEHILKVLIDDDEGLAASLVERAGGRVGDVRMGLQSALEKLPKVSGGNDQLYLSQPLAKVFSLAEELASKAGDSFVTVERLLTALAMEKSAKTSEILSAAGVTPTALNRVINDMRKGRTADSASAESNYDALKKYARDLTEDARAGKLDPVIGRDEEIRRTIQVLSRRTKNNPVLIGEPGVGKTAIAEGLALRIVNGDVPESLKDKQLMALDMGALIAGAKYRGEFEERLKAVLSEVQTAAGQIILFIDEMHTLVGAGKTDGAMDASNLLKPALARGELHCVGATTLEEYRKYVEKDAALARRFQPVFVDEPTVEDTISILRGLKEKYEQHHKVRVSDSALVAAATLSNRYITDRFLPDKAIDLVDEAASRLRMHVDSKPEELDEIDRRIMQLKIEREALKVETDAASKDRLQRIEKELSDLEEESAELTAKWQAEKQKLGLAADLKRQLEEARNALAIAQRNGEFQKAGELAYGTIPQLEKQLADAESQENKGSLLEETVTPDHVAQVISRWTGIPVDRMLEGEREKLLRMEDEIGKRVVGQGEAVQAISKAVRRARAGLQDPNRPIGSFIFLGPTGVGKTELTKALASFLFQDDTAMVRIDMSEFMEKHSVSRLIGAPPGYVGYEEGGVLTEAVRRRPYQVILFDEIEKAHPDVFNVLLQVLDDGRLTDGQGRTVDFRNTVIIMTSNLGAEYLVNLGENDDVETVRDDVMGVVRASFRPEFLNRVDEIILFHRLRREDMGAIVDIQMQRLQYLLSDRKITLQLEDDAREWLANKGYDPAYGARPLKRVIQKEVQDPLAERILLGDILDGSLVKITAGSDRLNFRPISGAFSAAEPEREDEKA

SEQ ID NO: 7030 - protein, 894 aa, Bifidobacterium longum DJO10A
MEEYDMEQKFTTMAQEAVGDAIQSASAAGNAQVETLHVMDALLRQENGVARSLIEAAGGDPQAIGAAVRNALVALPSASGSSTSQPQASRQLTAAIAQAEKEMQQMGDEYVSTEHLLIGIAASKPNQSAEILEKNGVTAASLRKAVPGVRGGAKVTSPDAEGSYKALEKYSTDLTAAAKEGKLDPVIGRDQEIRRVIQILSRRTKNNPVLIGEPGVGKTAVVEGLAQRIVAGDVPTTLQGKKLISLDLGSMVAGSKYRGEFEERLKSVLNEIKNADGQIITFIDEIHTIVGAGAAEGSMDAGNMLKPMLARGELRLIGATTLDEYRENIEKDPALERRFQQVFVGEPSVEDTIAILRGLKQRYEAHHKVTIGDDALVAAATLSNRYISGRQLPDKAIDLVDEAAAHLRMELDSSPEEIDELQRKVTRLEMEEMQLKKAEDPASKERLGKLQAELADTREKLSGLKARWDAEQAGHNKVGDLRAKLDDLRVQADKYTREGNLAEASKILYGEIPSIQKELAAAESADAESADASAANPADEPMVPDRVDADSVAEIVSDWTGIPVGRLMQGENEKLLHMEDYLGKRVIGQKEAIAAVSDAVRRSRAGISDPNRPTGSFLFLGPTGVGKTELAKALADFLFDDEKAMVRIDMSEYMEKASVSRLIGAAPGYVGYEQGGQLTEAVRRRPYSVVLFDEVEKANPEIFDVLLQVLDDGRLTDGQGRTVDFKNTILIMTSNLGSQFLVNEDMDADAKKKAVMDAVHMNFKPEFLNRLDDIVMFHPLTREELGGIVDIQVAGVSQRLTDRRITLDVTDSAREWLANTGYDPAYGARPLRRLVQTEVGDQLARMLLAGKVHDGDTVLVDQTGGEHLELSAWASDQIVSDNPDVSVDNVTEDK

SEQ ID NO: 7031 - protein, 869 aa, Bifidobacterium longum DJO10A
MFERFTDRARRVIVLAQEEARALQHNYIGTEHLLLGLIREGEGVAAKALASKGVELDATRKQVEEMIGKGNAAPNGHIPFTPHAKQVLEFSLREALQLGHSYIGTEHILLGLIREGEGVGTQVLIKMDVDLGELRSATIDMIRGNSGTGTGDGKGDLANAGGVTDKQNKSGSAILDQFGRNLTAEAAEGKLDPVIGRTNEIERVMVVLSRRTKNNPVLIGEPGVGKTAVVEGLAQKIQAGDVPETLKGKQVYSLDLGSMVAGSRYRGDFEERLKKVLKEIKTRGDIVLFIDEIHTIVGAGSADGALGASDMLKPMLARGELQTIGATTTDEYRKYIEKDAALERRFQPIQVHEPTIAETIEILKGLRSRYENHHHVTITDGALQSAAELSSRYIQDRNLPDKAIDLIDEAGARLRIKRLTAPPELKELDEKIAKIAADKDEAIKGQDFEKAAELRDKQEKLEADRKQKEDSWREGESDVKMVVDEDVIAEVISSTTGIPVFKLTQAESKKLLNMEAELHKRIIGQDEAVSALSRSIRRTRVGLKDPKRPSGSFIFAGPTGVGKTELAKTLAEFLFDDEDALIRVDMSEFSEKYAASRLFGAPPGYVGYEEGGELTEKVRRKPFSVVLFDEIEKAHPDIFNTLLQVLDDGHLTDGQGRKVDFKNTIIILTTNLGTRDIAKAANTGFNLGANNESSYQRMKDQVSSELKQQFRPEFLNRLDDIIVFKQLTEPQVRQIVDLDVKQLNDRLFDRHMSLELTDAAKDLLAQKGFDPLLGARPLRRVIQRDIEDAISEKILMGDLEDGQRVIVDAEGEGILGEFTFKGEEFEEPAAADKPAEDGAATDGETPADATPATEPAESAPADSGDAPQE

SEQ ID NO: 7032 - protein, 872 aa, Haemophilus somnus 129PT
MVNFYDETQKLILGEIMNIDKFTTKFQQAIAEAQSLAIGKDHQFIEPVHLMTALLNQQDGSIPPLLTASGGNLALLHNELAAELSRLPQVSGNNGDIQVSRSLVKLLNLCDKLAQQRQDKFISSELFLLAIFEDKGALSESLKKCGIKQENLLQAIDKLRGGEKVNEQGAEENRQALEKYTIDLTARAESGKLDPVIGRDEEIRRAIQVLQRRTKNNPVLIGEPGVGKTAIVEGLAQRIVNGEVPEGLKGKRVLSLDMGALIAGAKYRGEFEERLKAVLKELAQEEGRVILFIDEIHTMVGAGKTDGAMDAGNLLKPSLARGELHCVGATTLDEYRQYIEKDAALERRFQKVFVGEPTVEDTIAILRGLKERYEIHHHVQITDPAIVAAATLSHRYISDRQLPDKAIDLIDEAASSIRMEIDSKPQPLDRLERRIIQLKLEQQALQKEDDEASRKRLDLLEEELGEKEREYAELEDVWKAEKAALSGAQHIKAELDNAKIQMEQARRISDFAKMSELQYGRIPELEKQLAQAESAEGKEMTLLRNRVTDEEIAEVLSRATGIPVAKMMEGEKDKLLRMEQELHKRVVGQSEAVVAVANAIRRSRAGLSDPNRPIGSFLFLGPTGVGKTELCKTLANFMFDDENAMVRIDMSEFMEKHSVSRLVGAPPGYVGYEEGGYLTEAVRRRPYSVILLDEVEKAHSDVFNILLQVLDDGRLTDGQGRTVDFRNTVVIMTSNLGSDLIQGNKELDYNAMKEIVMSVVGQHFRPEFINRIDETVVFHPLAKENIRAIATIQLQRLVKRMETHGYQLEFTDATLDFIGEVGYDVIYGARPLKRAIQQEIENPLAQQILSGQLLPGKKVIVDYVDGKVVAQQ

SEQ ID NO: 7033 - protein, 889 aa, Bifidobacterium longum NCC2705
MEQKFTTMAQEAVGDAIQSASAAGNAQVETLHVMDALLRQENGVARSLIEAAGGDPQAIGAAVRNALVALPSASGSSTSQPQASRQLTAAIAQAEKEMQQMGDEYVSTEHLLIGIAASKPNQSAEILEKNGVTAASLRKAVPGVRGGAKVTSPDAEGSYKALEKYSTDLTAAAKEGKLDPVIGRDQEIRRVIQILSRRTKNNPVLIGEPGVGKTAVVEGLAQRIVAGDVPTTLQGKKLISLDLGSMVAGSKYRGEFEERLKSVLNEIKNADGQIITFIDEIHTIVGAGAAEGSMDAGNMLKPMLARGELRLIGATTLDEYRENIEKDPALERRFQQVFVGEPSVEDTIAILRGLKQRYEAHHKVTIGDDALVAAATLSNRYISGRQLPDKAIDLVDEAAAHLRMELDSSPEEIDELQRKVTRLEMEEMQLKKAEDPASKERLGKLQAELADTREKLSGLKARWDAEQAGHNKVGDLRAKLDDLRVQADKYTREGNLAEASKILYGEIPSIQKELAAAESADAESADASAANPADEPMVPDRVDADSVAEIVSDWTGIPVGRLMQGENEKLLHMEDYLGKRVIGQKEAIAAVSDAVRRSRAGISDPNRPTGSFLFLGPTGVGKTELAKALADFLFDDEKAMVRIDMSEYMEKASVSRLIGAAPGYVGYEQGGQLTEAVRRRPYSVVLFDEVEKANPEIFDVLLQVLDDGRLTDGQGRTVDFKNTILIMTSNLGSQFLVNEDMDADAKKKAVMDAVHMNFKPEFLNRLDDIVMFHPLTREELGGIVDIQVAGVSQRLTDRRITLDVTDSAREWLANTGYDPAYGARPLRRLVQTEVGDQLARMLLAGKVHDGDTVLVDQTGGEHLELSAWASDQIVSDNPDVSVDNVTEDK

SEQ ID NO: 7034 - protein, 869 aa, Bifidobacterium longum NCC2705
MFERFTDRARRVIVLAQEEARALQHNYIGTEHLLLGLIREGEGVAAKALASKGVELDATRKQVEEMIGKGNAAPNGHIPFTPHAKQVLEFSLREALQLGHSYIGTEHILLGLIREGEGVGTQVLIKMDVDLGELRSATIDMIRGNSGTGTGDGKGDLANAGGVTDKQNKSGSAILDQFGRNLTAEAAEGKLDPVIGRTNEIERVMVVLSRRTKNNPVLIGEPGVGKTAVVEGLAQKIQAGDVPETLKGKQVYSLDLGSMVAGSRYRGDFEERLKKVLKEIKTRGDIVLFIDEIHTIVGAGSADGALGASDMLKPMLARGELQTIGATTTDEYRKYIEKDAALERRFQPIQVHEPTIAETIEILKGLRSRYENHHHVTITDGALQSAAELSSRYIQDRNLPDKAIDLIDEAGARLRIKRLTAPPELKELDEKIAKIAADKDEAIKGQDFEKAAELRDKQEKLEADRKQKEDSWREGESDVKMVVDEDVIAEVISSTTGIPVFKLTQAESKKLLNMEAELHKRIIGQDEAVSALSRSIRRTRVGLKDPKRPSGSFIFAGPTGVGKTELAKTLAEFLFDDEDALIRVDMSEFSEKYAASRLFGAPPGYVGYEEGGELTEKVRRKPFSVVLFDEIEKAHPDIFNTLLQVLDDGHLTDGQGRKVDFKNTIIILTTNLGTRDIAKAANTGFNLGANNESSYQRMKDQVSSELKQQFRPEFLNRLDDIIVFKQLTEPQVRQIVDLDVKQLNDRLFDRHMSLELTDAAKDLLAQKGFDPLLGARPLRRVIQRDIEDAISEKILMGDLEDGQRVIVDAEGEGILGEFTFKGEKFEEPAAADKPAEDGADTDGETPADVTPVTEPAESAPADSGDAPQE

SEQ ID NO: 7035 - protein, 863 aa, Desulfovibrio desulfuricans G20
MDISKFTEKSQQALGEAQNVAVRAGHQEVDVEHLALALVVQEHGIVPRLLDKAGVRPQAFAAAVEAELGRKPAVSGPGSAQGQIFVTQRLNRLLVKAQDSARRLQDEYVSVEHIFCAMAEEPASSPVGRVFAQFGLTQEKLLGVLTQVRGAQRVTSSNPEDTYEALSRYGRDLVEEARKGKLDPVIGRDAEIRRTVRILSRRTKNNPVLIGEAGVGKTAIVEGLAHRILNGDVPESLRDKSLFALDMGALIAGAKYRGEFEERLKAVLKEVEQAEGRIIMFIDELHTIVGAGKTDGAMDAGNLLKPMLARGELHCIGATTLDEYRKYIEKDPALERRFQPLVVDEPTVEDTISILRGLKERFEVHHGVRISDSALVEAVTLSNRYIADRQLPDKAIDLIDEAAALIRTEIDSLPAELDEANRKIMQLEIEREALRRETDAASRERLQKLENELAELREVQAGLNTQWEREKGSIDSVRALKEDIERTRRQIEEAERNYDLNRAAELKYSVLHDLEKRLAATEGGGENGPRLLKEEVGPDDVAEIVARWTGIPVTRLLESEREKLLRLPDVLHQRVVGQDVAVDAVAEAVLRSRAGLSDPARPIGSFIFLGPTGVGKTELCKTLAQALFDTEDNIVRLDMSEYMEKHTVARLIGAPPGYVGYDDGGQLTEAVRRKPYSVVLFDEIEKAHPDVFNVLLQLLDDGRLTDSHGRTVDFKNTIIIMTSNIGAPLMLDGISPQGEFTEGVEDRVLEELRRHFRPEFLNRVDEIVLFKPLMLEQIMHIVDLLMQRLLGRLAERKIRVSLTDKAKRFVAESAYDPVYGARPLKRYLQQRLETPLARRIIAGELRDGQQVTVDTDGHTLFFE

SEQ ID NO: 7036 - protein, 949 aa, Desulfovibrio desulfuricans G20
MARKQCQVCGQPATVRVEANLNGRHSTMLLCDDHYRQLVRQQKRTVSPLEALFGSRSGLFEDFLGNDFFRIGDDAPSMTADTDEVVDASFGEPAPAGTGTARRRGSGLASRISEQSEALLQEAARHAAEFGRAEVDTEHLLLALSDSDVVKTILGQFKIKVDDLKRQIESEAKRGDKPFEGEIGVSPRVKDALSRAFVASNELGHSYVGPEHFLIGLAEEGEGLAANLLRRYGLTPQALRQQVSKVVGKGAEDGRAETPTNTPELDKYSRDLTKMAREGKLDPVIGRAQEIETTIEVLARRKKNNPVLIGEPGVGKTAIVEGLAQRMVAGEVPETLRGKRLVELNINAMVAGAKYRGEFEERVQKVLKEVTEHQDELILFIDEVHAIVGAGQGGGEGGLDVANVFKPMMARGELNLIGATTLNEYQKYIEKDAALERRFQPVMVPEPTVAQTMMILRGLRDTFEAHHKVSITEDAIIAAAELSDRYITARFLPDKAIDLLDQAAARVKLSATARPVAVQELESELHQLRREQDYVASRKQYDKAAELGKRIEAKETELKKLVEEWERERASGSAEVKAEHVAQIVSRLTGIPVNELTVEEREKLLHLEQRLHERLVGQDEAVRAVADSVRLSRAGLREGSKPVATFLFLGPTGVGKTELAKALAESIYGDEGALLRIDMSEYGERHTVARLVGAPPGYVGYDEGGQLTEKVRRKPYSVLLLDEIEKAHPDVYNILLQVFDDGRLTDGKGRVVDFTNTIIIATSNLGSDIIQRRLKARGAGGEEYVKTKSEVMDVLRGHFRPEFLNRIDEIIVFHALGKEEIRHIVGLQLDRVARNAASQGVTLTFDQTLIDHFAEEGYKPEFGARELKRLIRSELETALAREMLGGSIGKADHASARWDDKAERVVFERQEPPAKPAEPEKPDAANAAETPPSDASKPARKKKSAGGES

SEQ ID NO: 7037 - protein, 850 aa, Pseudomonas aeruginosa PAO1
MDIAEYFSKQTTEYLQRAAQVAAEFGKREVDTEHLLYALADADVVQAVLKQFGLSPADLKQYIEANAVRGASKGEASEDMTISPRVKSALQHAFALSRELGHSYVGPEHLLLGLAAVPDSFAGTLLKKYGLTEQALRQKAVKVVGKGAEDGRVDGPSNTPQLDKFSRDLTRLAREGKLDPVIGRSKEVETTIEVLARRKKNNPVLIGEPGVGKTAIVEGLAQRMVQGEVPEVLRDKRLVELNINAMVAGAKYRGEFEERLKQVMDELQAAQSEIILFIDEVHTIVGAGQGGGEGGLDVANVLKPAMARGEMNLIGATTLNEYQKYIEKDAALERRFQPVFVPEPTVEQTISILRGLRDKLEGHHKVTIRDEAFVAAAELSDRYIGNRFLPDKAIDLIDQAAARVRIASTSRPAEIQELEAELAQLKREQDYAASRKWYDEAKVFEKRIQERKEHLEQITERWQQTQGSKTEEVRVEDIAEIISKLTGIPVTELTAEEREKLLQMEERLHQRVIGQQEAITAVSDAVRLARAGLRQGSRPIATFLFLGPTGVGKTELAKALAEVVFGDEDAMIRIDMSEYMERHAVSRLIGAPPGYVGYDEGGQLTERVRRRPYSVILLDEIEKAHADVNNILLQVFDDGRLTDGKGRVVDFTNTIIIATSNLGSELIMKNAQAGEFAQPPEKLKRELMTTLRGHFRPEFLNRLDEVIVFESLSKAQIEDIVRLQLERVKRAAHAQDIYLHIDDSLVGHLAEEAYQPEFGARELKRQIRQQLETRLATAMLKGEVKEGETVTFFYDAKDGVGYRKGAAPNPAARKKSGAGETPRGRATAARKPAAKKGAAAKGKADKPKAK

SEQ ID NO: 7038 - protein, 902 aa, Pseudomonas aeruginosa PAO1
MSEISRVALFGKLNSLAYKAIEAATVFCKLRGNPYVELVHWFHQILQLPDSDLHQIVRQSGIDPARLAKDLTEALDRLPRGSTSITDLSSHVEEAVERGWVYGSLMFGESQVRTGYLVIGILKTPSLRHALTGLSAEFAKLKVEALTERFDEYVGASPENGLSASDGFNAGAAPGEASGALAPSAMGKQEALKRFTVDLTEQARSGKLDPIVGRDEEIRQLVDILMRRRQNNPILTGEAGVGKTAVVEGFALRIVAGDVPPALKDVELRALDVGLLQAGASMKGEFEQRLRQVIEDVQSSEKPIILFIDEAHTLVGAGGAAGTGDAANLLKPALARGTLRTVAATTWAEYKKHIEKDPALTRRFQVVQVDEPSEHKAILMMRGVASTMEKHHQVQILDEALEAAVRLSHRYIPARQLPDKSVSLLDTACARTAISLHAVPAEVDDSRRRIEALETELAIIRRESAIGVATAERQRNAETLLAEERERLAALEQRWAEEKRLVDELLETRARLRAAAEAVDAGGVPLGEGEVRLDEEQRQALHARLAELQAQLSALQGEEPLILPTVDYQAVASVVADWTGIPVGRMARNEIETVLNLDRHLKKRIIGQDHALEMIAKRIQTSRAGLDNPSKPIGVFMLAGTSGVGKTETALALAEAMYGGEQNVITINMSEFQEAHTVSTLKGAPPGYIGYGEGGVLTEAVRRKPYSVVLLDEVEKAHPDVHEIFFQVFDKGVMEDGEGRVIDFKNTLILLTTNAGTEMIASLCADPELMPEPEAIAKSLREPLLKIFPPALLGRLVTIPYYPLSDDMLKAISRLQLGRIKKRVEATHKVPFEFDEGVVDLIVSRCTETESGGRMIDAILTNTLLPDMSREFLTRMLEGKPLAGVRISSRDNQFHYDFAEAE

SEQ ID NO: 7039 - protein, 877 aa, Pseudomonas aeruginosa PAO1
MSMINVDLQQLIQALDADTRRDLEGSAERCVARGGSKVLVEDLLLGLLERPQGLLARALQDAAVDAGELNAALQARGEHSASRNPVFAPELVQWLQDALLLANLELGRSQIDQAALILALLRNPLRYAGSRYQPLLARLDIERLKDFALSQPLEGAPSGKPGGGESLLQRFTHNLTQQARDGKLDPVLCRDGAIRQMVDILARRRKNNPIVVGEAGVGKTAIVEGLASRIAAGEVPPALRDVELLSLDMGLLQAGASVKGEFERRLKGVIDEVKAAPRPTILFIDEAHTLIGAGGQAGGSDAANLLKPALARGELRTIAATTWAEYKKYFEKDPALARRFQPVQLHEPSVAEAVTILRGLARVYEESHGIYLRDDAVVAAAELSARYLAGRQLPDKAVDVLDTACARVRISLAAAPESLERLRGELAEGERQRQALRRDAEAGLPIDHDALQALEERLAQAESERHVQEDQWSRQRELAERLLALRQQLARAREANREEQGSEADAEAFPADEHGGVEALEKALHETRQALADAQAQGRLVSFEVCPRLVAEVIGAWTGVPVEQLAREHNAKVMGFADDLRTRIRGQEQAVSALDRAMRATAAGLNKPDAPVGVFLLVGPSGVGKTETALALADLLYGGERFITTINMSEFQEKHTVSRLIGAPPGYVGYGEGGMLTEAVRQKPYSVILLDEVEKADPDVLNLFYQIFDKGVANDGEGREIDFRNTLILMTSNLASEHIAALCQDGARPSAELLEETIRPALSRHFKPALLARMRVVPYYPVGGPVLRELIEIKLQRLGERLARRQLAFDYSQALVGHLAERCTQSDSGARLIDHLLDTHLLPLVADRLLEAMARDERLERVHATLGEHGRVLCEFA

SEQ ID NO: 7040 - protein, 849 aa, Pseudomonas aeruginosa PAO1
MELAALIGRLNPDCRRALERAAQRCLQRTHHYVEIEHLLLELLDIDGGDFACLLPRFGLERDALVAEINLSLELFKAGNTRTPALSAHTIGLLEDAVVHASVLGQAQIRSGLLLLALLDREERRALLLNSASSLLRIPHEALQANLLEWIQASREQPPAPNRPAAGGDKPESAPDPLLDQYTQDLTAEARAGRIDPIVGRDGEIRQCVDILLRRRQNNPILVGAPGVGKTAVVEGLALRIAAGEVPPSLQEVILRVLDLGLLQAGASMKGEFEQRLKGVIDAVRNSAQPIILFIDEAHTLIGAGGAEGGSDAANLLKPALARGELRTLAATTWLEYKKYFEKDPALTRRFQLVQVEEPDEATAVEMLRGVAGKLELHHGVQIMDAAIVDAVKLSHRYISGRQLPDKAISVLDTACARVALGQHDVPPPLESLRHREQALEEELQRLRREQATGLDHSARITALESESGDNRRTIRELETRWDEEREAVRELLDIRRELLALSESADAAKPDEELDGRIDHLAAELARLAAGLEAIRQDDPLVPEQVDSRTVAAVIAGWTGIPVGKMLADEAHAIRSLAQRMGQRVMGQEAALGAIAQRIQAYRAGLSDPAKPVGVFLLPGPTGVGKTETAYALADALYGGERNLISINLSEYQEAHTVSQLKGAPPGYVGYGSGGVLTEAVRRKPYSVVLLDEIEKAHPDVLEAFYNVFDKGVMEDGTGLVVDFRNTVILATSNVGAELLLDSPAEQVATPAFDERLRKVLLQTFRPAFLARMTVVPYRPLEEATLEGIVVAKLEKLRERYKAATGKQFDFDPAIVKAVLAKCSAAGARDIENVLMAQVTGKLAEWVLE

SEQ ID NO: 7041 - protein, 865 aa, Clostridium tetani E88
MDIEKLTLKVQQTINDSQKIAVKYNHQQLEPFHLFAALVFQEDGLIPNILGKMNINIKVLRDEIKRELNEMPKVLGDGAQNSGVYATRSFEEIFIRAESIAKDFKDSYISVEHIMLSLMQGRSTSIKKILDKFNIRKDKFLNVLQQVRGNQRVDTQDPEGTYEALVKYGRNLIEDAKKHKLDPVIGRDEEIRRIVRILSRRTKNNPVLIGDPGVGKTAIIEGLAERIVRGDVPEGLKNKIIFSLDMGALIAGAKFRGEFEERLKAVLKEVENSQGKIILFIDEIHNIVGAGKTEGSMDAGNLIKPMLARGELNCIGATTFDEYRKYIEKDKALERRFQPVIIDEPTVEDTISIIRGLKERFEIHHGIRIHDSAIVAAAKLSQRYITDRYLPDKAIDLIDEAGAMIRTEIDSLPTELDSIKRKIFQMEIEKEALAKEKDSRSKERLEDLEKELSNLKEKDKEMTAKYEKEKEQIINMRNLKQKLDEVKGQLEKAEREYDLNKVAELKYGIIPGIKSQIEEKEILIKENSQGNMLKEEVTENEISKIISHWTGIPVTKLIEGEKDKLLRLEDELKSRVIGQDEAVEAVSNAVLRARAGMKDPQKPIGSFIFLGPTGVGKTELAKTLCKNLFDSEENIIRIDMSEYMEKYSVSRLIGAPPGYVGYEEGGQLTEAVRRKPYSVILFDEIEKAHDDVFNIFLQILDDGRLTDNKGKTVDFKNCIIIMTSNIGSSYLLENKKEDGIDETVKNKVSNALKDRFKPEFLNRLDDIIMFKPLTNREITKIIDIFLQDIENRLKDRNITLIVTENAKELMAKEGYDAIYGARPLKRYIENILETKIAKQIIKGDIYEGCKIGVDIKGEEIIIGKI

SEQ ID NO: 7042 - protein, 811 aa, Clostridium tetani E88
MIFGRFNERAQKVLVFAQESARNYRHGYVGTEHILLGILKEEGISKNILKDMNVELEDVESLIEEYEGKGDLDLYSNEIPLTPRTKRLLEISLLEARNLNHNFITPEHILLALIKESEGIAFTILSNLGVDFNRLRKELLENVAGERSVNRSSSDTNKKNQDTPTLNEFGRDLTDMAMEGKLDPVIGRDKETQRVLQILCRRTKNNPCLIGDPGVGKTAIAEGLAQKIVEGNIPEILKDKRVVTLDLSSMIAGAKYRGEFEDRLKKVMEEIRKSGNVILFIDEIHTIIGAGAAEGAIDASNILKPALARGEIQCIGATTIDEYRKHIEKDSALERRFQPITVGEPTKEEAILILRGLRDKYEAHHRANITDEAIEAAVNLSDRYITERYLPDKAIDLMDEAASKVRIENMIAPTDMKELEENLEKVTKEKEDAIRVQDFEKAAQLRDHEKDLKYRLENLKSDWKTQKQVATLTVDETQIAAVVSKWTNIPVRKLTEKESERLLKLEETLHNRVIGQNEAVKSVSRAVRRARVGLKDPNRPIGSFIFLGPTGVGKTELSKALAEAMFGDESSMIRIDMSEYMEKHAVSRLIGSPPGYVGYDEGGQLTEKVRRHPYSVILFDEIEKAHPDVFNILLQILEDGRLTDGKGKTVNFKNTIIIMTSNVGASTIKKQKSLGFAISDDKIESEYEQMKENVMEELKRSFRPEFLNRIDDIIVFHKLREEDLEKIVALMLESVTHRLKNQDINISFDKKSQKFLAKKGFDPVYGARPLRRAITKAVEDKLSEEILKGSIEKGDKVLVSVNEEKLIFNKE

SEQ ID NO: 7043 - protein, 767 aa, Clostridium tetani E88
MKLCSVCNKNVATIFTTRFETGKPQIVGICAECAKKMNIQPLNQIIEAAGVTPEDMETYAEQMNKLLDNMDINELLNNDLFSNMINNMNGMNMFKVQDDFIDKDKNEENTNSERNKDKSEGNSNVKTRVKFKNKRRNLDKYAINLNDKAKDKKIDVVVGRDKEIERIIQILNRRNKNNPILIGEPGVGKTAIAEGLAVKIIEKNVPIKLFDKEIYLLDLTSVVAGTQFRGQFEGRMKAIVDEVTESENVILVIDEVHNIIGAGEAQGGALNAANILKPALARGDIQVIGATTLEEYRKYIEKDSALERRFQPILVEEPSVKETIEILNNIKIYYEDYHKVKISKKIIEEAVKLSERYITDRYLPDKAIDVIDEASSRVNLRNKNLVEFKIAKEELGELQNKMLNEANSGNYEKAAQYKTEEYKLKNKVEELEKKSKVELSVDDIAYVIEAWTKIPVQKVREKEAEKLLNLEQRLHKRLIGQDKAVRKLSRTIRRNRLGFKSKKRPASFIFVGPTGVGKTELVRSLACELFGDEDSLIRIDMSEYMEKHTASKLIGSPPGYVGYDEGGQLTEKIRRKPYSVVLLDEIEKAHPDIFNMLLQVLEDGRLTDNQGRTVFFDNSVIIMTSNLGTNFKESSIGFGNTNSIQIENSIKDALKETFKPEFINRIDEIVIFEKLNKEELYDIIDIMFDEVSEDLSEKNIKVHFTKEVKDFILKVGYDEKYGARELKRAIQRYIEDEISEQYFRNEVKEGTNILVDIYEESIYIKNM

SEQ ID NO: 7044 - protein, 857 aa, Yersinia pestis CO92
MRLDRLTSKFQLALADAQSLALGRDNQFIEPLHLMSALLNQDGGTVRPLLTSAGINVARLRSDIEQALGRLPQVEGTGGDVQPSNELVRVLNLCDKLAQKRSDKFISSELFVLAVLEDRGTLTDMLKAAGATVAIIDKAIETMRGGDKVDDQGAEDQRQALKKFTIDLTERAEQGKLDPVIGRDEEIRRTIQVLQRRTKNNPVLIGEPGVGKTAIVEGLAQRIVNGEVPEGLKHKRVLSLDMGSLIAGAKYRGEFEERLKGVLNDLSKQEGSVILFIDELHTMVGAGKGDGAMDAGNMLKPALARGELHCVGATTLDEYRQYIEKDAALERRFQKVYVAEPTVEDTIAILRGLKERYELHHHVQITDPAIVAAATLSHRYISDRQLPDKAIDLIDEAGSSIRMQMDSKPESLDRLERRIIQLKLEQQALKKESDDASKKRLEMLNTELEQKEREYSELEEEWKAEKASLTGTQNIKTELEQAKITLEQARRVGDLARMSELQYGTIPELEKQLAAATALEGKTMKLLRNRVTEIEVAEVLARWTGIPVSRMLKSERDKLLRMEQDLHQRVIGQDEAVEAVSNAIRRSRAGLSDPNRPIGSFLFLGPTGVGKTELCKALATFLFDSDDAMVRIDMSEFMEKHSVSRLVGAPPGYVGYEEGGYLTEAVRRRPYSVILLDEVEKAHPDVFNILLQVLDDGRLTDGQGRTVDFRNTVVIMTSNLGSDLIQEHFGQMNYSEMKTVVMDVVSHHFRPEFINRIDEVVVFHPLGRAHLASIANIQLERLYKRLEERGYEVKITQPALEFLGEAGFDPVYGARPLKRAIQQEIENPLAQQILSGKLIPGIPVTLDVENGHIIAKQ

SEQ ID NO: 7045 - protein, 882 aa, Yersinia pestis CO92
MTTHSAHLLRRLNPYCAQALAGAATLCQTRAHAEITVEHWLLKLLEQGEGDITVIARRYEWDMDSLWQGLLAYLDTLPRTVQGKPQLSAALQQLIKSAWLDASLQENADAVRSVHLMAALINSPSLLAADAAWPLLSLSTTQLHRLLPLLDSQSDERPEIQQAAALADSPVNLTDEAATVTSASGQPQLNDALQAALDKFTLDVTAKARANQIDPIFGRDSEIRQMIDILSRRRKNNPILVGEPGVGKTALVEGLALRIAEGNVPDSLKTVSVRTLDLGLLQAGAGVKGEFEQRLKNVIEAVQQSPSPVLLFIDEAHTIIGAGNQAGGADAANLLKPALARGELRTIAATTWSEYKQYFERDAALERRFQMVKVDEPDDDTACLMLRGLKERYATHHGVHILDAAITAAVTLSRRFLTGRQLPDKAVDLLDTAGARVRMSIDTLPTALMAINAELAALAMEQQAIEQDLLLLPNVSSTRLPEIEQRRAALAVGQHTLEQQYKEEKRLTTLIIEARQDIANVAHLVALQEELVQIQGNAPLLSLDVDVRTVAAVIADWTGVPLSSLLKDEQTDLLQLENHLATRVVGQDTALGALAQRLRAAKTGLTSENGPLGVFLLVGPSGIGKTETALALADSLFGGEKSLITINLSEYQEAHTVSQLKGSPPGYVGYGQGGVLTEAVRKRPYSVVLLDEVEKAHRDVLNLFYQVFDRGFMRDGEGREIDFRNTVILMTANLGSDHLMQLLDEQPEATHSDLHELLRPILRDHFQPALLARFQTLIYRPLNAIALRTIVEMKLAQVAKRLNKHYGLHCTIEESLYDTLVAACLLPDTGARNIDSLLNQQILPVLSQQLLSRMSEQQRTTSLTLGWDEADGITLEFEGGEK

SEQ ID NO: 7046 - protein, 880 aa, Yersinia pestis CO92
MTTHSAHLLRRLNPYCAQALAGAATLCQTRAHAEITVEHWLLKLLEQGEGDITVIARRYEWDMDSLWQGLLSHLDTLPRTVQGKPQLSAALQQLIKNAWLDASLQENADAVRSVHLMAALIATPSLLVAEAAWPLLSLSTTQLQRLLPLLDNQSDERPEVQQAAALADSPVNLTDEAATVTSASGQPQLNDALQAALDKFTLDVTAKARANQIDPIFGRDSEIRQMIDILSRRRKNNPILVGEPGVGKTALVEGLALRIADGNVPDSLKTVSVRTLDLGLLQAGAGVKGEFEQRLKNVIEAVQQSPSPVLLFIDEAHTIIGAGNQAGGADAANLLKPALARGELRTIAATTWSEYKQYFERDAALERRFQMVKVDEPDDDTACLMLRGLKERYATHHGVHILDAAITAAVTLSRRFLTGRQLPDKAVDLLDTAGARVRMSIDTLPTALMEINAELAALAMEQQAIEQDLLLLPNVSSTRLPEIEQRRAALAVGQHTLEQQYKEEKRLTTLIIEARQDIANAAHLVALQEELVQIQGNAPLLSLDVDVRTVAAVIADWTGVPLGSLLKDEQTNLLSLENRLGERVIGQDAALGALAQRLRAAKTGLTSENGPLGVFLLVGPSGIGKTETALALADSLFGGEKSLITINLSEYQEAHTVSQLKGSPPGYVGYGQGGVLTEAVRKRPYSVVLLDEVEKAHRDVLNLFYQVFDRGFMRDGEGREIDFRNTVIVMTANLGSDHLMQLLDEQPDAPDSTLHELLRPILRDHFQPALLARFQTLIYRPLQVDALKRIVAIKLNQVAQRLHCHYGLSCQIEDSLTDTLVAACLLPDTGARNIDSLLNQQILPVLSQQLLSRMSEQQRTTSLTLGWHEEDGITLTFEGE

SEQ ID NO: 7047 - protein, 891 aa, Yersinia pestis CO92
MAITRKHLFGKLDATLFKGIESATTICKLRGNPYVELVHWLNQLWHQEDNDLKQIIRYFAVDVDAFERELAQALAKLPVGATSISDFSYHIELATERAWIYASLECLDTRIRSGHLLLALLTTMELRRAFFAIAPSMEKIPLEHLSKDLNFITQASPEANEAASDGSPLYDGALPGEASNAIGAAKSGGALAQYTTDLTALAREGKIDPVLGRNHEINTMVDILLRRRQNNPLLTGDAGVGKTAIVEGLALAIAAGSMPPALSQVSLLSLDIVALSAGASMKGEFEARLKSVLDEAIAAEKPVILFIDEVHTLIGAGGNAGTGDAANLLKPALARGQLRTIGATTWSEFKRHIEKDPALTRRFQVLQVDEPDENTAISMLRGLIPALEKHHGVWIMDEALQAAVRLSHRYIPARQLPDKAISLLDTACARIAVAQFSQPIELQHLTFQSETAQTELVSLEKARHFGKAQDARTEQLKTSIAEHGEAADKLDQRWQAERELVSAITTIRTALYDLVSQPEPDEEKRRAYQAQLVQLEAQLSQVRTSLPLVQTEVNAEVIASIVADWTGIPVGQMLKDDIRAVMELPQRLEARVIGQPHALMQLGENIMTARAGLSDPRKPLGVFMLVGPSGVGKTETALAIAESMYGGEQNMITINMSEYQESHTVSSLKGSPPGYVGYGEGGVLTEAVRRKPYSVVLLDEIEKAHSDVHELFFQVFDKGQMEDGEGRFIDFKNTILLLTSNVGSELLSNLLADPDTAPDQDGILSALQPELLKVFPAAFLGRVTVIPYLPLQQDALQHIVRLHLDRIGARLYSQHQLTLKYSDEVVEDVVSRCAVSETGARMLIRYIEQNITPKIGKYILGDSDVKPEQIIFVHKNENGFVIALQCKDDEN

SEQ ID NO: 7048 - protein, 867 aa, Yersinia pestis CO92
MIQIDLPTLVNRLNPIARHSLEAAAAHCVSQQEAEITVSQVLLQMISTPLCDVRLILSHAGVEEDELRESLDQRVSGYQAITQAYPSFSPLLVEWLQDSWLLASTEMEHSQLRSGVMLLTLLLSPSRYLVPTANRLLSPINRELLRQNFANWTADSAETPRAEKGAEAGNGAEINGDSLLARYASNMTEQARNGELDPVLCRDTEIDLMIDILCRRRKNNPIVVGEAGVGKSALIEGLALRIVDNQVPEKLRNSELMTLDLGALQAGAAVKGEFEKRFKGIMAEIAQSTTPIILFIDEAHTLIGAGNQQGGLDISNLLKPALARGELKTIAATTWSEYKKYFEKDAALSRRFQLVKVSEPSAQEATIIMRGLRTVYEQAHGVLIDDEALQAAAVLSDRYISGRQLPDKAIDVLDTAAARVAINLTSAPRQVSALKNELYHQGMEIEMLEREQRLSLSRPDERLSVLQQQRIEIEQQLIALNTGWEKQQHLVQQIIALRAVLLAQEESATDEQVVNLTALSDELERLQQHQTLVSPHVDKSQIAAVIAEWTGVPLNRLSQSELAVVTELPSYLGQQIKGQETAIHCLHQHLLTARADLRRPGRPMGAFLLVGPSGVGKTETVLQIADLLYGGRQYLTTINMSEFQEKHTVSRLIGSPPGYVGYGEGGVLTEAIRQKPYSVVLLDEVEKAHPDVLNLFYQAFDKGELADGEGRIIDCKNIVFFLTSNLGYQTIVDHADEPALLNERLYPELSAFFKPALLARMEVVPYLPLGMETLQIIIHGKLNRLDTLLRQRFSADVVIEPEVIDEILLRATRAENGARMLESIIDGALLPPVSLLLLQKVAAGTAISHIRIAVEGNVFTAQVEGAI

SEQ ID NO: 7049 - protein, 867 aa, Yersinia pestis CO92
MGAITVYQRERLFNRLGTFAYKTFVEATRLCRSYRHEYVELEHWLKILMDQQRGDIPALLTHYGLSQTVISTQLDRIIQHMPVTKASVQDLSSRLESVVEGGLVLSQLMASPSPIRTSHILLALLQDTQHQRWLYRLCDEFKKLPVPQVAEEYEGLLVNSIEQTSEVQRGDALVTETDSSSSKEAHAALNKWCNDLTQQARDGEIDPVIGREAELRQVIDILLRRRQNNPILVGEAGVGKTAVVEALARKLASGDVPPLLQGARLLSLDLGRMQAGASMRGEFESRLKSLIDGISQSDTPVILFCDEAHTLVGAGGQAGTGDAVNLLKPMLARGALRMIAATTWSEYKQFIEPDAALTRRFQRVLIGEPNESTAVDMLRAIAPHFAQHHNVTIRDGAIHAAVRLSLRNLPSRQLPDKAISLLDTACARVALSQYAQPQAIEQLSAQLDVLKTEHQYLVREKQLGEAVDQRLDDVQTQIQAFEHELTALQSRHLHEQQLVREVLPEGEGSGMMTENARWGELMALQEASPLVYPWVDEQSIAAVLSDWTGIPSGKMLQDDIECVLNLEQRLGDHIFGQRNAIKEISQAIRIARAGIQSQERPLGIFLLAGSTGTGKTETANVLVETLYGGAHNLITFNMSEFQEAHTLSTLKGAPPGYVGYGKGGKLTEAVRRKPYSVILLDEFDKAHADIQDAFYQVFDKGWMEDAEGRRVSFRQCFILLTCNQGAEEIEQAYLTANDIKPGALKPLVYDALLRRFAPALLARVNIIPYIPLDQDALAQIASHHLARLQTRLWDEIGATLVTEGDIPGWIASRVCSHPNHGRAVEELLRQTLLPAVGNEVLKRRHEAEPLREIRLIVEETELSIEFA

SEQ ID NO: 7050 - protein, 867 aa, Lactobacillus plantarum WCFS1
MNPEQFTESLQQALQQAQQIAQTRRHQEIGVPHLFKFLTQPGELVRQIFSEAGADLDQLQTELDRELDDIAVVSGGNVQYGGSMSSSLATLMQAADAKRKALGDDYLATDTLALALMDQTGDQLTKYLNQQGITAGQVKNAVDRIRGGQRVTSRNQEDQYQALEKYGVDLVKQARQGNQDPVIGRDEEILDVIRILSRKTKNNPVLIGEPGVGKTAIVEGLAQRIVRGDVPENLKDKTLFSLDMGSLIAGAKYRGEFEERLKAVLKEIKKSDGQIIMFIDEIHNIVGAGKTEGSMDAGNLLKPMLARGELHLIGATTLDEYRQYMEKDKALERRFQKVLVAEPSVEDTISILRGLKERFEIHHGVRIHDNALVAAAKLSDRYITDRYLPDKALDLVDEASAEIRVEMNSNPTELDQVNRQLMRLEVEEAALKKETDDASVKRLADVQKELASAKEKQRTLSERWDSEKKSLQALSDKKSALDKAKHDLENAENNYDLEQAAKLQHGTIPKLEQELKAMEANDHHEDWLVEESVTPDQIANVVSRMTGIPVAKLVAGEREKLLHLADHLHERVVGQDAAVDAVSDAVLRSRAGLQDPNRPLGSFMFLGPTGVGKTELAKALAENLFDADDHMVRIDMSEYMEKESVSRLVGAAPGYVGYEEGGQLTEAVRRNPYSIVLFDEIEKAHPDVFNILLQVLDDGRLTDGQGRTVDFKNTILIMTSNLGSELLLAGVDDQGHLSADTHQQVMQLVQSRFKPEFLNRIDDIIMFTPLQLGAIEEIVVKLIDRLSARLQDREITLKISDEAKKWIAKQGYEPAYGARPLRRFITNHVETPLAKEIIAGRVAPKSTVAINLMDDHLVFENQSTQPA

SEQ ID NO: 7051 - protein, 837 aa, Lactobacillus plantarum WCFS1
MDNLFTPSAKSVLVLAQEQAKYFKHQAVGTEHLLLALAIEKNGIANKVLQQYAVSEDDIREEIERFTGYGTLSNVGKDTYLPYSPKAKEILSVAGDEAKRLGANKIGTEHLLLAMLSDESILSSRILMNLNLDLGQTRKVVLRKLGVSDAMSKRKGNAANRGGKKTEGTPTLDSLARDLTQLASEQEMDPVVGRSKEVKRVIQILSRRTKNNPVLIGEPGVGKTAIAEGLAQKIVAGDVPTDMADKRLMMLDMGSLVAGTKYRGEFEDRLKKVIDEIYNDGHVILFIDELHTLIGAGGAEGAIDASNILKPALARGELQTIGATTLNEYQKYIESDAALERRFATVMVNEPTEDEAVEILDGLRPRYEEHHRVTITDEAVDQAVKLSSRYISDRFLPDKAIDLMDEAAAKVRIDQMDQPTKLSKNQDKLAQLREDKETAIEAQDFEQAADIRKQEMQLKQRLDRIEADQDAEVTEGATPHYDLQVTGEDIAQVVAEWTGVPLTQLQKSESERLVNLEKILHERVVGQPEAVSAVARAIRRARSGLKDPSRPIGSFMFLGPTGVGKTELAKALAAAMFGSEDNMIRIDMSEYMERYSTSRLIGSAPGYVGYDEGGQLTEKVRQKPYSVVLFDEVEKAHPDVFNILLQVLDDGYLTDSKGRKVDFRNTILIMTSNLGATTLRDEKSVGFGATDKANDYNAVAATIRATLKQTFRPEFLNRIDETIVFHSLNKEELHEIVKLMSQEIVDRVGQQGIKIKITPAAIDVVAKAGFDPEYGARPIRRALQTEIEDRLSEELLTGAIKVDDQVTIGASKGTITINIKTSLRQMVVRPFLQSRRD

SEQ ID NO: 7052 - protein, 739 aa, Lactobacillus plantarum WCFS1
MLCDNCHKNEATIHLYTSVNGQRRQINLCQNCYQLLKNQEQQPNNGVGGADMAQDPFGFGGLDDIFRAMQGGVDPNNAYRQQQTPPTQPAGPNGGNRRGNNNGGGLLGQYGFNLTAQAKQGKIDPVIGRDTEINRVIEILNRRTKNNPVLIGEAGVGKTAVVEGLAQKIVSGQVPQKLLDKEIIRLDVASLVQGTGIRGQFEQRMQQLMKEVQSNPNIILFIDEIHEIMGAGNAEGGMDAGNVLKPALARGDFQLVGATTLNEYRDIEKDAALARRFQPVTVNEPSVEESIKILEGIQKKYEDYHHVKYDQDAIVAAVKLSNRYIQDRFLPDKAIDLLDEAGSRKNLTLKTVDPKTIQEKIDEAEKQKQDALKKEDYEKAAYYRDQVAKLEKAKPDESSDQPNNDTATVTVKDMEQIVEEKTSIPVGDLQAKEQAQMKTLAPDLKSTVNGQDQAVEAVSRAIRRNRIGLNGTGRPIGSFMFVGPTGVGKTELAKQLAKELFGSQDAMIRFDMSEYMEPHSVAKLIGSPPGYVGYEEAGQLTEQVRRHPYSLVLLDEVEKAHPDVMHMFLQILDDGRLTDSQGRTVSFKDTIIIMTSNAGTGDSEANVGFGAAAEGKTHDITSRLTDYFKPEFLNRFDDIIQFNALSKENLMKIVGLMIEDVNGMLANQGLHVHVTEPVEEKLVELGYNPQMGARPLRRVIQEQIEDRIADFYLDHGDVKNMVAKVEDGKIVLAAETKSE

SEQ ID NO: 7053 - protein, 704 aa, Lactobacillus plantarum WCFS1
MANFYGNDPFFNNDMDDVFNQLFRRMDNQNSERARYLVNGQSLTPDEFAQYRATGKLPQNNKTIEVSKDGKQAVKKGGILEKLGTNLTEQARDGLLDPVIGRENEIQETAEILSRRTKNNPILVGDAGVGKTAVVEGLAQAIVAGKVPETIQDKEIYSIDLSSLEAGTQYRGSFEENIKQLVKEVKAAGNIILFFDEIHQIIGTGATGGEDGGKGLADIIKPALSRGELTVIGATTQDEYRNTILKNAALARRFNDVVINEPTAADTLRILQGVKKLYEKHHHVVLPDDVLKAAVDYSIQYIPQRTLPDKAIDLIDMTAAHLAAKNSQTDVETLDQRVKKLEAAKEAAVKSEDFTKAADIKKSIEETKQKIKKTDQKEKITATIDDVAQSVERLTGIPVADMGANDIEHLKNLDKRLKSKVIGQDEAVEMVAKAIRRNRAGFSEGDQPIGSFLFVGPTGVGKTELAKQLALDMFGNKNAIIRLDMSEYADRTAVSKLIGTSAGYVGYEDNANTLTERVRRNPYSIVLLDEIEKADPQVLTLLLQVMDDGRLTDGQGNVINFKNTIIIATSNAGFGNEALSGDKQRDQSLMDKLAPFFRPEFLNRFNGIVEFSHLTKQDLSQIVDLMLADVQKTLAKKSIKLEVTKAAKDWLMEQGYDEAMGARPLRRVIEQQIRDKVTDFYLDHLDVKNLKADLVDAEIVISAA

SEQ ID NO: 7054 - protein, 809 aa, Oceanobacillus iheyensis HTE831
MMFGRFTERAQKVLALSQEEAVRLGHNNIGTEHILLGLVREGEGIAAKALQSLGLEVSKIQEEVEKLIGVGKQPTQSIHYTPRAKKVVELSQDEARKLGHSYVGTEHILLGLIREGEGVAARVLNNLGVSLNKARQQVLQLLGSNESQAGRQGRSGQQSNASTPTLDSLARDLTVSAKEGKIDPVIGRSKEIERVIQVLSRRTKNNPVLIGEPGVGKTAVAEGLAQQIIDNEVPETLRDKRVMTLDMGTVVAGTKYRGEFEDRLKKVMEEIRQAGNIILFIDELHTLIGAGGAEGAIDASNILKPSLARGELQCIGATTLDEYRKYIEKDAALERRFQPIQVDEPTLEETIQILNGLRDRYEAHHRVTITDEAIEAAASLSDRYITDRFLPDKAIDLIDEAGSKVRLRSYTVPPNLKELEQKLDEVRKEKDAAVQSQEFEKAASLRDSEQRFREELETTKNQWKEKQGQTDSEVTMEDIAAVVSTWTGVPVSKLTKDETDRLLNMEKILHDRVIGQSEAVNAVAKAIRRARAGLKDPKRPIGSFIFLGPTGVGKTELARALAEVMFADEDAMIRIDMSEYMERHATSRLVGSPPGYVGYDEGGQLTEKVRRKPYSVVLLDEVEKAHPEVFNILLQVLEDGRLTDSKGRVVDFRNTVIIMTSNVGASELKRNKYVGFALDNEEKDYKDMKSKVIEELKKAFRPEFLNRIDETIVFHSLEKEHMKDIVTLMVQQLQKRLKEQDLHLSLTDKAIEKIANEGFDPEYGARPLRRSIQKNIEDLLSEELLRGAIEKEQQVKIGLNNKGEFIVLP

SEQ ID NO: 7055 - protein, 712 aa, Oceanobacillus iheyensis HTE831
MKCQNCGQNDATINAQMQMNNQRMEIHLCHECFQAIQGNMMNSDFFSNSPFGNMDQAFANNFSQGNGGSATGTRTKQKASKGNGLIDQLAKNLTDQARSGNVDPVIGRDKEIKRVTETLNRRNKNNPVLIGEPGVGKTAIAEGLAVNIVEGNVPAKLMNKEIYLLDVASLVANTGVRGQFEERMKKLVEELQSRKDVILFIDEIHLIVGAGTAESSQMDVGNLLKPALARGDLQIIGATTLKEYRQIEKDAALERRLQPIMVNEPSFEDAVTILEGIKERYEKFHEVRYSEDVIRAFVNLSSRYIQDRHLPDKAIDLMDEVGSRLNLSNAQKDSATLQQQLDEIIKKKQEAADIEDYEKAANLRYQEIQLQKQLDKVEEGEKVLDVDISDIELIVEEKTGIPVTKMQKDEQEKMKNLSDQLSQKVIGQNEAVQKVAKAIRRSRAGLKAKQRPIGSFLFVGPTGVGKTELTKVLAEELFGSRDSMVRLDMSEYMEKHAVSKIIGSPPGYVGHEEAGQLTERIRRNPYSILLLDEIEKAHPDVQNMFLQIMEDGQLTDSQGRKVSFKDTVIIMTSNAGTGVKQVNVGFNREAHESVSTLENLSEYFKPEFLNRFDAIVNFQELAEEDLLQIIDLMLSELEATIKENKMTITISEEAKQQLVKLGYDTRFGARPLRRVIQDKIEDPLTDLILEGEDITSINVDVKEDEIVVNQAS

SEQ ID NO: 7056 - protein, 810 aa, Bacillus subtilis subsp. subtilis str. 168
MMFGRFTERAQKVLALAQEEALRLGHNNIGTEHILLGLVREGEGIAAKALQALGLGSEKIQKEVESLIGRGQEMSQTIHYTPRAKKVIELSMDEARKLGHSYVGTEHILLGLIREGEGVAARVLNNLGVSLNKARQQVLQLLGSNETGSSAAGTNSNANTPTLDSLARDLTAIAKEDSLDPVIGRSKEIQRVIEVLSRRTKNNPVLIGEPGVGKTAIAEGLAQQIINNEVPEILRDKRVMTLDMGTVVAGTKYRGEFEDRLKKVMDEIRQAGNIILFIDELHTLIGAGGAEGAIDASNILKPSLARGELQCIGATTLDEYRKYIEKDAALERRFQPIQVDQPSVDESIQILQGLRDRYEAHHRVSITDDAIEAAVKLSDRYISDRFLPDKAIDLIDEAGSKVRLRSFTTPPNLKELEQKLDEVRKEKDAAVQSQEFEKAASLRDTEQRLREQVEDTKKSWKEKQGQENSEVTVDDIAMVVSSWTGVPVSKIAQTETDKLLNMENILHSRVIGQDEAVVAVAKAVRRARAGLKDPKRPIGSFIFLGPTGVGKTELARALAESIFGDEESMIRIDMSEYMEKHSTSRLVGSPPGYVGYDEGGQLTEKVRRKPYSVVLLDEIEKAHPDVFNILLQVLEDGRLTDSKGRTVDFRNTILIMTSNVGASELKRNKYVGFNVQDETQNHKDMKDKVMGELKRAFRPEFINRIDEIIVFHSLEKKHLTEIVSLMSDQLTKRLKEQDLSIELTDAAKAKVAEEGVDLEYGARPLRRAIQKHVEDRLSEELLRGNIHKGQHIVLDVEDGEFVVKTTAKTN

SEQ ID NO: 7057 - protein, 699 aa, Bacillus subtilis subsp. subtilis str. 168
MRCQHCHQNEATIRLNMQINSVHKQMVLCETCYNELTRKPSMSMGPQSFGFPFEQAFQPKEQSAAKQSEKKGLLDELAQNITNGAKAGLIDPVIGRDDEVARVIEILNRRNKNNPVLIGEPGVGKTAIAEGLALKIAEGDVPNKLKNKELYLLDVASLVANTGIRGQFEERMKQLITELKERKNVILFIDEIHLLVGAGSAEGSMDAGNILKPALARGELQVIGATTLKEYRQIEKDAALERRFQPVMVQEPSIEQAILILQGIKDKYEAYHGVTFSDEAIKACVTLSSRYIQDRHLPDKAIDLLDEAGSKANLLIDELNDEDAAERLTAIEAEKTKALEEENYELAAKLRDEELALEKKLNSSSAHTAVTVEAEHIQEIVEQKTGIPVGKLQADEQTKMKELEAKLHERVIGQEAAVQKVAKAVRRSRAGLKSKNRPVGSFLFVGPTGVGKTELSKTLADELFGTKDAIIRLDMSEYMEKHAVSKIIGSPPGYVGHEEAGQLTEKVRRNPYSIVLLDEIEKAHPDVQHMFLQIMEDGRLTDSQGRTVSFKDTVIIMTSNAGAGEKQTKVGFQSDDSVIEEQTLIDSLSMFFKPEFLNRFDSIIEFRSLEKEHLVKIVSLLLGELEETLAERGISLNVTDEAKEKIAELGYHPSFGARPLRRTIQEWVEDEMTDLLLDNGEITSFHVILEDDKIKVRAK

SEQ ID NO: 7058 - protein, 810 aa, Aquifex aeolicus VF5
MFEKFTERARQVILRAREEALELGHSYLGSEHILLALIKDEDIPVLVLSKLGVSPEKIRKAIMGQITKGSHSGEVLFAPDAKRVIEFAVEEARILHHQFVGPEHLLIGVVREKTGLGGRILRSFGLDEYSVRREVLQLLGELPPQESQRYVSTPNLDRFSRDLTQMAREGKLDPVIGREKEIERVIQILVRRRKNNPVLLGDPGVGKTAIVEGLAQRIANKEVPEPLLNKRVVALDLAALVAGTKYRGQFEERLKNILKELEKANNVILFIDELHTLVGAGSAEGSIDASNMLKPALARGEIQVIGATTVDEYRKYIEKDGALERRFQPVYVEQPSPEDTIQILYGLKPKFEEFHKVEYTPEAIEKAVELSVKYITDRNLPDKAIDVMDEAGALVKLKATQLPPELKEIEEKIKELEKEKEKAVKEQDYEKAAKIRDEELRLRAKFETMKAKWKEEMEKNRPKVTDEDVAEVVARWTGVPVKRVHESDAEKLLHIEEELKKRVVGQDEAIKAVAKAIRRSRVGLKGKHRPIGVFMFLGPTGVGKTETAKALAEYLFGTEDALIRFDMSEYMEKHTVSRLIGAPPGYVGYEEGGQLTEAVRRRPYSVLLFDEIEKAHPDVFNIFLQIFDDGRLTDGLGRTVDFSNTIIIMTSNLGARLITGGTMGFEKKQGLLNFEEMRKNVLDQVKRTFSPEFLNRLDEIIVFRPLEKKDIEQILELQLKEINEKLKDWNVRVKLHKSFVNWIIEKEYKPEFGARSLKRALQRHVEDLLAEELIKGTLKGVEEVEIRVRNDKPYLKPVKKKEKVEALLEK

SEQ ID NO: 7059 - protein, 879 aa, Bradyrhizobium japonicum USDA 110
MNIEKYTERSRGFIQSAQSLAVREGHQQFSTLHVLKVLLDDNEGLAAGLIDRAGGNSRAILKATEDALNKVPKVSGGGAGQIYLAPELARTFDAAEKAGEKAGDSFVTVERLLLGLTLEKTSEAGTILSKGGVTPQNLNAAIEALRKGRTADSATAENAYDALKKYARDLTQAARDGKLDPVIGRDEEIRRTIQVLSRRTKNNPVLIGEPGVGKTAIAEGLALRIVNGDVPESLKDKKLLSLDLGALIAGAKYRGEFEERLKAVLQEVTGSEGTFILFIDEMHTLIGAGKGDGAMDASNLLKPALARGELHCIGATTLDEYQKHVEKDAALARRFQPIFVSEPSVEDTISILRGLKDKYEQHHGVRITDSALVASATLSNRYITDRFLPDKAIDLMDEAAARLKMQVDSKPEELDSMDREIIRLKIEQEALKKESDAGSKSRLQTLEKELVELEEKSASLTARWSAEKNKLSDAQKLKAELDGLRVELANAQRRGEFQKAGELAYGRIPELERQLADIEAKENSGEMMEEAVTANHIAQVVSRWTGVPVDKMLEGEKDKLLKMEDSLGKRVVGQAEAVHAVATAVRRSRAGLQDPNRPMGSFMFLGPTGVGKTELTKALAEYLFNDETAMVRLDMSEYMEKHSVSRLIGAPPGYVGYDEGGALTEAVRRRPYQVVLFDEIEKAHPDVFNVLLQVLDDGRLTDGQGRTVDFRNTLIIMTSNLGSEFLVNQPEGEDTSAVREQVMGMVRGHFRPEFLNRVDEIILFHRLQRSEMGRIVEIQFARLQKLLTDRKIVLTLDGAARDWLAAKGWDPAYGARPLKRVIQRYLQDPLAEMILAGDVKDGDNVAISSEGNVLTFNGKAPQTAEIAQFEAPASKRKLN

SEQ ID NO: 7060 - protein, 879 aa, Bradyrhizobium japonicum USDA 110
MTDISIEAVTGKLNRAGYDAFLQALRHAKSAGNRNVELAHWLFHILQQERNDLSLSVDHYKLDRARLLSDLAGVINGFRKNETDMPGVANSVIDLLDRGWHYATLFFGETQIRTGHLLVAGLKSNDIRRTLNNLSQEFSKVNVDALAAERRAVWAGSDEETMRPMDGSGLVGAVTEGAAQAGPKGTTPLDRFSQDLTAKAKSGEMDPILGRDEEIRQLIDVLMRRRQNNPILTGEAGVGKTAVVEGFAQRIAAGDVPPPLRGVRLCALDIGLMQAGASMKGEFEQRLRSVIDEVQSSPTPIILFIDEAHTLIGAGGAAGTGDAANLLKPPLARGTLRTIAATTWAEYRQYIEKDPALTRRFQPIQIDEPDVETCCIMLRGLLGPMEKHHGVRISDAAIVAAVNLSHRYIPSRQLPDKAVSLLDTASARVAISQSATPALIEDARVAIAAREAERSALVSDSDLGIEDDERIVAIDNDVAALKDKLTNLEADWAAEQELVKDIRGIREILSEPMEGDDPAARRAELRGKFDTLESINPEKRMVYAYVDQQSVASVVSDWTGIPVGRMMRDEIETVLKLPEILNRRVVGQSHGLTMIAKRIETSRAKLDNPSKPIGVFMLAGPSGVGKTETALALAETLYGGEQNMITINMSEFQEAHTVSTLKGAPPGYVGYGEGGRLTEAVRRKPYSVILLDEVEKAHPDVHEIFFQVFDKGTMEDGNGRRIDFKNTLIILTTNVGTDLIMGLSRDPKYRSEPEELAKMLRPELLKVFPAALLGRIVSIPYFPLSDEMLAGIARLQLDRIGRRLRDNHNAAFSYDDAVVEHIVSRCNDPDSGGRMIDNIITNTLLPELSREFLSKSLAKEEVKQARVSIENDKFAYSWN

SEQ ID NO: 7061 - protein, 931 aa, Brucella melitensis 16M
MARFSAPFLFGFSDACRSCRKRAIFPYALLRRARPCGGSSPNISRCRGTDREANGDIMNIEKYTERVRGFIQSAQTFALSSGNQQFTPEHILKVLIDDDEGLAASLVERAGGRVGDVRMGLQSALEKLPKVSGGNDQLYLSQPLAKVFSLAEELASKAGDSFVTVERLLTALAMEKSAKTSEILSAAGVTPTALNRVINDMRKGRTADSASAESNYDALKKYARDLTEDARAGKLDPVIGRDEEIRRTIQVLSRRTKNNPVLIGEPGVGKTAIAEGLALRIVNGDVPESLKDKQLMALDMGALIAGAKYRGEFEERLKAVLSEVQTAAGQIILFIDEMHTLVGAGKTDGAMDASNLLKPALARGELHCVGATTLEEYRKYVEKDAALARRFQPVFVDEPTVEDTISILRGLKEKYEQHHKVRVSDSALVAAAMLSNRYITDRFLPDKAIDLVDEAASRLRMQVDSKPEELDEIDRRIMQLKIEREALKVETDAASKDRLQRIEKELSDLEEESAELTAKWQAEKQKLGLAADLKRQLEEARNALAIAQRNGEFQKAGELAYGTIPQLEKQLADAESQENKGSLLEETVTPDHVAQVISRWTGIPVDRMLEGEREKLLRMEDEIGKRVVGQGEAVQAISKAVRRARAGLQDPNRPIGSFIFLGPTGVGKTELTKALASFLFQDDTAMVRIDMSEFMEKHSVSRLIGAPPGYVGYEEGGVLTEAVRRRPYQVILFDEIEKAHPDVFNVLLQVLDDGRLTDGQGHTVDFRNTVIIMTSNLGAEYLVNLGENDDVETVRDDVMGVVRASFRPEFLNRVDEIILFHRLRREDMGAIVDIQMQRLQYLLSDRKITLQLEDDAREWLANKGYDPAYGARPLKRVIQKEVQDPLAERILLGDILDGSLVKITAGSDRLNFRPISGAFSAAEPEREDEKA

SEQ ID NO: 7062 - protein, 831 aa, Enterococcus faecalis V583
MDELFTESAKAVLAIAQEEAKYFRHQSVGSEHLLLALVLEPNGIAGKTLRQLNTDTEDIREEIEHLSGYGTMQSPMGNNNLYLPYSPRAKQIFAYAGDEAKRLGAQKIGTEHLLLGLLRDEEILASRILVNLGLSLSKMRQLLLKKMGVSEPNGAQRRRNGQNKNAPQGTPTLDSLARDLTKLAREQSLDPVVGRGTEVRRLIQILSRRTKNNPVLVGEPGVGKTAIAEGLAQKIVNREVPEDMQGKRLMMLDMGALVAGTKYRGEFEDRLKKVVDEIYQDGQVILFIDELHTLIGAGGAEGAIDASNILKPALARGELQTIGATTLDEYQKYIEKDAALERRFARIQVAEPTPEEAEEILKGLRSRYEKHHGVEITDEALHAAVQLSIRYLNDRQLPDKAIDLMDESAAKVRLDKADQPSEINELRTEISQLITEKEEAIQNQSFESAARIRQKEKQVMEKLEELIAVKEKSLSGYSTQVTEEDVAGVVSQWTGVPLQQLEKKESERLMELETILHQRVVGQNEAVEAVSRAIRRARSGLKDPARPIGSFMFLGPTGVGKTELAKALAEAMFGSEEALIRVDMSEFMEKYSTSRLIGSPPGYVGYEEGGQLTEKIRQRPYSVILLDEVEKAHPDVFNILLQVLDDGHLTDAKGRKVDFRNTILIMTSNLGATAIREEKHVGFNVKDISKNHELMQKRIMEELKKAFRPEFLNRIDETVVFHSLKQEEIHEIVKIMSQSVVKRMAEQEVKVKITPAAIEVIGKVGFDPEYGARPIRRALQKEVEDRLSEALLSGQIQLGDKVTLGASKGKITLNVRAPKAPKTEAKELQTV

SEQ ID NO: 7063 - protein, 750 aa, Enterococcus faecalis V583
MFHSMICQNCQQNEATIHLYANVNGQRKQLDYCQSCYQKLKNQANNSPQNMGQDPFGFGSLDDLYRSLSRQMQQGNPYEQQTPPTQFGDGGNGGQPPRGGAGAGQGLLGEYGINITEAARQGDIDPVVGRDQEIKRVIEILNRRTKNNPVLIGEPGVGKTAVVEGLAQKIVDGDVPQKLLDKEVIRLDVVSLVQGTGIRGQFEERMQKLIEEITEAENVILFIDEVHEIVGAGAAGDGNMDAGNILKPALARGELQLVGATTLNEYRIIEKDAALERRMQPVQVDEPTVAETITILHGLQKRYEDYHHVKYTDEAINAAANLSNRYIQDRFLPDKAIDLLDESGSKMNLTIQLVDPKTIDKKLAEAEQQKQQASAEEDFEKAAYYRDQINKLQAMKEKQISDEETPVITEKDIEAIVEQKTGIPVGDLKEKEQTQLKNLAVDLKAHVVGQDDAVDKVAKAIRRNRVGLGKQNRPIGSFLFVGPTGVGKTELAKQLAFELFGSEDSMVRFDMSEYMEKHSVSKLIGSPPGYVGYDEAGQLTEKVRRNPYSLILLDEIEKAHPDVLHMFLQILDDGRLTDAQGRTVSFKDTIIIMTSNAGTGAVEANVGFGAAREGVTKSVLGQLNNFFTPEFLNRFDGIIEFKALSKENLMNIVSLMLEEVNGLLAKQKLHIEVPTEVKEKLVDLGYDPAMGARPLRRTIQEQIEDGIAEYYLDHPENHQLVAALDNEGKIIVTGAQEVTKTETSTSDQAE

SEQ ID NO: 7064 - protein, 862 aa, Bacteroides thetaiotaomicron VPI-5482
MNFNNFTIKSQEAVQEAVNLVQSRGQQAIEPAHILHGVMKVGENVTNFIFQKLGMNGQQVALVVDKQIESLPKVSGGEPYLSRESNEVLQKATQYSKEMGDEFVSLEHILLALLTVKSTVSTILKDAGMTEKELRNAINELRKGEKVTSQSSEDNYQSLEKYAINLNEAARSGKLDPVIGRDEEIRRVLQILSRRTKNNPILIGEPGTGKTAIVEGLAHRILRGDVPENLKNKQVYSLDMGALVAGAKYKGEFEERLKSVVNEVKKSEGDIILFIDEIHTLVGAGKGEGAMDAANILKPALARGELRSIGATTLDEYQKYFEKDKALERRFQIVQVDEPDTLSTISILRGLKERYENHHHVRIKDDAIIAAVELSSRYITDRFLPDKAIDLMDEAAAKLRMEVDSVPEELDEISRKIKQLEIEREAIKRENDKPKLEIIGKELAELKEVEKSFKAKWQSEKTLMDKIQQNKVEIENLKFEAEKAEREGDYGKVAEIRYGKLQALDKEIEDTQEKLRGMQGDKAMIKEEVDAEDIADVVSRWTGIPVSKMMQSEKDKLLHLEDELHQRVIGQDEAIEAVADAVRRSRAGLQDPKRPIGSFIFLGTTGVGKTELAKALAEFLFDDESMMTRIDMSEYQEKHSVSRLVGAPPGYVGYDEGGQLTEAIRRKPYSVVLFDEIEKAHPDVFNILLQVLDDGRLTDNKGRVVNFKNTIIIMTSNMGSSYIQSQMEKLSGSNKEEVIEETKKEVMNMLKKNIRPEFLNRIDETIMFLPLTETEIRQIVLLQIKGVQKMLAENGVELEMTDAALNFLSQVGYDPEFGARPVKRAIQRYLLNDLSKKLLSQEVDRSKAIIVDSNGDGLVFRN

SEQ ID NO: 7065 - protein, 841 aa, Bacteroides thetaiotaomicron VPI-5482
MNNQFSQRVSDIIVYSKEEANRLRSRHIGPEHLLLGMLRDGEGKAIEILSKLNTNLAAVKQQIEARLKTEADDMLLPDAEIPLSNDAAKILKMCILEARGMKSNIADTEHVLLAILRERNNMAASVLEANDVNYVKVLEQATLQPDVNSGMGFPEDDDDEEMSSPRSGGSGSEERQQQAQTASKKPANDTPVLDNFGTDMTKAAEEGRLDPVVGREKEIERLAQILSRRKKNNPILIGEPGVGKSAIVEGLALRIIQKKVSRILFDKRVVALDMTAVVAGTKYRGQFEERIRSILNELQRNPNVILFIDEIHTIVGAGSAAGSMDAANMLKPALARGEIQCIGATTLDEYRKNIEKDGALERRFQKVMVEPTTAAETLQILRNIKDKYEDHHNVNYTDEALEACVKLTDRYITDRNFPDKAIDALDEAGSRVHLTNVNVPKEIEEQEKLIEEAKSKKNEAVKSQNFELAASFRDKEKELTLQLDEMKREWENSLKENRQTVDAEEIANVISMMSGIPVQRMAQAEGIKLAGMKEDLQSKVIAQDPAIEKLVKAILRSRVGLKDPNKPIGTFMFLGPTGVGKTHLAKELAKYMFGSSDALIRIDMSEFMEKFTVSRLVGAPPGYVGYEEGGQLTEKVRRKPYSIVLLDEIEKAHPDVFNLLLQVMDEGRLTDSYGRMVDFKNTVIIMTSNIGTRQLKEFGRGVGFATQSRLDDKEFSRSVIQKALNKSFAPEFINRVDEIITFDQLSLEAITKIIDIELKGLYDRIESIGYKLVIDDEAKRFVAEKGYDVQFGARPLKRAIQTHLEDGLSELIITSSLKEKDVIQVSLNKEKGELEMKVIAS

SEQ ID NO: 7066 - protein, 866 aa, Bacillus cereus ATCC 14579
MDLNQMTTKTQEAIMSAQSLAVSHHHQEVDTVHLLLALLEEQDGLAVRIFQKMNVDIEALKQGAESLIKKKPSVTGSGAEVGKLYVTSALQQLLVRAGKEAEKLQDDYISVEHVLLAFSEEKGDINQLFTRLHITKDNLLQSLMTVRGNQRVTSQNPEATYEALEKYGRDLVAEVRAGKIDPVIGRDSEIRRVIRILSRKTKNNPVLIGEPGVGKTAIVEGLAQRIVKKDVPEGLKDRTIFALDMSALVAGAKFRGEFEERLQAVLNEIKKSEGRILLFIDELHTIVGAGKTEGAMDAGNMLKPMLARGELHCIGATTLDEYRKYIEKDPALERRFQQVLAEEPTVEDTISILRGLKERFEIYHGVNIHDRAIVAASVLSDRYISDRFLPDKAIDLVDEACATIRTEIDSMPTELDEVTRRIMQLEIEEAALGKETDRGSQERLKTLQRELSDLKEVASGMRAKWEKEKEDIHKVRDLREHLERLRRELEEAEGNYDLNKAAELRHGKIPAIEKELKEAEEMGAHNKQENRLLREEVSEEEIADIVSRWTGIPVAKLVEGEREKLLRLEQILSERVIGQEEAVSLVSDAVLRARAGIKDPNRPIGSFIFLGPTGVGKTELAKTLAQSLFDSEEQMIRIDMSEYMEKHAVSRLIGAPPGYVGYEEGGQLTEAVRRKPYSVVLLDEIEKAHPEVFNILLQMLDDGRITDSQGRTVDFKNTVIIMTSNIGSAHLLDGLEEDGSIKEESRDLVMGQLRGHFRPEFLNRVDEIILFKPLTTNEIKGIVDKIVKELQGRLADRHITVELTDAAKEFVVEAGFDPMYGARPLKRYVQRQVETKLARELIAGTITDNSHVVVDVENNELVVHVK

SEQ ID NO: 7067 - protein, 811 aa, Bacillus cereus ATCC 14579
MMFGRFTERAQKVLALSQEEAIRIGHNNIGTEHILLGLVREGEGIAAKALIALGLSPEKVQKEVEALIGRGTEASQTVHYTPRAKKVIELSMDEARKLGHSYVGTEHILLGLIREGEGVAARVLNNLGVSLNKARQQVLQLLGSNEASSGHQGGSSTNANTPTLDSLARDLTVVARENRLDPVIGRSKEIQRVIEVLSRRTKNNPVLIGEPGVGKTAIAEGLAQQIVNNEVPETLRDKRVMTLDMGTVVAGTKYRGEFEDRLKKVMDEIRQAGNIILFIDELHTLIGAGGAEGAIDASNILKPSLARGELQCIGATTLDEYRKYIEKDAALERRFQPIHVDEPSLEESTQILKGLRDRYEAHHRVSITDDAIDAAVKLSDRYITDRFLPDKAIDLIDEAASKVRLRSYTTPPNLKELEVKLEEIRKEKDAAVQSQEFEKAASLRDMEQRLREKLEDTKRQWKEQQGKENSEVTVEDIANVVSTWTRIPVSKLAQTETDKLLNLESILHDRVIGQDEAVVAVAKAVRRARAGLKDPKRPIGSFIFLGPTGVGKTELARALAESMFGDEDAMIRIDMSEYMEKHSTSRLVGSPPGYVGYEEGGQLTEKVRRKPYSVVLLDEVEKAHPDVFNILLQVLEDGRLTDSKGRTVDFRNTIVIMTSNVGAEALKRNKHLGFNVQDESRDYSDMKGKVMDELKKAFRPEFLNRIDEIIVFHMLEKKHIQEIVTLMVNQLVNRLKEQEIELHLTEGAIAAIADKGFDREYGARPLRRAIQKHVEDRLSEELLKGAIEKGQKVIFDVEGETFVIHSAEKVK

SEQ ID NO: 7068 - protein, 870 aa, Streptomyces avermitilis MA-4680
MDAELTNRSRDAINAATNRAVSEGHPDLTPAHLLLALLGGKDNENITDLLAAVDADQAAVRAGTERVLAKLPSVTGSTVAPPQPNRELLAVVADASQRAQDLGDDFLSTEHLLIGIAANGGAAGDVLSQQGASAKKLLEAFQKTRGGRRVTTPDPEGQYKALEKFGTDFTAAARDGKLDPVIGRDQEIRRVVQVLSRRTKNNPVLIGEPGVGKTAVVEGLAQRIVKGDVPESLKNKRLVALDLGAMVAGAKYRGEFEERLKTVLAEIKDSDGQIITFIDELHTVVGAGAGGDSAMDAGNMLKPMLARGELRMVGATTLDEYRERIEKDPALERRFQQVLVAEPSVEDTIAILRGLKGRYEAHHKVQIADSALVAAAALSDRYITSRFLPDKAIDLVDEAASRLRMEIDSSPVEIDELQRQVDRLKMEELAIGKETDAASRERLEKLRRDLADKEEELRGLTARWEKEKQSLNRVGELKEKLDELRGQAERAQRDGDFDTASKLLYGEIPALERDLEEASEAEEEAARDTMVKEEVGPDDIADVVGSWTGIPAGRLLEGETQKLLRMEEELGHRLIGQSEAVQAVSDAVRRTRAGIADPDRPTGSFLFLGPTGVGKTELAKALADFLFDDERAMVRIDMSEYGEKHTVARLVGAPPGYVGYEEGGQLTEAVRRRPYSVVLLDEVEKAHPEVFDILLQVLDDGRLTDGQGRTVDFRNTILILTSNLGSQFLSGHGPAEPQTSEEEKKRQVLEVVRASFKPEFLNRLDDLVVFSALNRQELERIAKLQIDRLAQRLAQRRLRLEVTDAALAWLAEEGNDPAYGARPLRRLVQTAIGDRLAKEILAGEVKDGDTVRVDAFGEGLIVGPATGKTL

SEQ ID NO: 7069 - protein, 879 aa, Streptomyces avermitilis MA-4680
MDMNRLTQKSQEALQEAQTAAGRMGHTEVDGEHLLLALLDQEDGLIPRLLQQAGTEPKELRAAVREELSHRPKATGPGAAPGQVFVTQRLARLLDAAEREAKRLKDEYVSVEHLLLALAEESSSTAAGLLLKQAGITRDSFLSALTQVRGNQRVTSANPEVAYEALEKYGRDLVLEARSGRLDPVIGRDAEIRRVTQILSRKTKNNPVLIGDPGVGKTAIVEGLAQRIVRGDVPEGLRDKTVFALDMGSLVAGAKYRGEFEERLKAVLSEVKAAEGRILLFVDELHTVVGAGAAEGAMDAGNMLKPMLARGELHMIGATTLDEYRKHIEKDAALERRFQQVLVDEPSVEDTISILRGLRERLEVFHGVKIQDTALVSAATLSHRYITDRFLPDKAIDLVDEACARLRTEIDSMPAELDEITRRVTRLEIEEAALSKESDPASKTRLEELRRELADLRGEADAKHAQWEAERQAIRRVQELRQELEQVRHEAEEAERAYDLNRAAELRYGRLQDLERRLAAEEEQLAAKQGENRLLREVVTEEEIAEIVAAWTGIPVARLQEGEREKLLRLDEILRERVIGQDEAVKLVTDAIIRARSGIRDPRRPIGSFIFLGPTGVGKTELAKTLARTLFDSEENMVRLDMSEYQERHTVSRLMGAPPGYVGYEEGGQLTEAVRRKPYSVVLFDEIEKAHTDVFNTLLQILDDGRITDAQGRTVDFRNTVIIMTSNIGSEHLLDGATAEGEIKPDARALVMGELRGHFRPEFLNRVDDIVLFKPLGERQIERIVELQFDELRQRLAERRITVELTDAGREVIAHQGYDPVYGARPLRRYISHEVETLVGRALLRGDVQDGATVRVDAEHGELVVTYDQPEDVKGAWAA

SEQ ID NO: 7070 - protein, 841 aa, Streptomyces avermitilis MA-4680
MFERFTDRARRVVVLAQEEARMLNHNYIGTEHILLGLIHEGEGVAAKALESLGISLEAVRQQVEEIIGQGQQAPSGHIPFTPRAKKVLELSLREALQLGHNYIGTEHILLGLIREGEGVAAQVLVKLGADLNRVRQQVIQLLSGYQGKETAAAGGPAEGTPSTSLVLDQFGRNLTQAARESKLDPVIGREKEIERVMQVLSRRTKNNPVLIGEPGVGKTAVVEGLAQAIVKGEVPETLKDKHLYTLDLGALVAGSRYRGDFEERLKKVLKEIRTRGDIILFIDELHTLVGAGAAEGAIDAASILKPMLARGELQTIGATTLDEYRKHLEKDAALERRFQPIQVAEPSLPHTIEILKGLRDRYEAHHRVSITDEALVQAATLADRYISDRFLPDKAIDLIDEAGSRMRIRRMTAPPDLREFDEKIAGVRRDKESAIDSQDFEKAASLRDKEKQLLAAKAKREKEWKAGDMDVVAEVDGELIAEVLATATGIPVFKLTEEESSRLLRMEDELHKRVIGQKDAVKALSKAIRRTRAGLKDPKRPGGSFIFAGPSGVGKTELSKALAEFLFGDEDALISLDMSEFSEKHTVSRLFGSPPGYVGYEEGGQLTEKVRRKPFSVVLFDEVEKAHPDIFNSLLQILEDGRLTDSQGRVVDFKNTVIIMTTNLGTRDISKGFNLGFAAQGDTKSNYERMKNKVADELKQHFRPEFLNRVDDVVVFPQLTQDDILRIVDLMITKVDERLKDRDMGIELAQSAKELLAKKGYDPVLGARPLRRTIQREIEDTLSEKILFGELRPGHIVVVDTEGEGETKTFTFRGEEKSALPDVPPIEQAAGGAGPNLSKDA

SEQ ID NO: 7071 - protein, 842 aa, Streptomyces avermitilis MA-4680
MFERFTDRARRVVVLAQEEARMLNHNYIGTEHILLGLIHEGEGVAAKALESLGISLEAVRQQVEEIIGQGQQAPSGHIPFTPRAKKVLELSLREALQLGHNYIGTEHILLGLIREGEGVAAQVLVKLGADLNRVRQQVIQLLSGYHQGKESTVEGGPAEGTPSTSLVLDQFGRNLTQAARESKLDPVIGREKEIERVMQVLSRRTKNNPVLIGEPGVGKTAVVEGLAQAIVKGEVPETLKDKHLYTLDLGALVAGSRYRGDFEERLKKVLKEIRTRGDIILFIDELHTLVGAGAAEGAIDAASILKPMLARGELQTIGATTLDEYKKYLEKDAALERRFQPIQVAEPSLPHTIEILKGLRDRYEAHHRVSITDEALVQAATLADRYVSDRFLPDKAIDLIDEAGSRMRIRRMTAPPDLREFDEKIAGVRHDKESAIDSQDFEKAASLRDKEKQLLAAKAKREKEWKTGDMDVVAEVDGELIAEVLAASTGIPVFKLTEEESSRLLRMEDELHKRVIGQKDAVKALSKAIRRTRAGLKDPKRPGGSFIFAGPSGVGKTELSRALAEFLFGDEDALISLDMSEFSEKHTVSRLFGSPPGYVGYEEGGQLTEKVRRKPFSVVLFDEVEKAHADIFNSLLQILEDGRLTDSQGRVVDFKNTVIIMTTNLGTRDISKGFNLGFAAQGDSKSTYERMKNKVADELKRHFRPEFLNRVDDVVVFPQLTRDDILAIVDLMITKVDERLKDRDMGIELAQSAKELLAQKGYDPMLGARPLRRTIQREIEDTLSEKILFGELRPGHIVVVDTEGEGETKTFTFRGEEKSALPDVPPIEQATGGDRPGSGTES

SEQ ID NO: 7072 - protein, 846 aa, Chlamydophila caviae GPIC
MFEKFTNRAKQVIKLAKKEAQRLNHNYLGTEHILLGLLKLGQGVAVNVLRNLGVDFDTAKQEVERLIGYGPEIQVYGDPALTGRVKKSFESANEEAGVLEHNYVGTEHLLLGILNQADGVALQVLENLHIDPREVRKEILKELETFNLQLPPSSSSNPRGSSSSSSKSSSLGHALGGEKSDKLSALKAYGYDLTEMFRESKLDPVIGRSAEVERLILILCRRRKNNPVLIGEAGVGKTAIVEGLAQKIISNEVPDTLRKKRLITLDLALMIAGTKYRGQFEERIKAVMDEVRKHGNILLFIDELHTIVGAGAAEGAIDASNILKPALARGEIQCIGATTIDEYRKHIEKDAALERRFQKIIVQPPSVDETIEILRGLKKKYEEHHNVAITEEALKAAATLSDQYVHGRFLPDKAIDLLDEAGARVRVNTMDQPTELMKLEAEIETTKLAKEQAIGTQEYEKAAGLRDEEKKLRERLSNMKQEWENHKEEHQIPVDEEAVAQVVSLQTGIPSARLTEAESEKLLKLEDTLRKKVIGQDQAVKSICRAIRRSRTGIKDPNRPTGSFLFLGPTGVGKTLLAQQIAIEMFGGEDALIQVDMSEYMEKFAATKMMGSPPGYVGHEEGGHLTEQVRRRPYCVVLFDEIEKAHPDIMDLMLQILEQGRLTDSFGRKIDFRHAIIIMTSNLGADLIKKSGEIGFGSRSNFDYKVIQEKIENAVKKHLKPEFINRLDESVIFRPLEKDALSEIIHLEINKLDSRLKNYQMALSIPDSVISFLVTKGHSPEMGARPLRRVIEQYLEDPLAELLLKESCRQEARKLRARLSEDRVTFERDEAQETESVAAAIPNGES

SEQ ID NO: 7073 - protein, 791 aa, Thermotoga maritima
MFNLEEYTEKAQKVMMSIQDIMTRYRQNQLSSEHILLAILEEGNNVGVELLKELNVDINRLKDEVEVFIGKYGVRVPEGASVSQIFITPDARHVIEKAREEARRMGDSKIGTEHLILGMVLSPDSTAFRILSRYGVTPERVYEAIRKIRSTGKTDEAENVEALARFTVDLTQLAREKKLMPVVDREKEIRRVIQILSRRTKNNPVLIGDPGVGKTAVVEGLAQRIVEGKVPLFLRNVRVLKLDMGRLVAGTRFRGDFEERLKRLLDELKRKKGEVILFIDEVHTVVGAGAAEGALDAANIMKPELTTGEIQIIGATTVEEYRKYIEKDRALERRFQPVMVEEPTVEQTIEILKGLRKVFEEHHHVKITDDALEAAAKLSARYITNRFLPDKAVDLIDEAAAYVRLESSYPSEELLKLEEEIKNLEDKINDAVVKGEYEEAAKLKVELQKLKNEYEEKRKKQEKVEPVVDENVVAKIVEQWTGIPVSRIMESEREKLLKLEEFIHQRLVNQEEAVKIVARTIRRARVGIKNPRRPIGVFLFLGPTGVGKTELARTLADVLFGSEDAMIRLDMSEYMEKHSVARLIGAPPGYVGYEEGGQLTEAVRKRPYSVILLDEIEKAHPDVFNILLQVFEDGRLTDGKGNTVDFRNTIIIMTSNIGSEKILEMSENGVRIEIEKELRNTFKPEFLNRIDAIVYFKPLTMEEVKKIVEIMVRQLQEILKEKNISIELTERAKEYLAEAGYVPSLGARPLRRIIELELESMIADKILEGEIKEGDRVLVDADEYGLKIERR

SEQ ID NO: 7074 - protein, 820 aa, Thermotoga maritima
MFDKFSEKTAQIFVTAQEEAKELGHSYVGTEHLLLAILKVDRSPAVELLEEMGASYSKVRSEIISMVGMGMRGFVPSPQMTPRAKRVTELAYEEAKILGSDKINPEHLLLGILREGEGIAIHILRKLGVDIATLRREIIDIYSYSSNKNLEYEEEEDYTYRSVKQLEGFGVNLTELAAKKELDPVIGREEEIERVMQVLVRRKKNNPVLIGDPGVGKTAIVEGLAQRIVAGDVPEILKNKVIFSLDVAALVAGTKYRGEFEKRMKKLLQIVTKDKNIILFIDEIHTIVGAGSAEGAIDAANILKPALARGEISCIGATTPDEYRRYIEKDAALERRFQKIYVKEPTEEETLEILKGLKRKYEAHHKVIYTDKALEAAVYLSKRYITDHYLPDKAIDVIDEAGARARLKVFVLPPELKDMKLELERIRSDKELAVLNQDYEKAAQLKEEEMELEAEYRKRYAEWRRRAETAVVKVDVDDVAEVVSSWTGVPLRKIEETEVEKLLNLEEALHQRIVAQDEAIKAVARAIRRARSGLKDPRRPIGVFLFLGPTGVGKTELAKALAEYLFGDERALIRFDMSEYMERFSVSRLIGAPPGYVGYEEGGTLTEKVRRRPFSVILFDEIEKAHPDVFNILLQIMDDGRLTDSQGREVDFRNTIIIMTSNIGSSYINKSKRTLGFVGDNNEEKEFEKIKDLVLEEVKRTFRPEFLNRIDETIIFHPLKKEHIEQIIDILLRDLRKRLSEKNMKLVLTKSAKEFLVEKGFDPVYGARPLKRAIQRYVEDPLSEEILRGKFNEGDTIVCRARKDALRFTRKGEKKEKVVQ

SEQ ID NO: 7075 - protein, 854 aa, Thermus thermophilus
MNLERWTQAAREALAQAQVLAQRMKHQAIDLPHLWAVLLKDERSLAWRLLEKAGADPKALKELQERELARLPKVEGAEVGQYLTSRLSGALNRAEGLMEELKDRYVAVDTLVLALAEATPGLPGLEALKGALKELRGGRTVQTEHAESTYNALEQYGIDLTRLAAEGKLDPVIGRDEEIRRVIQILLRRTKNNPVLIGEPGVGKTAIVEGLAQRIVKGDVPEGLKGKRIVSLQMGSLLAGAKYRGEFEERLKAVIQEVVQSQGEVILFIDELHTVVGAGKAEGAVDAGNMLKPALARGELRLIGATTLDEYREIEKDPALERRFQPVYVDEPTVEETISILRGLKEKYEVHHGVRISDSAIIAAATLSHRYITERRLPDKAIDLIDEAAARLRMALESAPEEIDALERKKLQLEIEREALKKEKDPDSQERLKAIEAEIAKLTEEIAKLRAEWEREREILRKLREAQHRLDEVRREIELAERQYDLNRAAELRYGELPKLEAEVEALSEKLRGARFVRLEVTEEDIAEIVSRWTGIPVSKLLEGEREKLLRLEEELHKRVVGQDEAIRAVADAIRRARAGLKDPNRPIGSFLFLGPTGVGKTELAKTLAATLFDTEEAMIRIDMTEYMEKHAVSRLIGAPPGYVGYEEGGQLTEAVRRRPYSVILFDEIEKAHPDVFNILLQILDDGRLTDSHGRTVDFRNTVIILTSNLGSPLILEGLQKGWPYERIRDEVFKVLQQHFRPEFLNRLDEIVVFRPLTKEQIRQIVEIQLSYLRARLAEKRISLELTEAAKDFLAERGYDPVFGARPLRRVIQRELETPLAQKILAGEVKEGDRVQVDVGPAGLVFAVPARVEA

SEQ ID NO: 7076 - protein, 508 aa, Thermus thermophilus
MNLERWTQAAREALAQAQVLAQRMKHQAIDLPHLWAVLLKDERSLAWRLLEKAGADPKALKELQERELARLPKVEGAEVGQYLTSRLSGALNRAEALMEELKDRYVAVDTLVLALAEATPGLPGLEALKGALKELRGGRTVQTEHAESTYNALEQYGIDLTRLAAEGKLDPVIGRDEEIRRVIQILLRRTKNNPVLIGEPGVGKTAIVEGLAQRIVKGDVPEGLKGKRIVSLQMGSLLAGAKYRGEFEERLKAVIQEVVQSQGEVILFIDELHTVVGAGKAEGAVDAGNMLKPALARGELRLIGATTLDEYREIEKDPALERRFQPVYVDEPTVEETISILRGLKEKYEVHHGVRISDSAIIAAATLSHRYITERRLPDKAIDLIDEAAARLRMALESAPEEIDALERKKLQLEIEREALKKEKDPDSQERLKAIEAEIAKLTEEIAKLRAEWEREREILRKLREAQHRLDEVRREIELAERQYDLNRAAELRYGELPKLEAEVEALS

SEQ ID NO: 7077 - protein, 854 aa, Cyanidium caldarium
MNIQPNTFFLKAMLTLLNIKGNNMCWAHKKNMFERFTEKAVKVIMLAQEEARRLGHNFVGTEQILLGILGEGTGLAAKALKSMGITLKDARIEVEKIIGRGSGFVAIEIPFTPRAKKILELAIEESRILTHNYVGTEHLLLGLIKEGEGVAARVLENLGVDLPKLRSNIIRMIGETSEVSVGATSGRSKVPTLEEFGTNLTQMAVEGKLDPVVGRAKEIERVVQILGRRTKNNPVLIGEPGVGKTAIAEGLAQRIINNEVPDTLEDKKVITLDVSLLVAGTKYRGEFEERLKKIMDEIRMADNVILVIDEVHTLIGAGAAEGAIDAANILKPALARGELQCIGATTLEEYRKHIEKDAALERRFQPVMVEEPTVEETIEILRGLRDRYEAHHRLKISDSAIVAAAKLSDQYIADRFLPDKAIDLVDEASSRVRLMNYKLPPSAEYLDEELRHIQKIKNELIRSGDFEEASQFREREIEVKVQMAALMKAKKEAIEEELALNPPIVNEDDIANIVSSWTGIPVSKLTKSESEKLLHMEETLHSRIVGQNEAVIAVSKAIRRARVGLKNPNRPIASFIFSGPTGVGKTELTKAMASYFFGSEEAMVRLDMSEYMERHTVSKLIGSPPGYVGYNEGGQLTEAVRKRPYTVVLFDEIEKAHPDVFNLLLQILEDGRLTDSKGRTIDFKNTLLIMTSNIGSKVIEKKGGGLGFELEENIEELQYSRMRNLVNEELKQYFRPEFLNRVDEIIVFRQLTKDEVRDIAHIMLREIFERVKQQGISLQVTERFKNLLIEEGYNPSYGARPLRRALVRLLEDSLAEEVLSGKIKEGDNAMIDVDENKQVKILLGNSNNQHAFLA

SEQ ID NO: 7078 - protein, 864 aa, Geobacter metallireducens
MIRPEKMTIKTQEALAGAQQLAARQGNGTIEPEHLLAALLEQEGGLVAPILQKVGAAPASLRSSVDALLKKLPQVSGATAQAYLSPSLNRILDGAQREADAMKDEFVSTEHLLLGFFADKQCAATRALLDGGATRENVLAALVEIRGGERVTDQSPEDKYQALTKYARDLTDLARQGKLDPVIGRDDEIRRVLQVLSRRTKNNPVLIGEPGVGKTAIVEGLAQRIVSGDVPESLKDKRLVALDMGALIAGAKYRGEFEERLKAVIKEVAKSEGKVILFIDELHTLVGAGAAEGAMDASNMLKPALARGELHCIGATTLNEYRKYIEKDAALERRFQQVYTGEPSVEDTIAILRGLKEKYETYHGIRIKDSAIIAAATLSDRYITDRFLPDKAIDLIDEAASRLRIEIDSMPTEIDEVERKIIQLEIEKQALLREQDPHALERLQKLTDELNGLQAQAAELKAHWRQEKEIIKGLSELKQQLEERKEQAKKAEREGNLARTAEIRYGEIPAIEKEMEEKKQQLEALQKEGKMLPEEVDGELVAEIVSRWTGVPVSRMMEGEADKLVHMEERLKTRVVGQNDALLLVANAIRRARSGLSDPNRPIGSFLFLGPTGVGKTETAKALAEFLFNDDQAIVRIDMSEYQEKHTVARLIGAPPGYVGYEEGGQLTEAVKRRPYSIVLFDEIEKAHAEVFNVLLQVLDDGRLTDGQGRTVDFRNTVIIMTSNLGSQWIQQYGASDYTRMKQMVTETLRESFKPEFLNRIDEVVIYHALPLERIKQIIDIQIQGLKKRLAERHITLEITDKAREYLAQEGYDPAYGARPLKRAIQRKVQDPLALMLLEGKFREGDTIRADLSHGGEGLVITKK

SEQ ID NO: 7079 - protein, 878 aa, Geobacter metallireducens
MLTVDLKALISRLNPHCSGALEGAAGLCVARGHYEVTVEHLLARLLDEPGGDLPLILRAFEVDAASVKAGITRVLDELPSGNSGKPVFSPVLLEWLQAAWLITSLDLNEERIRSGALLLALLARPLQLTAGRYVDLLMAVGRETLLSRFGTATAGSVEHAPTSVRSATSDEAPKGTTSLDRFCTDFTRQAAEGNIDPVFGRDREIGQMVDILARRRKNNPIIVGEAGVGKTAVAEGLALRIVEGDVPEALREVRLLGLDLGLLQAGAGVKGEFENRLKSVIEEVKGSPRPIILFIDEAHTIIGAGGQTGGGDAANLLKPALARGELRTIAATTWSEYKKYFEKDAALARRFQPVKLDEPDVETAVLILRGLKEKYEAAHGVTIRDDGIRAAAELSSRYLSGRQLPDKAVDLLDTAAARVKLLLTGKPGAVEEKERRIQALEREEAAMARDQLHGRPVDDERLDLLKAELLTLREELAAVTARWHREQELAAEVMALRKELSTEAEENEDRRGLKRQVTEATARLAEFQGDAPLVRIEVEPEVVARVVADWTGIPLGSLQKDRAAGVLTLEGDLRRRIKGQEPALSAVAEVLRSSAAGLKDPRQPLGVFLLVGPSGVGKTETALAVADLLFGGERFLTVINMSEFQERHTTSRLIGSPPGYVGYGEGGVLTEAVRRQPYSVVLLDEVEKAHPDVMNLFYQVFDKGMLADGEGRVIDFANTVIFLTSNLASDVITSLCCGDQAPTAEGLTSAIRPHLSRHFKPALLARMSVVPYLTLAPEYLGEIVTLKLGRVAERLRENSRTALSWTPAVTERIAARCTEVESGARTIDHILRSTLLPLLSREILPRLGTGETPEAIRLDTTADGDFAVTFDTSGGMEQ

SEQ ID NO: 7080 - protein, 53 aa, Pseudomonas aeruginosa
PEELDRLDRRLIQLKIEREALKKEDDEATRKRLAKLEEDIVKLERGYADLEEI

SEQ ID NO: 7081 - protein, 1070 aa, Azotobacter vinelandii
MPAGRTVRVSPAPFSPPTACRYCSATVPARAWRQPMPAGAGWPAACWRRPWMPWPWRRRSCWSGSVRPSDRRPSKWGPRCARPFSSIIRRLPRPSCRVETPGVSWPISTGSPASAWLPAVSRRFMAVASAPSGMSVSTPIAARRAPAVSPVWCGWPRPDRLVSRPGGFPRRFFGPWAWLLTRINSAALNPRRSSLSMLQPGRPSSMPARSFRKDDSMRIDRLTSKLQLALSDAQSVAVGLDHAAIEPLHLMQALLDQQGGSIRPLLMQVGFDINGLRQALSKELDQLPKLQNPTGDVNLSQDLARLLNQADRLAQQKGDQFISSELVLLAALDGNTRLGKLLLGQGVSKKAIENAIGNLRGGQTVNDPNAEESRQALDKYCVDMTARAEEGKLDPVIGRDDEIRRTIQVLQRRTKNNPVLIGEPGVGKTAIVEGLAQRIVNGEVPDGLRDKRLLALDMGSLIAGAKFRGEFEERLKAVLNELAKQEGRVILFIDELHTMVGAGKAEGAMDAGNMLKPALARGELHCVGATTLDEYRQYIEKDAALERRFQKVLVDEPSEEDTIAILRGLKERYEVHHGVTITDGAIIAAAKLSHRYITDRQLPDKAIDLIDEAASRIRMEIDSKPEELDRLDRRLIQLKIEREALKKETDEATKKRLAKLEEDIAKLEREYADLEEIWKSEKAEVQGSAQIQQQLEQAKLDLEAARRKGDLNRMAELQYGLIPELERKLASADGGQPRENQLLRNRVTDEEIAEVVSKWTGIPVAKMLEGEREKLLKMEELLHQRVIGQNEAVTAVANAVRRSRAGLADPNRPSGSFLFLGPTGVGKTELCKALAEFLFDTEEALVRIDMSEFMEKHSVARLIGAPPGYVGYEEGGYLTEAVRRKPYSVVLMDEVEKAHPDVFNILLQVLEDGRLTDSHGRTVDFKNTVVVMTSNLGSAQIQELAGDREAQRAAVMDAVSHHFRPEFINRIDEVVVFDPLAREQIAGIAEIQLKRLRQRLAERELSLELSDEALDKLIAVGYDPVYGARPLKRAIQRWIENPLAQQILAGQFAPGAKIFARVEGDEIVFG

SEQ ID NO: 7082 - protein, 1082 aa, Azotobacter vinelandii
MAAATGAAEGPRPRRISRPVPAPPAQPAVPQPAQAPCRPGLRGAAEQPGTRSVARPDRLAAQGPARAPEPAGRGDPRPRRAVRRRPPLAGRLRRRRPPAFPPAGAGRALPGRLAPHPAGRSQHPRSRSPQPEPGSRRRGRYPDLGRARRHPPDPRPSGAGAGRGVPAGRRRPPATRLPGRPPLRPGPGLRAAPAGQWRPAAVARSPGAAAAELERRSAPPALRGHPPLRYPTAPAGDELNMELGTLIGRLDSDCRRALERAAQRCLQRTHHYVEIEHLLLELLDIEGGDLARVLPRFGLERDTVAGEINRALELFKAGSTRTPALSPNLIGLLEDAVVHASLQNQPSIRSGLLLLALLDREERRSLLLNSASSLLRIPREALRNQLAECSRERPARPSQDKTDASAEDGFLAQYTQDLTADARAGRIDPIVGRDGEIRQSIDILLRRRQNNPILVGAPGVGKTAVVEGLALRIAAGDVPPPLQNVEVRVLDLGLLQAGAGVKGEFEQRLKGVIDGVRNAERPVILFIDEAHTLIGAGGAEGGSDAANLLKPALARGELRTLAATTWLEYKKYFEKDPALARRFQLVQVEEPDEATAVEMLRGVAAKLEQHHGVLVLDAAIQDAVKLSHRYISGRQLPDKAISVLDTACARVALGQHDVPPPLESLRHRQQALKEELDRLRREQTTGLDHRERITALEHEAAGNTVAIRELEGRWQEEREAVRALLEARRELLALSDNADASNSDEELDGRIDHLAAELLRLEAGLEAIRQDDPLVPEQVDSKAVAAVIASWTGIPVGKMLADEVHAVRTLGQRLAQRVMGQDAALATIAQRIQAYRAGLTDPQKPVGVFLLLGPTGVGKTETAYALADALYGGERNLIAINLSEYQEAHTVSQLKGAPPGYVGYGSGGVLTEAVRRRPYSVVLLDEIEKAHPDVLEAFYNVFDKGVMEDGTGLVVDFKNTVILATSNVGAELILDTPADQVGGDAFNERLRSVLLQAFRPAFLARMTVVPYRPLDTVTLESIVEAKLEKLRERYKTATGKPLELDEDIVETVLGRCASTGVRDIENLLMGEVVGKLAEWVLK

SEQ ID NO: 7083 - protein, 968 aa, Arabidopsis thaliana
MATATTTATAAFSGVVSVGTETRRIYSFSHLQPSAAFPAKPSSFKSLKLKQSARLTRRLDHRPFVVRCEASSSNGRLTQQEFTEMAWQSIVSSPDVAKENKQQIVETEHLMKALLEQKNGLARRIFSKIGVDNTKVLEATEKFIQRQPKVYGDAAGSMLGRDLEALFQRARQFKKDLKDSYVSVEHLVLAFADDKRFGKQLFKDFQISERSLKSAIESIRGKQSVIDQDPEGKYEALEKYGKDLTAMAREGKLDPVIGRDDEIRRCIQILSRRTKNNPVLIGEPGVGKTAISEGLAQRIVQGDVPQALMNRKLISLDMGALIAGAKYRGEFEDRLKAVLKEVTDSEGQIILFIDEIHTVVGAGATNGAMDAGNLLKPMLGRGELRCIGATTLDEYRKYIEKDPALERRFQQVYVDQPTVEDTISILRGLRERYELHHGVRISDSALVEAAILSDRYISGRFLPDKAIDLVDEAAAKLKMEITSKPTALDELDRSVIKLEMERLSLTNDTDKASRERLNRIETELVLLKEKQAELTEQWEHERSVMSRLQSIKEEIDRVNLEIQQAEREYDLNRAAELKYGSLNSLQRQLNEAEKELNEYLSSGKSMFREEVLGSDIAEIVSKWTGIPVSKLQQSERDKLLHLEEELHKRVVGQNPAVTAVAEAIQRSRAGLSDPGRPIASFMFMGPTGVGKTELAKALASYMFNTEEALVRIDMSEYMEKHAVSRLIGAPPGYVGYEEGGQLTETVRRRPYSVILFDEIEKAHGDVFNVFLQILDDGRVTDSQGRTVSFTNTVIIMTSNVGSQFILNNTDDDANELSYETIKERVMNAARSIFRPEFMNRVDEYIVFKPLDREQINRIVRLQLARVQKRIADRKMKINITDAAVDLLGSLGYDPNYGARPVKRVIQQNIENELAKGILRGDFKEEDGILIDTEVTAFSNGQLPQQKLTFKKIESETADAEQEEAAFSK

SEQ ID NO: 7084 - protein, 964 aa, Arabidopsis thaliana
MALRRLSKSVSSAIKAQYTLSRPSPLLRSRSLSSSPHYTSIGRPTNSFIGKINNSSITHATTTHGQLFPLSSPRRFCTTTAQVNQNEFTEMAWEGLINAFDAARESKQQIVESEHLMKALLEQKDGMARKIFTKAGIDNSSVLQATDLFISKQPTVSDASGQRLGSSLSVILENAKRHKKDMLDSYVSVEHFLLAYYSDTRFGQEFFRDMKLDIQVLKDAIKDVRGDQRVTDRNPESKYQALEKYGNDLTEMARRGKLDPVIGRDDEIRRCIQILCRRTKNNPVIIGEPGVGKTAIAEGLAQRIVRGDVPEPLMNRKLISLDMGSLLAGAKFRGDFEERLKAVMKEVSASNGQTILFIDEIHTVVGAGAMDGAMDASNLLKPMLGRGELRCIGATTLTEYRKYIEKDPALERRFQQVLCVQPSVEDTISILRGLRERYELHHGVTISDSALVSAAVLADRYITERFLPDKAIDLVDEAGAKLKMEITSKPTELDGIDRAVIKLEMEKLSLKNDTDKASKERLQKIENDLSTLKQKQKELNVQWEKEKSLMTKIRSFKEEIDRVNLEIESAEREYDLNRAAELKYGTLLSLQRQLEEAEKNLTNFRQFGQSLLREVVTDLDIAEIVSKWTGIPLSNLQQSEREKLVMLEEVLHHRVIGQDMAVKSVADAIRRSRAGLSDPNRPIASFMFMGPTGVGKTELAKALAGYLFNTENAIVRVDMSEYMEKHSVSRLVGAPPGYVGYEEGGQLTEVVRRRPYSVVLFDEIEKAHPDVFNILLQLLDDGRITDSQGRTVSFKNCVVIMTSNIGSHHILETLRNNEDSKEAVYEIMKRQVVELARQNFRPEFMNRIDEYIVFQPLDSNEISKIVELQMRRVKNSLEQKKIKLQYTKEAVDLLAQLGFDPNYGARPVKRVIQQMVENEIAVGILKGDFAEEDTVLVDVDHLASDNKLVIKKLESNASAEEMAA

SEQ ID NO: 7085 - protein, 874 aa, Arabidopsis thaliana
MAWEGLINAFDAARESKQQIVESEHLMKALLEQKDGMARKIFTKAGIDNSSVLQATDLFISKQPTVSDASGQRLGSSLSVILENAKRHKKDMLDSYVSVEHFLLAYYSDTRFGQEFFRDMKLDIQVLKDAIKDVRGDQRVTDRNPESKYQALEKYGNDLTEMARRGKLDPVIGRDDEIRRCIQILCRRTKNNPVIIGEPGVGKTAIAEGLAQRIVRGDVPEPLMNRKLISLDMGSLLAGAKFRGDFEERLKAVMKEVSASNGQTILFIDEIHTVVGAGAMDGAMDASNLLKPMLGRGELRCIGATTLTEYRKYIEKDPALERRFQQVLCVQPSVEDTISILRGLRERYELHHGVTISDSALVSAAVLADRYITERFLPDKAIDLVDEAGAKLKMEITSKPTELDGIDRAVIKLEMEKLSLKNDTDKASKERLQKIENDLSTLKQKQKELNVQWEKEKSLMTKIRSFKEEIDRVNLEIESAEREYDLNRAAELKYGTLLSLQRQLEEAEKNLTNFRQFGQSLLREVVTDLDIAEIVSKWTGIPLSNLQQSEREKLVMLEEVLHHRVIGQDMAVKSVADAIRRSRAGLSDPNRPIASFMFMGPTGVGKTELAKALAGYLFNTENAIVRVDMSEYMEKHSVSRLVGAPPGYVGYEEGGQLTEVVRRRPYSVVLFDEIEKAHPDVFNILLQLLDDGRITDSQGRTVSFKNCVVIMTSNIGSHHILETLRNNEDSKEAVYEIMKRQVVELARQNFRPEFMNRIDEYIVFQPLDSNEISKIVELQMRRVKNSLEQKKIKLQYTKEAVDLLAQLGFDPNYGARPVKRVIQQMVENEIAVGILKGDFAEEDTVLVDVDHLASDNKLVIKKLESNASAEEMAA

SEQ ID NO: 7086 - protein, 929 aa, Arabidopsis thaliana
MAMATRVLAQSTPPSLACYQRNVPSRGSGRSRRSVKMMCSQLQVSGLRMQGFMGLRGNNALDTLGKSRQDFHSKVRQAMNVPKGKASRFTVKAMFERFTEKAIKVIMLAQEEARRLGHNFVGTEQILLGLIGEGTGIAAKVLKSMGINLKDARVEVEKIIGRGSGFVAVEIPFTPRAKRVLELSLEEARQLGHNYIGSEHLLLGLLREGEGVAARVLENLGADPSNIRTQVIRMVGENNEVTANVGGGSSSNKMPTLEEYGTNLTKLAEEGKLDPVVGRQPQIERVVQILGRRTKNNPCLIGEPGVGKTAIAEGLAQRIASGDVPETIEGKKVITLDMGLLVAGTKYRGEFEERLKKLMEEIRQSDEIILFIDEVHTLIGAGAAEGAIDAANILKPALARGELQCIGATTLDEYRKHIEKDPALERRFQPVKVPEPTVDETIQILKGLRERYEIHHKLRYTDESLVAAAQLSYQYISDRFLPDKAIDLIDEAGSRVRLRHAQVPEEARELEKELRQITKEKNEAVRGQDFEKAGTLRDREIELRAEVSAIQAKGKEMSKAESETGEEGPMVTESDIQHIVSSWTGIPVEKVSTDESDRLLKMEETLHKRIIGQDEAVKAISRAIRRARVGLKNPNRPIASFIFSGPTGVGKSELAKALAAYYFGSEEAMIRLDMSEFMERHTVSKLIGSPPGYVGYTEGGQLTEAVRRRPYTVVLFDEIEKAHPDVFNMMLQILEDGRLTDSKGRTVDFKNTLLIMTSNVGSSVIEKGGRRIGFDLDYDEKDSSYNRIKSLVTEELKQYFRPEFLNRLDEMIVFRQLTKLEVKEIADILLKEVFERLKKKEIELQVTERFKERVVDEGYNPSYGARPLRRAIMRLLEDSMAEKMLAREIKEGDSVIVDVDAEGNVTVLNGGSGTPTTSLEEQEDSLPVA

SEQ ID NO: 7087 - protein, 952 aa, Arabidopsis thaliana
MAWSIALLTPPFFGPGRHVQAKEYREPRGCVMKMSSLKAPVLRIQATEYREPRGRVKMMSSLQAPLLTIQSFSGLRAPSALDYLGRPSPGFLVKYKLAKSSGREKASRCVPKAMFERFTEKAIKVIMLSQEEARRLGHNFVGTEQILLGLIGEGTGIAAKVLKSMGINLKDSRVEVEKIIGRGSGFVAVEIPFTPRAKRVLELSLEEARQLGHNYIGSEHLLLGLLREGEGVAARVLENLGADPSNIRTQVIRMVGENNEVTASVGGGSSGNSKMPTLEEYGTNLTKLAEEGKLDPVVGRQPQIERVVQILARRTKNNPCLIGEPGVGKTAIAEGLAQRIASGDVPETIEGKTVITLDMGLLVAGTKYRGEFEERLKKLMEEIRQSDEIILFIDEVHTLIGAGAAEGAIDAANILKPALARGELQCIGATTIDEYRKHIEKDPALERRFQPVKVPEPTVEEAIQILQGLRERYEIHHKLRYTDEALVAAAQLSHQYISDRFLPDKAIDLIDEAGSRVRLRHAQLPEEARELEKQLRQITKEKNEAVRSQDFEMAGSHRDREIELKAEIANVLSRGKEVAKAENEAEEGGPTVTESDIQHIVATWTGIPVEKVSSDESSRLLQMEQTLHTRVIGQDEAVKAISRAIRRARVGLKNPNRPIASFIFSGPTGVGKSELAKALAAYYFGSEEAMIRLDMSEFMERHTVSKLIGSPPGYVGYTEGGQLTEAVRRRPYTLVLFDEIEKAHPDVFNMMLQILEDGRLTDSKGRTVDFKNTLLIMTSNVGSSVIEKGGRRIGFDLDHDEKDSSYNRIKSLVTEELKQYFRPEFLNRLDEMIVFRQLTKLEVKEIADIMLKEVVARLEVKEIELQVTERFKERVVDEGFDPSYGARPLRRAIMRLLEDSMAEKMLSRDIKEGDSVIVDVDAEGSVVVLSGTTGRVGGFAAEEAMEDPIPIL

SEQ ID NO: 7088 - protein, 952 aa, Arabidopsis thaliana
MAWSIALLTPPFFGPGRHVQAKEYREPRGCVMKMSSLKAPVLRIQATEYREPRGRVKMMSSLQAPLLTIQSFSGLRAPSALDYLGRPSPGFLVKYKLAKSSGREKASRCVPKAMFERFTEKAIKVIMLSQEEARRLGHNFVGTEQILLGLIGEGTGIAAKVLKSMGINLKDSRVEVEKIIGRGSGFVAVEIPFTPRAKRVLELSLEEARQLGHNYIGSEHLLLGLLREGEGVAARVLENLGADPSNIRTQVIRMVGENNEVTASVGGGSSGNSKMPTLEEYGTNLTKLAEEGKLDPVVGRQPQIERMVQILARRTKNNPCLIGEPGVGKTAIAEGLAQRIASGDVPETIEGKTVITLDMGLLVAGTKYRGEFEERLKKLMEEIRQSDEIILFIDEVHTLIGAGAAEGAIDAANILKPALARGELQCIGATTIDEYRKHIEKDPALERRFQPVKVPEPTVEEAIQILQGLRERYEIHHKLRYTDEALVAAAQLSHQYISDRFLPDKAIDLIDEAGSRVRLRHAQLPEEARELEKQLRQITKEKNEAVRSQDFEMAGSHRDREIELKAEIANVLSRGKEVAKAENEAEEGGPTVTESDIQHIVATWTGIPVEKVSSDESSRLLQMEQTLHTRVIGQDEAVKAISRAIRRARVGLKNPNRPIASFIFSGPTGVGKSELAKALAAYYFGSEEAMIRLDMSEFMERHTVSKLIGSPPGYVGYTEGGQLTEAVRRRPYTLVLFDEIEKAHPDVFNMMLQILEDGRLTDSKGRTVDFKNTLLIMTSNVGSSVIEKGGRRIGFDLDHDEKDSSYNRIKSLVTEELKQYFRPEFLNRLDEMIVFRQLTKLEVKEIADIMLKEVVARLEVKEIELQVTERFKERVVDEGFDPSYGARPLRRAIMRLLEDSMAEKMLSRDIKEGDSVIVDVDAEGSVVVLSGTTGRVGGFAAEEAMEDPIPIL

SEQ ID NO: 7089 - protein, 928 aa, Arabidopsis thaliana
MAMATRVLAQSTPPSLACYQRNVPSRGSGRSRRSVKMMCIIFNVWLPMQGFMGLRGNNALDTLGKSRQDFHSKVRQAMNVPKGKASRFTVKAMFERFTEKAIKVIMLAQEEARRLGHNFVGTEQILLGLIGEGTGIAAKVLKSMGINLKDARVEVEKIIGRGSGFVAVEIPFTPRAKRVLELSLEATRQLGHNYIGSEHLLLGLLREGEGVAARVLENLGADPSNIRTQVIRMVGENNEVTANVGGGSSSNKMPTLEEYGTNLTKLAEEGKLDPVVGRQPQIERVVQILGRRTKNNPCLIGEPGVGKTAIAEGLAQRIASGDVPETIEGKKVITLDMGLLVAGTKYRGEFEERLKKLMEEIRQSDEIILFIDEVHTLIGAGAAEGAIDAANILKPALARGELQCIGATTLDEYRKHIEKDPALERRFQPVKVPEPTVDETIQILKGLRERYEIHHKLRYTDESLVAAAQLSYQYISDRFLPDKAIDLIDEAGSRVRLRHAQVPEEVRELEKELRQITKEKNEAVRGQDFEKAGTLRDREIELRAEVSAIQAKGKEMSKAESETGEEGPMVTESDIQHIVSSWTGIPVEKVSTDESDRLLKMEETLHKRIIGQDEAVKAISRAIRRARVGLKNPNRPIASFIFSGPTGVGKSELAKALAAYYFGSEEAMIRLDMSEFMERHTVSTLIGSLPGYVGYTEGGQLTEAVRRRPYTVVLFDEIEKAHPDVFNMMLQILEDGRLTDSKGRTVDFKNTLLIMTSNVGSSVIEKGGRRIGFDLDYDEKDSSYNRIKSLVTEELKQYFRPEFLNRLDEMIVFRQLTKLEVKEIADILLKEVFERLKKKEIELQVTERFKERVVDEGYNPSYGARPLRRAIMRLLEDSMAEKMLAREIKEGDSVIVDVDAEGNVTVLNGGSGTPTTSLEEQEDSLPVA

SEQ ID NO: 7090 - protein, 945 aa, Arabidopsis thaliana
MEVLSTSSPLTLHSHRLLSASSSSSHVTSIAASSLSSFASSYLGISLSNRTIHRFSTTPTNLRRFPQRKRKKFTPISAVFERFTERAIRAIIFSQKEAKSLGKDMVYTQHLLLGLIAEDRDPQGFLGSGITIDKAREAVWSIWDEANSDSKQEEASSTSYSKSTDMPFSISTKRVFEAAVEYSRTMDCQYIAPEHIAVGLFTVDDGSAGRVLKRLGANMNLLTAAALTRLKGEIAKDGREPSSSSKGSFESPPSGRIAGSGPGGKKAKNVLEQFCVDLTARASEGLIDPVIGREKEVQRVIQILCRRTKNNPILLGEAGVGKTAIAEGLAISIAEASAPGFLLTKRIMSLDIGLLMAGAKERGELEARVTALISEVKKSGKVILFIDEVHTLIGSGTVGRGNKGSGLDIANLLKPSLGRGELQCIASTTLDEFRSQFEKDKALARRFQPVLINEPSEEDAVKILLGLREKYEAHHNCKYTMEAIDAAVYLSSRYIADRFLPDKAIDLIDEAGSRARIEAFRKKKEDAICILSKPPNDYWQEIKTVQAMHEVVLSSRQKQDDGDAISDESGELVEESSLPPAAGDDEPILVGPDDIAAVASVWSGIPVQQITADERMLLMSLEDQLRGRVVGQDEAVAAISRAVKRSRVGLKDPDRPIAAMLFCGPTGVGKTELTKALAANYFGSEESMLRLDMSEYMERHTVSKLIGSPPGYVGFEEGGMLTEAIRRRPFTVVLFDEIEKAHPDIFNILLQLFEDGHLTDSQGRRVSFKNALIIMTSNVGSLAIAKGRHGSIGFILDDDEEAASYTGMKALVVEELKNYFRPELLNRIDEIVIFRQLEKAQMMEILNLMLQDLKSRLVALGVGLEVSEPVKELICKQGYDPAYGARPLRRTVTEIVEDPLSEAFLAGSFKPGDTAFVVLDDTGNPSVRTKPDSSTIRVTDKTSIA

SEQ ID NO: 7091 - protein, 623 aa, Arabidopsis thaliana
MNDLKFDPNVKLILASARSHAMSLSHGQVTPLHLGVTLISDLTSVFYRAITSAGDGDISAQSVVNVINQSLYKLTKRNLGDTKVGVAVLVISLLEDSQISDVLKEAGVVPEKVKSEVEKLRGEVILRALKTYGTDLVEQAGKLDPVIGRHREIRRVIEVLSRRTKNNPVLIGEPGVGKTAVVEGLAQRILKGDVPINLTGVKLISLEFGAMVAGTTLRGQFEERLKSVLKAVEEAQGKVVLFIDEIHMALGACKASGSTDAAKLLKPMLARGQLRFIGATTLEEYRTHVEKDAAFERRFQQVFVAEPSVPDTISILRGLKEKYEGHHGVRIQDRALVLSAQLSERYITGRRLPDKAIDLVDESCAHVKAQLDIQPEEIDSLERKVMQLEIEIHALEKEKDDKASEARLSEVRKELDDLRDKLEPLTIKYKKEKKIINETRRLKQNRDDLMIALQEAERQHDVPKAAVLKYGAIQEVESAIAKLEKSAKDNVMLTETVGPENIAEVVSRWTGIPVTRLDQNEKKRLISLADKLHERVVGQDEAVKAVAAAILRSRVGLGRPQQPSGSFLFLGPTGVGKTELAKALAEQLFDSENLLVRLDMSEYNDKFSVNKLIGAPPGYVHWS

SEQ ID NO: 7092 - protein, 460 aa, Arabidopsis thaliana
MNPEKFTHKTNETIATAHELAVNAGHAQFTPLHLAGALISDPTGIFPQAISSAGGENAAQSAERVINQALKKLPSQSPPPDDIPASSSLIKVIRRAQAAQKSRGDTHLAVDQLIMGLLEDSQIRDLLNEVGVATARVKSEFEKLRGKEGKKVESASGDTNFQALKTYGRDLVEQAGKLDPVIGRDEEIRRVVRILSRRTKNNPVLIGEPGVGKTAVVEGLAQRIVKGDVPNSLTDVRLISLDMGALVAGAKYRGEFEERLKSVLKEVEDAEGKVILFIDEIHLVLGAGKTEGSMDAANLFKPMLARGQLRCIGATTLEEYRKYVEKDAAFERRFQQVYVAEPSVPDTISILRGLKEKYEGHHGVRIQDRALINAAQLSARYITGRHLPDKAIDLVDEACANVRVQLDSQPEEIDNLERKRMQLEIELHALEREKDKASKARLIEVRKELDDLRDKLQPLT

SEQ ID NO: 7093 - protein, 558 aa, Arabidopsis thaliana
MAWSIALLTPPFFGPGRHVQAKEYREPRGCVMKMSSLKAPVLRIQATEYREPRGRVKMMSSLQAPLLTIQSFSGLRAPSALDYLGRPSPGFLVKYKLAKSSGREKASRCVPKAMFERFTEKAIKVIMLSQEEARRLGHNFVGTEQILLGLIGEGTGIAAKVLKSMGINLKDSRVEVEKIIGRGSGFVAVEIPFTPRAKRVLELSLEEARQLGHNYIGSEHLLLGLLREGEGVAARVLENLGADPSNIRTQVIRMVGENNEVTASVGGGSSGNSKMPTLEEYGTNLTKLAEEGKLDPVVGRQPQIERVVQILARRTKNNPCLIGEPGVGKTAIAEGLAQRIASGDVPETIEGKTVITLDMGLLVAGTKYRGEFEERLKKLMEEIRQSDEIILFIDEVHTLIGAGAAEGAIDAANILKPALARGELQCIGATTIDEYRKHIEKDPALERRFQPVKVPEPTVEGAIQILQGLRERYEIHHKLRYTDEALVAAAQLSHQYISDRFLPDKAIDLIDEAGSRVRLRHAQLPEEARELEKQLRQITKEKNEAVRKPRLRDGWFSS

SEQ ID NO: 7094 - protein, 640 aa, Arabidopsis thaliana
MEVLSTSSPLTLHSHRLLSASSSSSHVTSIAASSLSSFASSYLGISLSNRTIHRFSTTPTNLRRFPQRKRKKFTPISAVFERFTERAIRAIIFSQKEAKSLGKDMVYTQHLLLGLIAEDRDPQGFLGSGITIDKAREAVWSIWDEANSDSKQEEASSTSYSKSTDMPFSISTKRVFEAAVEYSRTMDCQYIAPEHIAVGLFTVDDGSAGRVLKRLGANMNLLTAAALTRLKGEIAKDGREPSSSSKGSFESPPSGRIAGSGPGGKKAKNVLEQFCVDLTARASEGLIDPVIGREKEVQRVIQILCRRTKNNPILLGEAGVGKTAIAEGLAISIAEASAPGFLLTKRIMSMDIGLLMAGAKERGELEARVTALISEVKKSGKVILFIDEVHTLIGSGTVGRGNKGSGLDIANLLKPSLGRGELQCIASTTLDEFRSQFEKDKALARRFQPVLINEPSEEDAVKILLGLREKYEAHHNCKYTMEAIDAAVYLSSRYIADRFLPDKAIDLIDEAGSRARIEAFRKKKEDAICILSKPPNDYWQEIKTVQAMHEVVLSSRQKQDDGDAISDESGELVEESSLPPAAGDDEPILVGPDDIAAVASVWSGIPVQQITADERMLLMSLEDQLRGRVVGQDEAVSCHI

SEQ ID NO: 7095 - protein, 265 aa, Arabidopsis thaliana
MLEQILHERIIAQDLDVESVADAIRCSKAGISDPNRLIASFMFMGQPSVVSQLVGASPGYVGYGDGGKLTEVVRRRPYSVVQFDEIEKPHLDVFSILLQLLDDGRITNSHGSLHILETIRNNEDIKEAFYEMMKQQVVELARKTFRPKFMNRIDEYIVSQPLNSSEISKIVELQMRQVKKRLEQNKINLEYTKEAVDLLAQLGFDPNNGARPVKQMIEKLVKKEITLKVLKGDFAEDGTILIDADQPNNKLVIKKMENNAHVKEN

SEQ ID NO: 7096 - protein, 319 aa, Arabidopsis thaliana
MLEQILHERIIAQDLDVESVADAIRCSKAGISDPNRLIASFMFMGQPSVVSQLVGASPGYVGYGDGGKLTEVVRRRPYSVVQFDEIEKPHLDVFSILLQLLDDGRITNSHGSLHILETIRNNEDIKEAFYEMMKQQVVELARKTFRPKFMNRIDEYIVSQPLNSSEISKIVELQVVQMRQVKKRLEQNKINLEYTKEAVDLLAQLGFDPNNGARPVKQMIEKLVKKEITLKVLKGDFAEDGTILIDADQPNNKLTDAKHEALETYGSDLTKMARQGKLPPLIGRDDEVNRCIQILCRMTESNPVIIGEPGVGKTAIVEG

SEQ ID NO: 7097 - protein, 235 aa, Arabidopsis thaliana
MLEQILHERVIAQDLDVESVADAIRCSKAGISDPNRPIASFMFMGPTSVVSQLVGASVGYVGYEDGGKSTEVVRRRPYSVVQFDEIEKPHPNVFSILLQLLDDGRITDSHGSLHILIETIRNNEDIKEAVYEMMKQQVVELARKTFKPKFMNRIDEYIVSQPLNSSVISKIVELQVVQMRQMKKRLEQPNNKLEITLNVLKGDFAENDTILIDADQPFNKLVIKKMENNAHVKQN

SEQ ID NO: 7098 - protein, 341 aa, Arabidopsis thaliana
MFERFTEKAIKVITLAQEEARRLGYNFFGTEHILLSLIGEGTGIAAKVLKSMGINLKDARVEVEKIIGRGSGFVVVEIPFTPRKACAGFVTRGSSTTRHKGIAVRVLEILGADPSNIRTQVNAPILVNSQQALVAEVMETATWQVGNTRRGKLDPVVGRQPQIKRVVQILARRTCRNNACLIGKPGVGKRAIAEGIAQRIASGDVPETIKGKMNVAGNCGWNEIRWRSRGKIEEVYGQSDDIILFIDEMHLLIGAGAVEGAIDAANILKPALERCELQYRKHIENDPALERRFQPVKVPEPTVEEAIQITTVLAKGKEVNKADNEAEEGRPTVTEADNEAE

SEQ ID NO: 7099 - protein, 173 aa, Arabidopsis thaliana
MTSNVGSQFILNNTDDDANELSYETIKERVMNAARSIFRPEFMNRVDEYIVFKPLDREQINRIVRLQLARVQKRIADRKMKINITDAAVDLLGSLGYDPNYGARPVKRVIQQNIENELAKGILRGDFKEEDGILIDTEVTAFSNGQLPQQKLTFKKIESETADAEQEEAAFSK

SEQ ID NO: 7100 - protein, 135 aa, Arabidopsis thaliana
MHYSNFCCILRSFLFRPDFFIGVSGNGITSATQAASRSRGQLLPLSLQFPSLRRFSDKANQTDAKHEALETYGSDLTKMARQGKLPPLIGRDDEVNRCIQILCRMTESNPVIIGEPGVGKTAIVEGLAERIVKGD

SEQ ID NO: 7101 - protein, 422 aa, Arabidopsis thaliana
MEDLTASVTNRTVSLPLSCVTTDFGLGVIYASKNQESKTTREKPMLVTLNSSLEHTYQKDFKSLREILSRKVAWQTEAVNAISQIICGCKTDSTRRNQASGIWLALLGPDKVGKKKVAMTLSEVFFGGKVNYICVDFGAEHCSLDDKFRGKTVVDYVTGELSRKPHSVVLLENVEKAEFPDQMRLSEAVSTGKIRDLHGRVISMKNVIVVVTSGIAKDNATDHVIKPVKFPEEQVLSARSWKLQIKLGDATKFGVNKRKYELETAQRAVKVQRSYLDLNLPVNETEFSPDHEAEDRDAWFDEFIEKVDGKVTFKPVDFDELAKNIQEKIGSHFERCFGSETHLELDKEVILQILAASWSSLSSGEEEGRTIVDQWMQTVLARSFAEAKQKYGSNPMLGVKLVASSSGLASGVELPAKVDVIW

SEQ ID NO: 7102 - protein, 979 aa, Arabidopsis thaliana
MPTPVTTARECLTEEAARALDDAVVVARRRSHAQTTSLHAVSALLAMPSSILREVCVSRAARSVPYSSRLQFRALELCVGVSLDRLPSSKSPATEEDPPVSNSLMAAIKRSQANQRRHPESYHLQQIHASNNGGGGCQTTVLKVELKYFILSILDDPIVNRVFGEAGFRSSEIKLDVLHPPVTQLSSRFSRGRCPPLFLCNLPNSDPNREFPFSGSSGFDENSRRIGEVLGRKDKKNPLLIGNCANEALKTFTDSINSGKLGFLQMDISGLSLISIEKEISEILADGSKNEEEIRMKVDDLGRTVEQSGSKSGIVLNLGELKVLTSEANAALEILVSKLSDLLKHESKQLSFIGCVSSNETYTKLIDRFPTIEKDWDLHVLPITASTKPSTQGVYPKSSLMGSFVPFGGFFSSTSNFRVPLSSTVNQTLSRCHLCNEKYLQEVAAVLKAGSSLSLADKCSEKLAPWLRAIETKEDKGITGSSKALDDANTSASQTAALQKKWDNICQSIHHTPAFPKLGFQSVSPQFPVQTEKSVRTPTSYLETPKLLNPPISKPKPMEDLTASVTNRTVSLPLSCVTTDFGLGVIYASKNQESKTTREKPMLVTLNSSLEHTYQKDFKSLREILSRKVAWQTEAVNAISQIICGCKTDSTRRNQASGIWLALLGPDKVGKKKVAMTLSEVFFGGKVNYICVDFGAEHCSLDDKFRGKTVVDYVTGELSRKPHSVVLLENVEKAEFPDQMRLSEAVSTGKIRDLHGRVISMKNVIVVVTSGIAKDNATDHVIKPVKFPEEQVLSARSWKLQIKLGDATKFGVNKRKYELETAQRAVKVQRSYLDLNLPVNETEFSPDHEAEDRDAWFDEFIEKVDGKVTFKPVDFDELAKNIQEKIGSHFERCFGSETHLELDKEVILQILAASWSSLSSGEEEGRTIVDQWMQTVLARSFAEAKQKYGSNPMLGVKLVASSSGLASGVELPAKVDVIW

SEQ ID NO: 7103 - protein, 868 aa, Mesorhizobium loti
MNLEKYSERVRGFIQSAQTMALSRNHQQFTPEHILKVLVDDDEGLAASLIERAGGNVRDVKLGVETALEAMPKVEGGNGQLYLAQPLAKVFSTAEELAKKAGDSFVTVERLLQALTMEKSAKTADILAKAGVTAQALNQVINDVRKGRTADSASAEQNYDALKKYARDLTADARAGKLDPVIGRDDEIRRTIQVLSRRTKNNPVLIGEPGVGKTAIAEGLALRIVNGDVPESLKDKQLMALDMGALIAGAKYRGEFEERLKAVLSEVTSANGNIILFIDEMHTLVGAGKADGAMDASNLLKPALARGELHCVGATTLDEYRKHVEKDPALARRFQPVFVDEPTVEDTVSILRGLKEKYEQHHKVRISDSALVAAATLSNRYIADRFLPDKAIDLVDEAASRLRMQVDSKPEALDEIDRRIMQLKIEREALKVETDDASKDRLVRLEKELVGLEEESTEITAKWQAEKQKLGLAADLKKQLDEARNELAIAQRKGEFQRAGELAYGKIPELEKKLKEAEAQDGKAGMVEEVVTPDHVAHIVSRWTGIPVDKMLQGERDKLLRMEDEIGKRVVGQGEAVQAVSKAVRRARAGLQDPNRPIGSFIFLGPTGVGKTELTKALASFLFDDDSAMVRIDMSEFMEKHSVARLIGAPPGYVGYEEGGALTEAVRRRPYQVVLFDEIEKAHPDVFNVLLQVLDDGRLTDGQGRTVDFRNTLIIMTSNLGAEYLVNLGEDQDVDAVRDEVMGVVRASFRPEFLNRVDEVILFHRLRRKDMDRIVEIQFKRLESLLVDRKITLSLDHEAIEWLAAKGYDPAYGARPLKRVMQKELQDPLAEKILLGEILDGSTVKVTSGSDRLNFRSKPTVVATEAAA

SEQ ID NO: 7104 - protein, 945 aa, Mesorhizobium loti
MEQRRSSQSFKRKELVAKLNPTGLRAFKAAADTAKMRGNPYVELVHFVQQLVLSERSDVQMIVADAGLDVSRLTADMTRAIDKLPYGATSVEEFSDHIFHAIQEGWSLATLEFGVEEVRSAHILLACLKTPALEGLVSKISAEFDKIDADGVIARFADVTEGSLEAGSPPAAAAAETPMKRGLGGDSALAKYATDLTQRARDGKIDPVIGRDPEIRQIVDILMRRRQNNPILTGEAGVGKTAVVEGFALRIAQGDVPPTLQNVSVRMLDVGLMQAGASVKGEFEKRLKAVIDEVQASETPIILFIDEAHTLIGAGGAAGTGDAANLLKPALARGELRTIAATTWAEYKQHIEKDPALTRRFQVVKIEEPSETVAVLMLRGVAGVLEQHHKVQILDEAIEASVSLSHRYIPARQLPDKAVSLLDTACARVAVSQHATPAEVEDILRRRQALEVEEGIIGREAAIGIEVVDRQARVEAGLAETETTLAAAQARWDREKALVAEILDLRAKLRGEGVPLDAVEGGEAAPGEAVDAPAATSHERKAPEAKTPKPETAEPKGSKSKSAKTKAAKMEAVAAHEPVPVPDSAADLARLRELMAELAEAQGETPLILPSVDRNAVAAVVQDWTGIPTGRMLSSQTEKALKLAATLAERVVGQDHAMEMIARRVQTSRAGLGAPEKPVGVFLLCGPSGVGKTETALALAETLYGGEQNLISINMSEFQEAHTVSTLKGAPPGYVGYGKGGILTEAVRRKPYSVILLDEVEKAHPDVHEIFFQVFDKGMMDDSEGRRIDFKNTLILLTSNVGSEVIMDRTKNGTLRTGMDDLDTALRGPLLKVFPAAFLGRVVTIPYYPLSDAMIEAITRHQFGKIARRLKATNDAELVIGDGVMDMVKARCTEIESGGRMIDAILTNTLLPELSRGVLNRSLEGKKMTKVTVGASSEGFTYSFE

SEQ ID NO: 7105 - protein, 868 aa, Sinorhizobium meliloti
MDIEKYSERVRGFLQSAQTYALAEGHQQFTPEHVLKVLLDDDQGMAASLIERAGGNAREAKVGTAAALAKLPKVTGGNGSVYLSQPLAKVFTAAEDAAKKAGDSFVTVERLLLALAIESSAATASILSKAGVTPTKLNQVINEIRKGRTADSANAEQGFDSLKKYARDLTAEAREGKLDPVIGRDDEIRRTIQVLSRRTKNNPVLIGEPGVGKTAIAEGLALRIVNGDVPESLKDKRLMALDMGALIAGAKFRGEFEERLKAVLNEVRSEGGEIILFIDEMHTLVGAGKADGAMDASNLLKPALARGELHCVGATTLDEYRKHVEKDAALARRFQPVMVEEPTVEDTISILRGLKEKYEQHHKVRISDSALVAAAALSNRYITDRFLPDKAIDLMDEAASRLRMQVDSKPEELDELDRRVIQLKIEREALKKETDVSSKDRLAKLELDLSSLEEEAAALTARWQAEKQKLGQAADLKKQLDEARNELQIAQRKGEFQRAGELAYGVIPNLEKELAEAESQDGASANPMVQEVVTPDNIAHIVSRWTGIPVDKMLEGERDKLLRMEDELAKWVVGQGDAVQAVSRAVRRSRAGLQDPNRPIGSFIFLGPTGVGKTELTKALARFLFDDETALMRIDMSEYMEKHSVARLIGAPPGYVGYEEGGALTESVRRRPYQVVLFDEIEKAHPDVFNVLLQVLDDGRLTDGQGRTVDFKNTMIIMTSNLGAEYLTALGENEDSDAVRDQVMEVVRAAFRPEFLNRVDEIILFHRLRRSEMGAIVDIQLERLRKLLSDRKITLELEDDARVFLADRGYDPAYGARPLKRAIQKYVQDPLAEKVLQGEFPDGSVIKVVAGSDRLNFKRGAGANKEAA

SEQ ID NO: 7106 - protein, 807 aa, Glycine max
  unsure (1)..(807): unsure at all Xaa locations
XAGAHFVLAFAQDKRFGKRWFGVFRISQQAQISAIGSTGGRQSVIDQEPAEKYEALEMPGKDLTAMAKAGKLDPVIGRDDEIRRCIHILSRRTKNNPVLIGEPGVGKTAISEGLAQRIVQGDVPQALMNRRLISLDMGALIAGAKYRGEFEDRLKAVLKEVTESDGQTILFIDEIHTVVGEGVXKGCKDTCKRLKCMPAQLELRYINPITISDCRFYHDKDPALERRFQQVYVDQPSVEDTISILRGLRERYELHHGVRISDSALVDAAILSDRYISGRFLPDKAIDLVDEAAAKLKMEITSKPTALDEINRSVLKLEMERLSLMNDTDKASKDRLNRLETELSLLKEKQDELTGQWEHEKSVMTNLQSIKEEIDRVNLEIQQAEREYDLNRAAELKYGSLNSLQRQLESAEKELHEYMNSGKSMLREEVTGNDIAEIVSKWTGIPISKLQQSDREKLLYLEEELHKRVVGQDPAVKAVAEAIQRSRAGLSDPHRPIASFMFMGPTGVGKTELAKALASYLFNTEEALVRIDMSEYMEKHTVSRLIGAPPGYVGYEEGGQLTETVRRRPYAVILFDEIEKAHSDVFNVFLQILDDGRVTDSQGRTVSFTNTVIIMTSNVGSQYILNTDDDTAKESAYETIKQRVMDAARSIFRPEFMNRVDEYIVFQPLDRNQISSIVRLQLERVQKRIADRKMKIQVTEAAIQLLGSLGYDPNYGARPVKRVIQQNVENELAKGILRGEFKEEDTILVDTEVTVFANGQLPQQKLVFRRVEADSNSTETEGKAFHRFCERTLLLLISPHARFHNKF

SEQ ID NO: 7107 - protein, 920 aa, Glycine max
  unsure (1)..(920): unsure at all Xaa locations
MARVLVQSTGMPGLLSGQRHGKHKGSGKSKRSVKMMSTLRMPALRMSSFSGLRTLNPMDSLSRPRHTFPLXXTTSRRERAKRCVPKAMFERFTEKAIKVIMLAQEEARRLGHNFVGTEQILLGLIGEGTGIAAKVLKSMGINLKDARVEVEKIIGRGSGFVAVEIPFTPRAKRVLEFSLEEARQLGHNYIGSEHLLLGLLREGEGVAARVLENLGADPNNIRAQVIRMVGEGADSVGATVGPGSSNNNKMPTLEEYGTNLTKLAEEGKLDPVVGRQQQIERVTQILGRRTKNNPCLIGEPGVGKTAIAEGLAQRIANGDVPETIEGKKVITLDMGLLVAGTKYRGEFEERLKKLMEEIKQSDEIILFIDEVHTLIGAGAAEGAIDAANILKPALARGELQCIGATTLDEYRKHIEKDPALERRFQPVKVPEPTVDETIQILKGLRERYEIHHKLRYTDDALVAAAQLSHQYISDRFLPDKAIDLIDEAGSRVRLQHAQLPEEARELDKEVRQIVKEKEEFVRNQDFEKAGELRDREMDLKAQISALIEKGKEMSKAESEAGDEGPMVTEVDIQHIVSSWTGIPVEKVSTDESDRLLKMEETLHKRVIGQDEAVKAISRAIRRARVGLKNPNRPIASFIFSGPTGVGKSELAKALAAYYFGSEEAMIRLDMSEFMERHTVSKLIGSPPGYVGYTEGGQLTEAVRRRPYTVVLFDEIEKAHPDVFNMMLQILEDGRLTDSKGRTVDFKNTLLIMTSNVGSSVIEKGGRKIGFDLDYDEKDSSYNRIKSLVTEELKQYFRPEFLNRLDEMIVFRQLTKLEVKEIADIMLKEVFDRLKAKEIDLSVTERFRERVVDEGYNPSYGARPLRRAIMRLLEDSMAEKMLAREIKEGDSVIVDADSDGNVIVLNGSSGAPDSLEEALPV

SEQ ID NO: 7108 - protein, 925 aa, Glycine max
  unsure (1)..(925): unsure at all Xaa locations
MARVLAQSVNVPGLVAEHRHGQQKGSGKLKRSTKMMSALRTNGLRMSGFSGLRTFNPLDTMLRPGIDFHSKVSIATSSRQARATRCVPKAXMFERFTEKAIKVIMLAQEEARRLGHNFVGTEQILLGLIGEGTGIAAKVLKSMGINLKDARVEVEKIIGRGSGFVAFLXIPFTPRLSRLPVPPLQKARQLGHNYIGXSEHLLLGLLREGEGVAARVLENLGADPTNIRTQVIRMVGESADSVTATVGSGSSGNKMPTLEEYGTNLTKLAEEGKLDPVVGRQPQIERVTQILGRRTKNNPCLIGEPGVGKTAIAEGLAQRIANGDVPETIEGKKVITLDMGLLVAGTKYRGEFEERLKKLMEEIKQSDEIILFIDEVHTLIGAGAAEGAIDAANILKPALARGELQCIGATTLDEYRKHIEKDPALERRFQPVKVPEPTVDETIQILKGLRERYEIHHKLRYTDEALVAAAQLSYQYISDRFLPDKAIDLIDEAGSRVRLQHAQLPEEARELDKEVRQIIKEKEEAVRNQDFEKAGELRDREMDLKAQISTLVEKGKEMSKAETEAGDEGPIVTEADIQHIVSSWTGIPVEKVSTDESDRLLKMEETLHKRVIGQDEAVKAISRAIRRARVGLKNPNRPIASFIFSGPTGVGKSELAKALAAYYFGSEEAMIRLDMSEFMERHTVSKLIGSPPGYVGYTEGGQLTEAVRRRPYTVVLFDEIEKAHPDVFNMMLQILEDGRLTDSKGRTVDFKNTLLIMTSNVGSSVIEKGGRKIGFDLDYDEKDSSYNRIKSLVTEELKQYFRPEFLNRLDEMIVFRQLTKLEVKEIADIMLKEVFDRLKVKDIELQVTERFRDRVVEEGYNPSYGARPLRRAIMRLLEDSMAEKMLAREIKEGDSVIVDVDSDGNVIVLNGSSGAPESLPETLPV

SEQ ID NO: 7109 - protein, 922 aa, Pisum sativum
MARVLAQSLSVPGLVAGHKDSQHKGSGKSKRSVKTMCALRTSGLRMSGFSGLRTFNHLNTMMRPGLDFHSKVSKAVSSRRARAKRFIPRAMFERFTEKAIKVIMLAQEEARRLGHNFVGTEQILLGLIGEGTGIAAKVLKSMGINLKDARVEVEKIIGRGSGFVAVEIPFTPRAKRVLELSQEEARQLGHNYIGSEHLLLGLLREGEGVAARVLENLGADPTNIRTQVIRMVGESADSVTATVGSGSSNNKTPTLEEYGTNLTKLAEEGKLDPVVGRQPQIERVTQILGRRTKNNPCLIGEPGVGKTAIAEGLAQRIANGDVPETIEGKKVITLDMGLLVAGTKYRGEFEERLKKLMEEIKQSDDIILFIDEVHTLIGAGAAEGAIDAANILKPALARGELQCIGATTLDEYRKHIEKDPDLERRFQPVKVPEPTVDETIQILKGLRERYEIHHKLRYTDEALIAAAQLSYQYISDRFLPDKAIDLVDEAGSRVRLQHAQLPEEAKELDKEVRKIVKEKEEYVRNQDFEKAGELRDKEMDLKAQISALIEKGKEMSKAETETADEGPIVTEVDIQHIVSSWTGIPVDKVSADESDRLLKMEDTLHKRIIGQDEAVQAISRAIRRARVGLKNPNRPIASFIFSGPTGVGKSELAKALAAYYFGSEEAMIRLDMSEFMERHTVSKLIGSPPGYVGYTEGGQLTEAVRRRPYTVVLFDEIEKAHPDVFNMMLQILEDGRLTDSKGRTVDFKNTLLIMTSNVGSSVIEKGGRRIGFDLDYDEKDSSYNRIKSLVTEELKQYFRPEFLNRLDEMIVFRQLTKLEVKEIADIMLKEVFQRLKTKEIELQVTERFRDRVVDEGYNPSYGARPLRRAIMRLLEDSMAEKMLAREIKEGDSVIVDVDSDGKVIVLNGSSGTPESLPEALSI

SEQ ID NO: 7110 - protein, 926 aa, Lycopersicon esculentum
MMARALVQSTNILPSVAGERAGQFNGSRKDQRTVRMLCNVKCCSSRLNNFAGLRGCNALDTLLVKSGETLHSKVAAATFVRRPRGCRFVPKAMFERFTEKAIKVIMLAQEEARRLGHNFVGTEQILLGLIGEGTGIAAKVLKSMGINLKDARVEVEKIIGRGSGFIAVEIPFTPRAKRVLELSLEEARQLGHNYIGSEHLLLGLLREGEGVAARVLENLGADPTNIRTQVIRMVGESSEAVGASVGGGTSGLKMPTLEEYGTNLTKLAEEGKLDPVVGRQAQIERVTQILGRRTKNNPCLIGEPGVGKTAIAEGLAQRIANGDVPETIEGKKVITLDMGLLVAGTKYRGEFEERLKKLMEEIKQSDEIILFIDEVHTLIGAGAAEGAIDAANILKPALARGELQCIGATTLDEYRKHIEKDPALERRFQPVKVPEPSVDETIQILKGLRERYEIHHKLHYTDEAIEAAAKLSHQYISDRFLPDKAIDLIDEAGSRVRLRHAQLPEEARELEKELRQITKEKNEAVRGQDFEKAGELRDREMDLKAQISALIDKNKEKSKAESEAGDAAGPIVTEADIQHIVSSWTGIPVEKVSTDESDRLLKMEETLHTRVIGQDEAVKAISRAIRRARVGLKNPNRPIASFIFSGPTGVGKSELAKSLATYYFGSEEAMIRLDMSEFMERHTVSKLIGSPPGYVGYTEGGQLTEAVRRRPYTVVLFDEIEKAHPDVFNMMLQILEDGRLTDSKGRTVDFKNTLLIMTSNVGSSVIEKGGRRIGFDLDFDEKDSSYNRIKSLVTEELKQYFRPEFLNRLSEMIVFRQLTKLEVKEIADIMLKEVFVRLKNKEIELQVTERFRDRVVDEGYNPSYGARPLRRAIMRLLEDSMAEKMLAGEIKEGDSVIVDVDSDGNVTVLNGTSGAPSDSAPEPILV

SEQ ID NO: 7111 - protein, 923 aa, Lycopersicon esculentum
MARALVQSTSIPSSVAGERTTKFNGSGKTKRAVTMLCNAQSSSLTLRDFTGLRGCNAIDTLVRSGETLQSKVAAATYVRRPRGCRFVPKAMFERFTEKAIKVIMLAQEEARRLGHNFVGTEQILLGLIGEGTGIAAKVLKSMGINLKDARVEVEKIIGRGSGFVAVEIPFTPRAKRVLELSLEEARQLGHNYIGSEHLLLGLLREGEGVAARVLENLGADPSNIRTQVIRMVGESNEAVGASVGGGTSGQKMPTLEEYGTNLTKLAEEGKLDPVVGRQPQIERVTQILGRRTKNNPCLIGEPGVGKTAIAEGLAQRIANGDVPETIEGKKVITLDMGLLVAGTKYRGEFEERLKKLMEEIKQSDEIILFIDEVHTLIGAGAAEGAIDAANILKPALARGELQCIGATTLDEYRKHIEKDPALERRFQPVKVPEPTVDETIQILKGLRERYEIHHKLRYTDEDLVAAAQLSYQYISDRFLPDKAIDLIDEAGSRVRLRHAQLPEEAKELEKELRQITKEKNEAVRGQDFEKAGELRDREMDLKAQITALIDKNKEVSKAESEAADTGPLVTEADIQHIVSSWTGIPVEKVSTDESDRLLKMEETLHTRIIGQDEAVKAISRAIRRARVGLKNPNRPIASFIFSGPTGVGKSELAKALAAYYFGSEEAMIRLDMSEFMERHTVSKLIGSPPGYVGYTEGGQLTEAVRRRPYTVVLFDEIEKAHPDVFNMMLQILEDGRLTDSKGRTVDFKNTLLIMTSNVGSSVIEKGGRRIGFDLDLDEKDSSYNRIKSLVTEELKQYFRPEFLNRLDEMIVFRQLTKLEVKEIADIMLKEVFERLKVKEIELQVTERFRDRVVDEGYNPSYGARPLRRAIMRLLEDSMAEKMLANEIKEGDSVIVDVDSDGNVTVLNGSSGTPSDPAPEPIPV

SEQ ID NO: 7112 - protein, 1168 aa, Oryza sativa
  unsure (1)..(1168): unsure at all Xaa locations
MWGLHFSQVLSRRSDRGGERWPAAGEGERDGRRDSGGGRGGEVAAGATASSVAVGLLRCRKSCCLHWMNYLSPDLKRGNFTDDDDELTIKLHALLGNKWNTHIKRKLLSQGIDPQTHQPVSAGTSVAAASELTTTAITVGFPSLAVAPARGSSRRKEGRLGGVFLVVVASGGGVSGGGRVSDGGELELRVEERREVVVAGRWRRGGQRLGGLVAAPSSPPRLRSGQVGMEGSLVQSAIAPTIYRRSGTARFRVRARATMMRTMPTRTLTLGGFQGLRQTNFLDSRSVIKRDFGSIVASQISRPRGLGSRGVVRAMFERFTEKAIKVIMLAQEEARRLGHNFVGTEQILLGLIGEGTGIAAKVLKSMGINLKDARVEVEKIIGRGSGFVAVEIPFTPRAKRVLELSLEEARQLGHNYIGSEHLLLGLLREGEGVAARVLESLGADPNNIRTQVIRMVGESTEAVGAGVGGGSSGQKMPTLEEYGTNLTKLAEEGKLDPVVGRQDQIERVTQILGRRTKNNPCLIGEPGVGKTAIAEGLAQRISNGDVPETIEGKKVITLDMGLLVAGTKYRGEFEERLKKLMEEIKQNDDIILFIDEVHTLIGAGAAEGAIDAANILKPALARGELQCIGATTLDEYRKHIEKDPALERRFQPVKVPEPTVDETIQILRGLRERYELHHKLRYTDDSLIAAAQLSYQYISDRFLPDKAIDLIDEAGSRVRLRHAQLPDEAKELDKELRQVTKDKNEAVRGQDFEKAGELRDREMELKAQITAIIDKSKEMVKAETESGEVGPLVTEADIQHIVSSWTGIPVEKVSSDESDRLLKMEETLHTRIIGQDEAVKAISRAIRRARVGLKNPNRPIASFIFSGPTGVGKSELAKALAAYYFGSEEAMIRLDMSEFMERHTVSKLIGSPPGYVGYTEGGQLTEAVRRRPYTVVLFDEIEKAHPDVFNMMLQILEDGRLTDSKGRTVDFKNTLLIMTSNVGSSVIEKGGRKIGFDLDYDEKDTSYNRIKSLVTEELKQYFRPEFLNRLDEMIVFRQLTKLEVKEIADIMLKEVFDRLKAKDIDLQVTEKFRDRVVDEGYNPSYGARPLRRAIMRLLEDSLAEKMLAGEVKEGDSAIVDVDSEGKVIVLNGGSGVPEPLAPALSVXLKDNIVVLELWPFLFSQLGRS

SEQ ID NO: 7113 - protein, 772 aa, Oryza sativa
  unsure (1)..(772): unsure at all Xaa locations
RGAPPXPRGVRPLAGGVPRAPPADRGWAPPAVHARPLRRDRIGSEHLLLGLVREGEGVAARVLESLGAVPSNIRTQVIRMIGETTEAVGAGVGGGSSGNKMPTLEEYGTNLTKLAEEGKLDPVVGRQPQIERVVQILGRRTKNNPCLIGEPGVGKTAIAEGLAQRISTGDVPETIEGKKVITLDMGLLVAGTKYRGEFEERLKKLMEEIKQSDEIILFIDEVHTLIGAGAAEGAIDAANILKPALARGELQCIGATTLDEYRKHIEKDPALERRFQPVRVPEPTVDETIEILRGLRERYEIHHKLRYTDDALISAAKLSYQYISDRFLPDKAIDLIDEAGSRVRLRHAQVPEEARELDKELKQITKDKNEAVRSQDFEKAGELRDREMELKAQITALIDKSKEMSKAETESGETGPLVNEADIQHIVSSWTGIPVEKVSSDESDKLLKMEETLHQRVIGQDEAVKAISRSIRRARVGLKNPNRPIASFIFAGPTGVGKSELAKALAAYYFGSEEAMIRLDMSEFMERHTVSKLIGSPPGYVGYTEGGQLTEAVRRRPYTVVLFDEIEKAHPDVFNMMLQILEDGRLTDSKGRTVDFKNTLLIMTSNVGSSVIEKGGRKIGFDLDYDEKDSSYSRIKSLVVEEMKQYFRPEFLNRLDEMIVFRQLTKLEVKEIAEIMLKEVFDRLKAKDIDLQVTEKFKERIVDEGFNPSYGARPLRRAIMRLLEDSLAEKMLAGEVKEGDSAIVDVDSEGKVIVLNGQSGLPELSTPAVTVX

SEQ ID NO: 7114 - protein, 859 aa, Oryza sativa
MERTLLNPPPRRGARVVARMGFDMFTDKAIKAIMMAQEEARRLGHHAAGSEQLLLGVIGEGTGIGAKVLRGAGLSLKAARAEVEKMAGRGPGMVPMEIKFTPAAKNVLQASQEEAHQLGHNYVGSEHLLLGLLREHGAALVVLKNFQADPSNIRSEVIRMISDTSEDHQPVSAAVGGGSSTTKIPTLLEYGTNLTKLAEEGKLDPVVGRQNQVDRVVQILGRRTKNNPCLIGEPGVGKTAIAEGLAQRIAAGNVPETIDGKTVITLDMGLLVAGTKYRGEFEERLKKLMDEVKQNGEIILFLDEVHTLVGAGAAEGAIDAANILKPALARGELQCIGATTIDEYRKHIEKDPALERRFQPVKVPEPTVDETIGILKGLRERYEIHHKVQYTDESLIAAARLSYQYISDRFLPDKAIDLVDEAGSLVRLRNAQLPDEAKELEKKLKKIMAEKSEAIRSQDFEKAGALRGEEVELKSEIMSLVDKSKEMSKAAVDSGESPGPTVTEADVQHIVSSWTGVPVEKVTVDESSRLLAMESSLHRRIVGQDEAVTAISRAIRRARVGLRDPRRPIASFIFAGPTGVGKSELAKALAAYYYGSPEAMVRLDMSEFMEKHTVAKLVGSPPGYVGYAEGGQLTEAIRRRPYAVVLFDKVEKAHPDVFNMMLQILDDGRLTDSKGRTVDFKNSLIIMTSNVGSGVIEKGGRQLGFAGDGSGDGGYGVIKNMVEEEMKRYFRPEFLNRLDEMIVFRQLTKLEVKEIAGIMLAEVTGRIGGKGIGLQVTERFKELVVEQGFDPSYGARPLRRAIMRLLEDTLTDKMLAGEICAGDSVIVDADGDGNVVVVEGHPGNKYANLLEEHSSTSRS

SEQ ID NO: 7115 - protein, 691 aa, Triticum aestivum
  unsure (1)..(691): unsure at all Xaa locations
EFGTREPQIERVVQILGRRTKNNPCLIGEPGVGKTAIAEGLAQRISSGDVPETIEGKKVITLDMGLLVAGTKYRGEFEERLKKLMEEIKQSDEIILFIDEVHTLIGAGAAEGAIDAANILKPALARGELQCIGATTLDEYRKHVEKDPALEXRRFQPVKVPEPSVDETIEILRGLRERYEIHHKLRYTDDSLIAAAKLSYQYISDRFLPDKAIDLIDEAGSRVRLRHAQVPEEARELDKELKQITKDKNEAVRGQDFEKAGELRDREMELKAQITALIDKSKEMNKAETESGETGPMVHESDIQHIVSSWTGIPVEKVSTDESDKLLKMEETLHKRVIGQDEAVKAISRSVRRARVGLKSPNRPIASFIFAGPTGVGKSELAKTLASYYFGSEEAMIRLDMSEFMERHTVSKLIGSPPGYVGYTEGGQLTEAVRRRPYSVVLFDEIEKAHPDVFNMMLQILEDGRLTDSKGRTVDFKNTLLIMTSNVGSSVIEKGGRKIGFDLDSDEKDSSYGRIKSLVIEEMKQYFRPEFLNRLDEMIVFRQLTKLEVKEIADIMLQEVFTRLKTKDINLQVTEKFKERVVDEGYNPSYGARPLRRAIMRLLEDSLAEKILGGEVKEGDSVIVDVDPEGKVIVLNGESGLPELPTPAVAVXLLVLYRIRRRLLSIYIQYSVFISFQHISLHRCGSQVRCI

SEQ ID NO: 7116 - protein, 617 aa, Triticum aestivum
  unsure (1)..(617): unsure at all Xaa locations
EFGTRVITLGXGLLVAGTKYRGEFEERLKKLMEEIKQNDDIILFIDEVHTLIGAGAAEGAIDAANILKPALARGELQCIGATTLDEYRKHIEKDPALERRFQPVKVPEPTVEESIQILRGLRERYELHHKLRYTDDALVAAAQLSYQYISDRFLPDKAIDLIDEAGSRVRLRHAQLPDEAKELDKKLRQITKDKNEAVRGQDFEKAGELRDEEMELKAQITAIIDKSKEMVKAETESGEVGPLVTEADIQHIVSSWTGIPVEKVSSDESDRLLKMEETLHTRIIGQDEAVKAISRAIRRARVGLKNPNRPIASFIFSGPTGVGKSELAKALASYYFGSEEAMIRLDMSEFMERHTVSKLIGSPPGYVGYTEGGQLTEAVRRRPYTVVLFDEIEKAHPDVFNMMLQILEDGRLTDSKGRTVDFKNTLLIMTSNVGSSVIEKGGRKIGFDLDSDEKDTSYNRIKSLVTEELKQYFRPEFLNRLDEMIVFRQLTKLEVKEIADIMLKEVFDRLKAKEIDLQVTEKFRDRVVDEGYNPSYGARPLRRAIMRLLEDSLAEKMLAGEVKEGDSAIVDVDSDGKVVVLNSGGGIAEPLEPALSAXLGTPSFYFVISAWGPGDGT

SEQ ID NO: 7117 - protein, 452 aa, Triticum aestivum
  unsure (1)..(452): unsure at all Xaa locations
XRDDEVRRCIQIFCRRTKNNPVIIGEPGVGKTAIAEGLAQRIVRGDVPEPLQNRKLISLDMGALLAGSKYRGEFEERLKAVLKEVTASNGQIILFIDEIHTVVGAGATGGAMDAGNLLKPMLGRGELRCIGATTLDEYRKYIEKDAALERRFQQVYCGEPAVEDTVSILRGLRERYEMHHGVKISDGALVAAAALSDRYITGRFLPDKAIDLVDEAAAKLKMEITSKPIELDEVDREIIRFEMEKLSLKNDTDKASRERLSKLEAELESLKQKQKNLSEHWEYEKSLMTRIKSIKEEIDRVNLEIEAAEREYNLNRAAELKYSTLLTLQKQLDEAEENLTEFQQSGKSMLQEEVTDVDIAEIVSKWTGIPVSNLQQSDREKLLLLEDVLHKRVIGQDIAVKSVANAIRRSRAGLSDPNRPIASFMFMGPTGVGKTELGKTLAEFLFNTENAX

SEQ ID NO: 7118 - protein, 442 aa, Triticum aestivum
  unsure (1)..(442): unsure at all Xaa locations
XAAWAPPRPRPSPPRRGAAAGGRRARRRPASVRCNASSRDGRITQQEFTEMAWQSIVLAPEVAKESKHQIVETEHLMKSLLEQRNGLARRIFSKAGVDNTRLLDATEKFIQRQPKVLGEDPGSMLGRDLEALIQRARNFKKEYGDSFVSVEHIVLGFADDKRFGRQLFKDFQITVEALKTAIESIRGKQNVIDQDPEGKYEALDKYGKDLTAMARQGKLDPVIGRDDEIRRCIQILSRRTKNNPVLIGEPGVGKTAIAEGLAQRIVQGXDVPQALTNRRLITLDMGALIAGAKYRGEFEDRLKAVLKEVTDSDGQVVLFIDEIHTVXVGASATSGAMDAGNLLKPMLGRGELRCIXGATTLXDEYPQYIEKDPALERRFQQVYVDQPTVEDTVSILRGLRERYELHHGVRISDSALVAAALLSDRYISGRFLPDKAIDLVDE

SEQ ID NO: 7119 - protein, 492 aa, Triticum aestivum
  unsure (1)..(492): unsure at all Xaa locations
XPRVREDAVKILLGLRENYETYHKCKFTLEAINAAVYLSARYIPDRQLPDKAIDLIDEAGSRARIESYQKKKEGQSSVLLKEPDEYWQEIKAVQAMHEVVLSNKMKYSPNENKQQNASVNTEGPHQDKAATIEEPIVVGTEEIARVASLWSGIPVQQLTADDKKILVGLDDELRKRVIGQDDAVAAISRAAKRSRVGLSDPDRPIATMLFCGPTGVGKTELTKALAASYFGSESAMLRLDMSEYMERHTVSKLIGSPPGYIGYGETGTLTEAVRRKPFTVVLLDEIEKAHPDIFNILLQIFEDGHLADSQGRRVSFKNTLIVMTSNVGSTSISNGRRSMGFXXTEDTESSRYVAVKSLVMEELKGFFRPELLNRIDETVVFRPLEQTQMLAILDILLEELKGKLLAVGIGLEVSDAMKELICREGYDKNYGARPLRRAITQLMEDVISEAILFGEYKPGDTILVDTDSKGKPCLSRLNQPPIVQVSDSTRTF

SEQ ID NO: 7120 - protein, 325 aa, Triticum aestivum
  unsure (1)..(325): unsure at all Xaa locations
XSKRVVGQAPAAEAGPPAVQRASAGLSDPNRPIASFMFMGPTGVGKTELAKALASFMFNTEDAVVRIDMSEYMEKHSVSRLIGAPPGYVGQGVPGRLAGPGRRRPCSLGLFDEIEKAHSDVFNVFLQILDDGRVTDSQGRKVSFTNSIIIMTSNVGSQYILNMDEDGETDSAYESMKKRVMDAARSVFRPEFMNRVDEYIVFKPLERKQINSIVKLQLARVQKRIADRKIKLDVSPAAIEFLGSLGYDPNYGARPVKRVLQQYVENELAKGILRGEFKDEDSISVDTQVTVPSNGKLPQQKLVFRKTNEESKPAAAQDEKFLPTV

SEQ ID NO: 7121 - protein, 309 aa, Triticum aestivum
  unsure (1)..(309): unsure at all Xaa locations
XRSPAXPPSPRTPRPAVGQDQAAPLLAHPVXRAGPGCALPVQPFPSSPVXRSAGVGKTELAKALAEQLFDSQKMLVRFYMSEFVDRGSVLRLIGAPPSYNGHEDGGQLTEKIRRRPYSVILFDEVEKADPSVLNLFVQLLDDGVLTDGKGRTVDFKNTIIIMTSNLGAEHLTAGMAGNGTMEAARDLVMHQVQKHFKPELCNRMSEIVIFEPLSRDKLKEIVKIQMKRIVARVASKGICLSVSDAALEVVLSESYNPMYGARPVKRWLLKNVMTDLSEMLVNGQVVEGSSVSIDAADDXGGSIXIRIXV

SEQ ID NO: 7122 - protein, 248 aa, Triticum aestivum
  unsure (1)..(248): unsure at all Xaa locations
XLTAEVKHGTRTQSYNKKEVTAQSRSIKAVKKGIVGPGQVAQVVSLWTGIPVAAIDQGEKEKLLHLAEKLHERVVGQDEAVNLVAQAVLRSRVGLDQPGQPIGSFLFLGSTGVGKTELAKALAEQLFDNENMLVRFDMSEYGTKGSVLRLIGAPPSYFGYDDGGQLTEKVKSHPYSVTLFDEVEKAHREVXNVFLQLLDDGLLTDGKGRTVDFXNTIIIMTSNLGSKHLAAGMVGKNTXQETHKLVMX

SEQ ID NO: 7123 - protein, 299 aa, Triticum aestivum
  unsure (1)..(299): unsure at all Xaa locations
XRIRHEDRPIAALLFCGPTGVGKTELTKALASTYFGSESAMCRLDMSEYMERHAVSKLIGSPPGYMGFGEGGTLTEAVRRKPFTVVLFDEIEKAHPDIFNILLQVFEDGHLTDSQGRRVSFKNTLIVMTSNVGSTSIFQRNDXSMGFQTQNDTEENTYAVMKSLVMEELKAFFRPELLNRMDEVVVFRPLEKTEMLAILKRILEEGKGRLLALGIGLVVCGAMGCRRSEPGXXRSXGARXPLRRAVTRLVEEVVSEAIGCGQYKRGDTLRMDTDGKGQPCXXSRLNGQTVQVSDPTPTL

SEQ ID NO: 7124 - protein, 257 aa, Triticum aestivum
  unsure (1)..(257): unsure at all Xaa locations
XEFEERLKKLMEEIKQSDDIILFIDEVHTLIGAGAAEGAIDAANILKPALARGELQCIGATTLDEYRKXHIEKDPALERRFQPVKVPEPTVDETIQILRGLRERYELHHKLQYTDDALVAAAKLSYQYISDRFLPDKAIDLIDEAGSRVRLRHAQLPDEAKELNKELRQVTKDKNEAVRGQEFEKAGELRDREMXELKAQITAIIDKSKEMVKAESESGEVGPLVTEADIQHIVSSWTGIPVEKVSADESDRLLKMX

SEQ ID NO: 7125 - protein, 297 aa, Triticum aestivum
  unsure (1)..(297): unsure at all Xaa locations
GCRRVFEVAVELSRNMGCSFISPEHLAIALFTLDDPTTNNLLRSLGADPSQLASVAVTRLHEELAKDGRDPGASSLKVPEKAPAGAGAGRSAFSKSLSKKKDKGALDQFCLDLTTQASGGFIDPIIGREEEIERVVQIICRRTKNNPILLGEAGVGKTAIAEGLALRIANGDVPIFLVAKRIMSLDIGLLIAGAKERGELESRITSLIREVREAGDVILFIDEVHNLVGSGTAGKGKGAGLDISNLLKPPLARGELQCIAATTLDEHRMHFEKDKALNRRFQPVSVDEPSQXDAVKI

SEQ ID NO: 7126 - protein, 149 aa, Triticum aestivum
  unsure (1)..(149): unsure at all Xaa locations
XSEIRRSLLFLITPPRSDPVIGRDDDIDRVICILCRRSKNCAALVGPAGVGKTAIVEGLARRIAAGTVPEALAGARVAELDVGAMVAGTHWRGMFEQRLKDAIKKAEDSAGKLILFIDEMHMIIGAGDQRGAGDAANILKPALARGXXX

SEQ ID NO: 7127 - protein, 153 aa, Triticum aestivum
  unsure (1)..(153): unsure at all Xaa locations
XIDLIDEACTFIARKMKQIEKSSSTNRVKKAIVDPNDVAQVVSRWTGIPVATLCEEEKDKLIHIGDRLHERVIGQDEAVNLVAQAVLRSRAGLDQPSQPTGSFLFLGPSGVGKTELAKALAEQLFDSEKMLVRVDMSEYATAGSVTRLIGAPX

SEQ ID NO: 7128 - protein, 126 aa, Triticum aestivum
  unsure (1)..(126): unsure at all Xaa locations
XILCRRTKNCAALVGEAGVGKTAIIEGLTQRIASGKVPASLAGARVVEVDLGAMLAGTSLRGMFEERIKDVIKSAEDGDGKVILFIDEMHMLLGAGDDVSGTDAANLLKPALARGLIRCVGATTLX

SEQ ID NO: 7129 - protein, 211 aa, Triticum aestivum
  unsure (1)..(211): unsure at all Xaa locations
XGMGCKFISPDXIALGLFDLDDPTTNSILKSLGVVPTQLAKQALTRVKGELAKDGREPLGLSSFKLRDKSTGTAIAKYSNKKKEKSALAQFCIDLTMRASGGFIDPVIGRTKEIERVVQIICRRTKNNPILLGEAGVGKTAIAEGLALKIANGDVPIFLVGKRILSLDVALLMAGAKERGELEARVTSLIREVRKADDVILFIDEVHTLIX

SEQ ID NO: 7130 - protein, 138 aa, Triticum aestivum
  unsure (1)..(138): unsure at all Xaa locations
YYDRKAALRTYGRHMTGQAXXGPVVGRDDEIDRVISILCRKTKNCAALVGPAGVGFTAIAEGLVQRIATGKVPAALAGARVVEVDLGAMVAGTRYRGMFEERMKSVINQAEKAIGKIILFIDEMHMLLGAGAGRGVTX

SEQ ID NO: 7131 - protein, 167 aa, Triticum aestivum
  unsure (1)..(167): unsure at all Xaa locations
XVDGDTDKXTSRDRLSRIEAELSLLKERQKGLTEQWEREKSVMTKIQSIKEEIDRLNVEIQQAEREYDLNRAAELKYGSLNALQRDLQKTEDELNEYQSSGKSMLREEVTQDDIAEIVSRWTGIPVSKLKQSDREKLLYLEDELHKRVVGQDPAVKAVAEAIQRSRA

SEQ ID NO: 7132 - protein, 173 aa, Triticum aestivum
  unsure (1)..(173): unsure at all Xaa locations
VDRPPERDAAKEAIVSPNHVAQVVSQWTGDSCRCAXPRGEAYSCLRSYGRDMTCSKQAANPVVGRDSEIDRVVSILCRKTKNCAALVGAAGVGKTAIAEGLAQRIAAGKVPAALAGARVVEVDLAAMVSGTLFRGMFEERIKSVIKQAEDSGGKIVLFIDEMHMLLGAGDGLG

SEQ ID NO: 7133 - protein, 115 aa, Triticum aestivum
  unsure (1)..(115): unsure at all Xaa locations
PTRTDAGPLLKPMLVRGVLPCIGATSLDEFRKYIEIDPALERRFEHVPADQPTVEDPVXLLRRLHERYELHHGVRILDSAVVAADLLSDRHIRGRFSPDKAIDSVDESAAEMTLE

SEQ ID NO: 7134 - protein, 295 aa, Triticum aestivum
  unsure (1)..(295): unsure at all Xaa locations
XMLVSKIKSLLGSGVLQAPTAAGRAFASLLAPARAARGSQGSASPARAHRRRPGDAAFALPPRLLPVVGXGPTLVVAGDGVLGLRAGEGAWHKCKYTLEGINAAVYLSVRYIPDRHLPDKAIDLIDEAGSRARMESFKKKKEEQCSIILKSPDEYWQEIRAVQAMHEVALTNRLKYSLNENDQENEVNVEVLDDSKTSPTATPSASADEPSVVGLEEIARVTSLWSGIPVQQLTADERKLLVGLDDELRKRVIGQDDAVVAISRAVKRSRTGMSDPDRPIATLLFCGPTRVGKTX

SEQ ID NO: 7135 - protein, 232 aa, Triticum aestivum
  unsure (1)..(232): unsure at all Xaa locations
XXMVXAGELRSQRLELKNSRIMSLVDNSNEVSQPEVESVASAGAMVRKANMQXHIVPSRSSVAVEKVSVDESNQSFKMEETLLGRVAGQAEAVRAIGRAIPRARVGLRTPSRPVASFNFASPPGVGKSELAKALATSYCGLEEAMVQLHMSEFMEQHTVAKLIGPPLGYVSCGRAGAMXVEGKDDGSKIRLVRKAAGEGRGEIWWRQLEMAKGRDAASSSSGQPSSLEPPAP

SEQ ID NO: 7136 - protein, 128 aa, Triticum aestivum
  unsure (1)..(128): unsure at all Xaa locations
GSATVEAPSRGNIESTSGSSLSADEPIVVGTEEIARVASLWSGIPVQQLTADDKKLLVXLDDELRKRVIGQDDAVVAISRAVKRSRVGLNDPDRPIATLLFCGPTGVGKTELTKALAACYFGSESAMX

SEQ ID NO: 7137 - protein, 105 aa, Triticum aestivum
  unsure (1)..(105): unsure at all Xaa locations
XIRLEEYGTNLTKLANDGKLDPVVGREPQIEPVVHILGKRTKNNPCLIGEPLVAXTAIAYRLAXRMCSGYLPVTIYGKMVITLDMGLIDAGTNYRGEFDERMKKL

SEQ ID NO: 7138 - protein, 146 aa, Triticum aestivum
IRTRAARSVFRPEFMNRVDEYIVFKPLEREQINSIVKLQLARVQKRIADRKIKLEVSPGAIEFLGSLGYDPNYGARPVKRVIQQYVENELAKGILRGDFKDEDSIFVDTQVTVPSNGQLPQQKLVFRKVGEQSKAAAEDEKFLPAV

SEQ ID NO: 7139 - protein, 159 aa, Triticum aestivum
  unsure (1)..(159): unsure at all Xaa locations
SKDAVYEVMKKQVTEIARQTFRPEFLNRIDEYIVFQPLDSTEINRIVEIQLNRVKNRLLQQKIPLQYTPEAVEHFGAFGFDPKYGARPVKRVIQQMVENEIAFGVLKGDFKEDDTVVVDVSSVSXSQRLCSKKAAGPSEGRKRKPRVGCQGRKHRVGRQ

SEQ ID NO: 7140 - protein, 151 aa, Triticum aestivum
  unsure (1)..(151): unsure at all Xaa locations
XDLDYDEKDTTYNRIKSLVTEELKQYFRPEFLNRLDEMIVFRQLTKLEVKEIADIMLKEVFDRLKVKEIDLQVTERFRDRVVDDGYNPSYGARPLRRAIMRLLEDSLAEKMLAGEVKEGDSAIVDVDSEGKVIVLNGGNGVLEPLTPILST

SEQ ID NO: 7141 - protein, 131 aa, Triticum aestivum
  unsure (1)..(131): unsure at all Xaa locations
EFGTRDDGRITDSQGRTVSFTNCVIIMTSNIGSPLILDTLRNTTDSKDAVYEVMKKQVTEIARQTFRPEFLNRIDEYIVFQPLDSTEINRIVEIQLNXRVKNRLLQXRKIHLQYTPEGXVEHXGAXGFDPX

SEQ ID NO: 7142 - protein, 221 aa, Triticum aestivum
  unsure (1)..(221): unsure at all Xaa locations
VIIMTSNIGADHLLKGIKGSSTSMEQAHGKVMEEVKGHFHPELLNRLDKIVIFDPLSHKQLRKVARRHMKDVEARLAERRVALVITDDALHVILSQPHDPGHGARPIKGWIEDNIVTVLSVMLINEEIAENSTVYVDAAPNKNELTYRVDKDGGVVNAQAGHESDIVIYVPSGSGAIGKXGYVRGRHIHGPGHLPMNSRGQLPLNSQVTYMRIDFDPVIAM

SEQ ID NO: 7143 - protein, 320 aa, Triticum aestivum
  unsure (1)..(320): unsure at all Xaa locations
MAGTLVLPVALEITFAGRTGGRHCKSHGTRRTPSMLAMSLNRPVRMAAFVGLRSVHSFSAMRSSNFRSTVASYRFSRQGRRASFVTRAMFERFTEKAIKVIMLAQEEARRLGHNFVGTEQVLLGLVGEGTGIAAKVLKSMGINLKDARVEVEKIIGRGNGFVAVEIPFTPRAKRVLELSLEEARQLGHNYIGSEHLLLGLLREGEGVXAARVLXESLGADPSNIRTQVVRMIGXDNRSXXGAGVGGGXTSGNKMPTLEXEYGTNLTKLAEEGKLDPVVGREPQIARLLLWLGQTTXXXVIGPGVGNTXAKASTILCXCLT

SEQ ID NO: 7144 - protein, 978 aa, Zea mays
  unsure (1)..(978): unsure at all Xaa locations
MAAAPPLSADVLSFLTSAPAAPTPVVAAAWGAARAGPVRGKAALRTTRGGRGGVLAPLNSARVGRRPRRTPLSVRCNATSRDGRITQQEFTEMAWQAIVSSPEVAKESKHQIVETEHLMKSLLEQRNGLARRIFSKAGVDNTRLLDATKKFIQRQPKVLGEEPGSMLGRDLEALIQRARDFKKEYGDSYVSVEHLVFGFAEDKRFGTQLFKDFQITVKTLKSAIESIRGKQNVIDQDPEGXYEALEKYGKDLTAMARQGKLDPVIGRDDEIXRRCIQILSRRTKNHPVLIGEPGVGKTAIAEGLAQRIVQGDVPQALTNRRLIALDMGALIAGAKYRGEFEDRLKAVLKEVTDSDGQTVLFIDEIHTVVGAGATNGAMDAGNLLKPMLGRGELRCIGATTLDEYRKYIEKDPALERRFQQVFVDQPSVEDTISILRGLRERYELHHGVRISDSALVAAAVLSDRYISGRFLPDKAIDLVDESAAKLKMEITSKPTALDEIDRAVLKLEMERLSLTNDTDKASRGRLSRLEAELSLLKDKQRQLTEQRGLPRARPTKILSIKEEIDRVNVEIQQAEREYDLNRAAELKYGSLNALQRQLQATEKELDEYQSSGKSMLREEVTQDDIAEIVSRWTGIPVSKLKQSDREKLLYLEDELHKRVVGQDPAVKAVAEAIQRSRAGLSDPNRPIASFMFMGPTGVGKTELAKALAAFMFNTEEAVVRIDMSEYMEKHSVSRLIGAPPGYVGYEEGGQLTEAVRRRPYSVVLFDEIEKAHSDVFNVFLQILDDGRVTDSQGRKVSFTNTIIIMTSNVGSQYILNMDEDGSSDSAYENIKRRVMDAARSVFRPEFMNRVDEYIVFKPLEREQINSIVKLQLARVQKRIADRKIKLEVSPGAIEFLGSLGYDPNYGARPVKRVIQQHVENELAKGILRGDFKDEDSIFVDTQVTVPSNGQLPQQKLVFRKVGEQSKPAAEGEKFLPAV

SEQ ID NO: 7145 - protein, 912 aa, Zea mays; identical to SEQ ID NO: 424

SEQ ID NO: 7146 - protein, 912 aa, Zea mays; identical to SEQ ID NO: 424

SEQ ID NO: 7147 - protein, 912 aa, Zea mays; identical to SEQ ID NO: 424

SEQ ID NO: 7148 - protein, 912 aa, Zea mays; identical to SEQ ID NO: 424

SEQ ID NO: 7149 - protein, 912 aa, Zea mays; identical to SEQ ID NO: 424

SEQ ID NO: 7150 - protein, 922 aa, Zea mays
  unsure (1)..(922): unsure at all Xaa locations
MAGTLLQSVALGTPFGGRMRTHCWRSHGTRRPASMLAVSLSRPVKMSAFVGLRSVHSFSVTPTVSNSRSAVASYRSSRQTRRSRFVTRAMFERFTEKAIKVIMLAQEEARRLGHNFVGTEQILLGLIGEGTGIAAKVLKSMGINLKDARVEVEKIIGRGNGFVAVEIPFTPRAKRVLELSLEEARQLGHNYIGSEHLLLGLLREGEGVAARVLESLGADPSNIRTQVIRMIGETTEAVGAGVGGGSSGNKMPTLEEYGTNLTKLAEEGKLDPVVGRQPQIERVVQILGRRTKNNPCLIGEPGVGKTAIAEGLAQRISTGDVPETIEGKKVITLDMGLLVAGTKYRGEFEERLKKLMEEIKQSDEIILFIDEVHTLIGAGAAEGAIDAANILKPALARGELQCIGATTLDEYRKHIEKDPALERRFQPVKVPEPTVDETIEILRGLRERYEIHHKLRYTDEALIAAAKLSYQYISDRFLPDKAIDLIDEAGSRVRLQHAQVPEEARELDKELKQVTKQKNEAVRSQDFEKAGELRDREMELKAQITALIDKSKELSKAEEESGETGPMVNEEDIQHIVSSWTGIPVEKVSSDESDKLLKMEETLHKRVIGQDEAVVAISRSIRRARVGLKNPNRPIASFIFAGPTGVGKSELAKALAAYYFGSEEAMIRLDMSEFMERHTVSKLIGSPPGYVGYTEGGQLTEAVRRRPYTVVLFDEIEKAHPDVFNMMLQILEDGRLTDSKGRTVDFKNTLLIMTSNVGSSVIEKGGRKIGFDLDSDEKDSSYSRIKSLVIEEMKQYFRPEFLNRLDEMIVFRQLTKLEVKEIADIMLQEVFDRLKAKDINLQVTEKFKERVVDEGYNPSYGARPLRRAIMRLLEDSLAEKMLAGEVKEGDSAIVDVDSEGKVVVLNGQGGIPELSTPXXITV

SEQ ID NO: 7151 - protein, 668 aa, Zea mays
  unsure (1)..(668): unsure at all Xaa locations
XNSRANLTKLAEEGKLDPVVGRQPQIERVVQILGRRTKNNPCLIGEPGVGKTAIAEGLAQRISTGDVPETIEGKKVITLDMGLLVAGTKYRGEFEERLKKLMEEIKQSDEIILFIDEVHTLIGAGAAEGAIDAANILKPALARGELQCIGATTLDEYRKHIEKDPALERRFQPVKVPEPTVDETIEILRGLRERYEIHHKLRYTDEALIAAAKLSYQYISDRFLPDKAIDLIDEAGSRVRLQHAQVPEEARELDKELKQVTKQKNEAVRSQDFEKAGELRDREMELKAQITALIDKSKELSKAEEESGETGPMVNEEDIQHIVSSWTGIPVEKVSSDESDKLLKMEETLHKRVIGQDEAVVAISRSIRRARVGLKNPNRPIASFIFAGPTGVGKSELAKALAAYYFGSEEAMIRLDMSEFMERHTVSKLIGSPPGYVGYTEGGQLTEAVRRRPYTVVLFDEIEKAHPDVFNMMLQILEDGRLTDSKGRTVDFKNTLLIMTSNVGSSVIEKGGRKIGFDLDSDEKDSSYSRIKSLVIEEMKQYFRPEFLNRLDEMIVFRQLTKLEVKEIADIMLQEVFDRLKAKDINLQVTEKFKERVVDEGYNPSYGARPLRRAIMRLLEDSLAEKMLAGEVKEGDSAIVDVDSEGKVVVLNGQGGIPELSTPXXITV

SEQ ID NO: 7152 - protein, 555 aa, Zea mays
  unsure (1)..(555): unsure at all Xaa locations
XKAVLKEVTDSDGQTVLFIDEIHTVVGAGATNGAMDAGNLLKPMLGRGELRCIGATTLDEYRKYIEKDPALERRFQQVFVDQPSVEDTISILRGLRERYELHHGVRISDSALVAAAVLSDRYISGRFLPDKAIDLVDESAAKLKMEITSKPTALDEIDRAVLKLEMERLSLTNDTDKASRGRLSRLEAELSLLKDKQRQLTEQWEHEQAVMTKIQSIKEEIDRVNVEIQQAEREYDLNRAAKLKYGSLNALQRQLQATEKELDEYQSSGKSMLREEVTQDDIAEIVSRWTGIPVSKLKQSDREKLLYLEDELHKRVVGQDPAVKAVAEAIQRSRAGLSDPNRPIASFMFMGPTGVGKTELAKALASFMFNTEEAVVRIDMSEYMEKHSVSRLIGAPPGYVGYEEGGQLTEAVRRRPYSVVLFDEIEKAHLDVFNVFLQILDDGRVTDSQGRKVSFTNSIIIMTSNVGSQYILNNEEDGSSDSAYENIKRRVMDAARSVFRPEFMNRVDEYIVFKPLEREQINSIVKLQLCRVQKRIADRKXKLDVSPGAIEFLGX

SEQ ID NO: 7153 - protein, 967 aa, Zea mays
  unsure (1)..(967): unsure at all Xaa locations
GSSLIFLAFFCVCRCWRGSYGGVLLLHLVVRPHRRGPRRRGAEAGRAGGSLGRGGVREGGGGGAGAPAPAPGTQAGHAAGAQGGRRRRQPASAVFERFTERAVKAVVLSQREARGLGEPAVAPSHLLLGLVAEDRSSGGFLSSGINIERAREECRGIAASANADSATATSRPGSSGLDTDVPFAAPTKQVFDVAVVLSKNMGSSFVSPEHLAIALFSLDDPTTNNLLRSLGADPSHLASVAVDRLQAELAKDGRDPAEPSSXQSSKESPCSGRSAFSQSSKKKDKGALDQFCLDLTTQASGGFIDPIIGREEEIERVVQIVCRRTKNNPILLGEAGVGKTAIAEGLALRIANGDVPIYLVAKRILSLDVGLLIAGAKERGELESRVTNIIREVREAGDVILFIDEVHNLIGSGTVGKSKGSGLDIGNLLKPALARGELQCIAATTLDEHRMHFEKDKALARRFQPVLVDEPSQEDAVKILLGLREKYEAYHKCKFTLEAINAAVYLSARYIPDRQLPDKAIDLIDEAGSRARMESFNRKKEGQSSILLKSPDEYWQEIRAAQAMHEVVLSNKEKYSPNENAEESGSSNVEAPRRDNIESTSTSSLSADEPVVVGTEEIARVASLWSGIPVQQLTADDKKLLVGLDDELRKRVIGQDDAVVAISRAVKRSRVGLNDPDRPIATLLFCGPTGVGKTELTKALAASYFGSESAMLRLDMSEYMERHTVSKLIGSPPGYIGYGETGTLTEAVRRKPFTVVLLDEIEKAHPDIFNILLQIFEDGHLTDSQGRRVSFKNTLIVMTSNVGSTSISKGRXXSIGFLKEDTESGSYFAMKSLVMEELKAFFRPELLNRIDEMVVFRPLEKTQMLAILDIILKEVKGRLLALGIGLEVSDAMKDLICQEGYDKSYGARPLRRAVTHIIEDVISEAILFGEFKPGDTILMDIDAEGKPCXXGHLDQQIVQVSDPTRAI

SEQ ID NO: 7154 - protein, 622 aa, Zea mays
  unsure (1)..(622): unsure at all Xaa locations
XHVSAREVLRRRLQEGFTEAMVRMASLSRLTTGLLVAGTKYRGEFEVRLKKLMEEIKQNEDIILFIDXVHTLIGAGAAEGVIDAANILKPAFCNFPKICIGATTLDEYRKHIEKDPALERRFQPVKVPEPTMDETIQILRGLRERYELHHKLRYTDDALIAAAQLSYQYISDRFLPDKAIDLIDEAGSRVRLRHAQLPDEAKELDKELRQISKQKNEAVRGQDFEKAGELRDREMELKAQITAIIDKSKEMIKAETESGEVGPLVTEADIQHIVSSWTGIPVEKVSSDESDRLLKMEETLHTRIIGQDEAVKAISRAIRRARVGLKNPNRPIASFIFSGPTGVGKSELAKALAAYYFGSEEAMIRLDMSEFMERHTVSKLIGSPPGYVGYTEXGGQLTEAVRRRPYTVVLFDEIEKAHPDVFNMMLQILEDGRLTDSKGRTVDFKNTLLIMTSNVGSSVIEKGGRKIGFDLDYDEKDTSYNRIKSLVTEELKQYFRPEFLNRLDEMIVFRQLTKLEVKEIADIMLKEVFDRLKAKDINLQVTEKFRDRVVDEGYNPSYGARPLRRAIMRLLEDSLAEKMLAGEVKEGDSAIVDVDSDGKVIVLNGGSGVAEPLEPAPVPNRG

SEQ ID NO: 7155 - protein, 582 aa, Zea mays
AFERRFQQVFVAEPSVPDTVSILRGLKEKYEGHHGVRIQDRALVVAAQLSARYIMGRHLPDKAIDLVDEACANVRVQLDSQPEEIDNLERKRIQLEVELHALEKEKDKASKARLIEVRKELDDLRDKLQPLTMKYRKEKERIDEIRKLKQRREELQFTLQEAERRMDLARVADLKYGALQEIDAAISKLESETGENLMLTETVGPEQIAEVVSRWTGIPVTRLGQNDKERLVGLADRLHQRVVGQTEAVSAVAEAVLRSRAGLGRPQQPTGSFLFLGPTGVGKTELAKALAEQLFDDENLLVRIDMSEYMEQHSVARLIGAPPGYVGHEEGGQLTEQVRRRPYSVILFDEVEKAHVAVFNTLLQVLDDGRLTDGQGRTVDFRNTVIIMTSNLGAEHLLAGMVGKNSMKVARDLVMQEVRRHFRPELLNRLDEIVIFDPLSHEQLRKVARLQMKDVAVRLAERGIALAVTDAALDIILSLSYDPVYGARPIRRWIEKRVVTQLSKMLIQEEIDENCTVYIDAAPGKDELVYRVDRSGGLVNAETGMKSDILIQVPTSSTRSDAAQAVKKMRIMEEDEDGMDEE

SEQ ID NO: 7156 - protein, 582 aa, Zea mays; identical to SEQ ID NO: 7155

SEQ ID NO: 7157 - protein, 662 aa, Zea mays
  unsure (1)..(662): unsure at all Xaa locations
XSHRRCSPPPVVXDPARGAACSRLGLPQGMLNGVHTDAIDGRMAAAPSLASHVLCEWSRLSFDCRVYYQXVPLXQSEHTSSSMPQPNTLIGAGAAHGAGNALIIFSPAVARGELQCIGATTLDEYRKHVETDPALXERRFQPLKVPEPTVDETIHILRGLRERYELHHKLLYTDVALIAAAQLSYHYISDRFLPNKVIDLLDEAGKRVRRSHPQLPDETKYMNYDLRQITKQKNEAVRGQDFEKAGELRDREMELKAQITAIIDKSKEMIKAETESGDVGPLVTEADIQHIVSSWTGIPVEKVSSDESDRLLKMEETLHTRIIGQDEAVKAISRAIRRARVGLKNPNRPIASFIFSGPTGVGKSELAKALAAYYFGSEEAMIRLDMSEFMERHTVSKLIGSPPGYVGYTEGGQLTEAVRRRPYTVVLFDEIEKAHPDVFNMMLQILEDGRLTDSKGRTVDFKNTLLIMTSNVGSSVIEKGGRKIGFDLDYDEKDTSYNRIKSLVTEELKQYFRPEFLNRLDEMIVFRQLTKLEVKEIADIMLKEVFDRLKAKEINLQVTEKFRDRVVDEGYNPSYGARPLRRAIMRLLEDSLAEKMLAGEVKEGDSAIVDVDSDGKVIVLNGGSGVAEPLEPAPVPNRGQNHHWSEIWPSLQVSWVSRDGKN

SEQ ID NO: 7158 - protein, 461 aa, Zea mays
TDKASKDRLSRLEAELSLLKDKQRQLTEKWEHEKSVMTKIQSIKEEIDRVNVEIQQAEREYDLNRAAELKYGSLNALQRQLQTTEKELDEYQSSGKSMLREEVTQDDIAEIVSRWTGIPVSKLKQSDREKLLYLEEELHKRVVGQDPAVKAVAEAIQRSRAGLSDPNRPIASFMFMGPTGVGKTELAKALASFMFNTEEAVVRIDMSEYMEKHSVSRLIGAPPGYVGYEEGGQLTEAVRRRPYSVVLFDEIEKAHSDVFNVFLQILDDGRVTDSQGRKVSFTNTIIIMTSNVGSQYILNMDEDGSSDSAYENIKRRVMDAARSVFRPEFMNRVDEYIVFKPLEREQINSIVKLQLARVQKRIADRKIKLEVSPGAIEFLGSLGYDPNYGARPVKRVIQQHVENELAKGILRGDFKDEDSIFVDTQVTVPSNGQLPQQKLVFRKVGEQSKPAAEGEKFLPAV

SEQ ID NO: 7159 - protein, 324 aa, Zea mays
IDLTESARRGKLDPVIGRDDEVRRCIQILCRRTKNNPVIIGEPGVGKTAIAEGLAQRIVRGDVPEPLMNRRLISLDMGALLAGAKFRGDFEERLKAVLKEVTASNGQIILFIDEIHTVVGAGAAGGAMDAGNLLKPMLGRGELRCIGATTLDEYRKYIEKDAALERRFQQVYCGEPAVEDTISILRGLRERYELHHGVKISDGALVAAAVLSDRYITGRFLPDKAIDLVDEAAAKLKMEITSKPIELDEVDREIIRLEMEKLSLKNDTDKASKERLSKLEAELESLKQKQKSLSEHWEYEKSLMTRIRSIKEEFQRISLKLSLM

SEQ ID NO: 7160 - protein, 374 aa, Zea mays
  unsure (1)..(374): unsure at all Xaa locations
ADNKLVEFQQSGKSMLRXEVTDVDIAEIVSKWTGIPVSNLQQSEREKLLLLEDVLHKRVIGQDIAVKSVANAIRRSRAGLSDPNRPIASFMFMGPTGVGKTELGKTLAEFLFNTENALIRIDMSEYMEKHAVSRLVGAPPGYVGYEEGGQLTESVRRRPYSVVLFDEIDKALQDVFSILLQLLDDGRITDSQGRTVSFTNCVIIMTSNIGSPLILDTLRNTTDSKEAVYEIMKKQVIEMARQTFRPEFLNRIDEYIVFQPLDTTEINHIVEIQLNRVKNRLRQQKIHLQYTAEAVELLGSLGFDPNYGARPVKRVIQQMVENEIALGVLKGDFKEDDTVLVDVSSAAIAKGLAPQKKLVLQRVENGNDELVAND

SEQ ID NO: 7161 - protein, 404 aa, Zea mays
  unsure (1)..(404): unsure at all Xaa locations
PTRALVXARLLGHNYIGSEHLLLGLLREGEGVAARVLESLDADPNNITREAVVTTQSTREAVGAGVGGGSSGQKMPTLEEYGTNLTKLAEEGKLDPVVGRQDQIERVTQILGRRTKNNPCLIGEPGVGKTAIAEGLAQRISNGDVPETIEGKKVITLDMGLLVAGTKYRGEFEERLKKLMEEIKQNEDIILFIDEVHTLIGAGAAEGAIDAANILKPALARGELQCIGATTLDEYRKHIEKDPALERRFQPVKVPEPTVDETIQILRGLRERYELHHKLRYTDDALIAAAQLSYQYISDRFLPDKAIDLIDEAGSRVRLRHAQLPDEAKELDKELRQITKQKNEAVRGQDFEKAGELRDREMELKAQITAIIDKSKEMIKAETESGEVGPLVTEADIQHIVSSW

SEQ ID NO: 7162 - protein, 276 aa, Zea mays
GKSMLREEVTDVDIAEIVSKWTGIPVSNLQQSEREKLLLLEDVLHKRVIGQDIAVKSVANAIRRSRAGLSDPNRPIASFMFMGPTGVGKTELGKTLAEFLFNTENALIRIDMSEYMEKHAVSRLVGAPPGYVGYEEGGQLTESVRRRPYSVVLFDEIEKAHQEVFNILLQLLDDGRITDSQGRTVSFTNCVIIMTSNIGSPLILDTLRNTTDSKEAVYEIMKKQVIEMARQTFRPEFLNRIDEYIVFQPLDTTEINHIVEIQVDWVLNRVGRRCVG

SEQ ID NO: 7163 - protein, 438 aa, Zea mays
  unsure (1)..(438): unsure at all Xaa locations
PRGRXRAFKRKKEXTCSILSKSPDEYWQEIRAVQSTHEVALANRLKYSLDENDKDDGVNIEVIGDNKIASPSMPPTSVDEPILVGSEEIARVTSLWSGIPVQKLTADETKLLVGLDDELRKRVIGQDDAVVAISRAVKRSRVGLNDPDRPIATLLFCGPTGVGKTELTKALAASYFGSESAMIRLDMSEYMERHAVSKLIGSPPGYMGFGEGGTLTEAVRRTPFTVVLLDEIEKAHPDIFNILLQVFEDGHLTDSQGRRVSFKNTLIVMTSNVGSTSISSGRRSIGFSTQRDTEETTYAAMKSLVMEELKAFFRPELLNRLDEVVVFHPLEKTQMMAILNLILQEVKSRLLALGIGLEVSESMKILISQQGYDRSYGARPLRRAVTQLVEDVISEAILFGQFKPGDTILMGTDATGKPCLXXRLNDQTVQLSDTAPTI

SEQ ID NO: 7164 - protein, 360 aa, Zea mays
  unsure (1)..(360): unsure at all Xaa locations
LDAKVVGDTTGPIIGSSFVLILDNAKKHKKEHGDEFVSVEHILQAFTSDKRFGQQLFKDLKIVENDLKEAISAVRGSQRVTDQXLISLDMGALLAGAKFRGDFEERLKAVLKEVTASNGQIILFIDEIHTVVGAGAAGGAMDAGNLLKPMLGRGELRCIGATTLDEYRKYIEKDAALERRFQQVYCGEPAVEDTISILRGLRERYELHHGVKISDGALVAAAVLSDRYITGRFLPDKAIDLVDEAAAKLKMEITSKPIELDEVDREIIRLEMEKLSLKNDTDKASKERLSKLEAELESLKQKQKSLSEHWEYEKSLMTRIRSIKEETDRVNLEIEAAEREYDLNRAAELKYGTLLSLQKQ

SEQ ID NO: 7165 - protein, 286 aa, Zea mays
  unsure (1)..(286): unsure at all Xaa locations
XQEAERRMDLARVADLKYGALQEIDAAISKLESETGENLMLTETVGPEQIAEVVSRWTGIPVTRLGQNDKERLVGLADRLHQRVVGQTEAVSAVAEAVLRSRAGLGRPQQPTGSFLFLGPTGVGKTELAKALAEQLFDDENLLVRIDMSEYMEQHSVARLIGAPPGYVGHEEGGQLTEQVRRRPYSVILFDEVEKAHVAVFNTLLQVLDDGRLTDGQGRTVDFRNTVIIMTSNLGAEHLLAGMVGKNSMKVARDLVMQEVRRHFRPELLNRLDEIVIFDPLSHEQX

SEQ ID NO: 7166 - protein, 238 aa, Zea mays
  unsure (1)..(238): unsure at all Xaa locations
EAGVSAARVRAELEKLRGGEGRRVESASGDTNFQALKTYGRDLVEQAGKLDPVIGRDEEIRRVVRILSRRTKNNPVLIGEPGVGKTAVVEGLAQRIVRGDVPSNLLDVRLIALDMGALVAGAKYRGEFEERLKAVLKEVEEAEGKVILFIDEIHLVLGAGRTEGSMDAANLFKPMLARGQLMCIGATTLEEYRMYVENDAVFERRFQQVFVAEPSVPDPXSILRGLKEKYEVHHGVRX

SEQ ID NO: 7167 - protein, 307 aa, Zea mays
  unsure (1)..(307): unsure at all Xaa locations
ATTGKLDPVVGRQDQIERVTQILGKRTKNNPCLXGEPGVGKTPIAEGLAQRIANWDVPKTIEGKKVITLDMGLLVAGTKYRGEFEERLKKLMDEIKQNEDIILFIDEVHTLIGAGAAEXCIGATTLDEYRKHIEKDPSLERRFQPVKVPEPTVDETIQILRGLRERYELHHKLRYTDDALIAAAQLSYQYISDRFLPDKAIDLIDEAGSRVRLRHAQLPDEAKELDKELRQITKQKNEAVCGQDFEKYGLARVYCYLVQRRQRRSAPTSLATPIWLIPSIMLFPFEINILLPILPFVSSSCFLFYNL

SEQ ID NO: 7168 - protein, 859 aa, Novosphingobium aromaticivorans
MNLEKFTDRAKGFLQAAQTVAIRMNHQRITPDHILKALLEDSEGMASGLIQRAGGNAALAQTEVDKALAKIPAVSGSGAQATPGLDNDAVRVLDSAEQIAAKSNDSFVTVERMLVALTLATTTSAGQALKAANVTAQALEAAITQLRGGRTADSASAENAYDAMKKYARDLTEAAREGKLDPVIGRDEEIRRTVQILARRTKNNPALIGEPGVGKTAIAEGLALRIANGDVPDSLKDRRLMALDMGSLIAGAKYRGEFEERLKAVLDEVKGAEGEIILFIDEMHTLIGAGKSEGAMDAGNLLKPALARGELHCIGATTLDEYQKYVEKDPALQRRFQPVFVGEPTVEDTISILRGIKDKYELHHGVRIADNAIVAAATLSNRYISDRFLPDKAIDLMDEAASRIRMEVESKPEEIEKLDRRIIQMKIEEMALAKETDQASKDRLATLREELANQEQQSAELTTRWQNERDKIAAEGKVKEALDAARSELEVAQRNGDLAKAGELAYGRIPELERQLAEAQGVSQNAMLREEVTAEDIAAVVSKWTGVPVDRMMEGEREKLLHMEEALGKRVIGQKDAVLAVSKAVRRARAGLQDPNRPLGSFLFLGPTGVGKTELTKALAGFLFDDDNAMVRIDMSEFMEKHSVSRLIGAPPGYVGYDEGGVLTEAIRRRPYQVVLFDEVEKAHSDVFNVLLQVLDDGRLTDGQGRVVDFTNTLIILTSNLGSQYLANLEEGQDVQSVEPQVMDVVRAHFRPEFLNRLDEIILFHRLGHEHMAPIVDIQVGRVANLLKDRKIVLDLTDAAKRWLGRVGYDPVYGARPLKRAVQRYLQDPLAEKLLGGEVPDGSTVRIDEGDGALSFVIA

SEQ ID NO: 7169 - protein, 803 aa, Schizosaccharomyces pombe
MNILPKSIPIRIQSLRRYQGSLKTSLRALSTRPIFEKRLLAETPFSIRPSNASVLIAKRSPKFGWKQVRFYAANPNGGNFRMDLGGGRKQGAALEEYGTDLTALAKQGKLDPVIGREEEIQRTIQILSRRTKNNPALVGPAGVGKTAIMEGLASRIIRGEVPESMKDKRVIVLDLGALISGAKFRGDFEERLKSVLSDLEGAEGKVILFVDEMHLLLGFGKAEGSIDASNLLKPALARGKLHCCGATTLEEYRKYIEKDAALARRFQAVMVNEPSVADTISILRGLKERYEVHHGVRITDDALVTAATYSARYITDRFLPDKAIDLVDEACSSLRLQQESKPDELRRLDRQIMTIQIELESLRKETDTTSVERREKLESKLTDLKEEQDKLSAAWEEERKLLDSIKKAKTELEQARIELERTQREGNYARASELQYAIIPELERSVPKEEKTLEEKKPSMVHDSVTSDDIAVVVSRATGIPTTNLMRGERDKLLNMEQTIGKKIIGQDEALKAIADAVRLSRAGLQNTNRPLASFLFLGPTGVGKTALTKALAEFLFDTDKAMIRFDMSEFQEKHTIARLIGSPPGYIGYEESGELTEAVRRKPYAVLLFDELEKAHHDITNLLLQVLDEGFLTDSQGRKVDFRSTLIVMTSNLGSDILVADPSTTVTPKSRDAVMDVVQKYYPPEFLNRIDDQIVFNKLSEKNLEDIVNVRLDEVQQRLNDRRIILTVTEAARKWLAEKGYSPAYGARPLNRLIQKRILNTMAMKIIQGEIKSDENVVIDVLDGELEFKANKLEPQSTSHED

SEQ ID NO: 7170 - protein, 160 aa, Saccharomyces cerevisiae
LVMGAVRQHFRPEFLNRISSIVIFNKLSRKAIHKIVDIRLKEIEERFEQNDKHYKLNLTQEAKDFLAKYGYSDDMGARPLNRLIQNEILNKLALRILKNEIKDKETVNVVLKKGKSRDENVPEEAEECLEVLPNHEATIGADTLGDDDNEDSMEIDDDLD

SEQ ID NO: 7171 - protein, 826 aa, Desulfitobacterium hafniense
MNEKYTEKALKALQFASDEAKRMGSNVIGTEHLLLGLVAEGEGIAAKSLHGIGVTPEKIREQIGNLTGIGQPFTGEVSLTPRVKRVMELAHEEARRHGVSYIGTEHLLLGLLMEGEGVAARVLRNLGVSPERIWKQVVQLLGGQPDDIPMPGGAPGPGTAKNNGAANTPALNEFGRDLTQQAREGRLDPVVGREDEIERVVQVLSRRTKNNPVLIGEPGVGKTAIAEGLAQRIINNKVPETLAGKRVVTLDLSAVVAGSKYRGEFEERLKKVMEEIRVDGRIIVFIDELHTLIGAGAAEGAIDAANILKPALARGELQCIGATTLDEYRKYIEKDPALERRFQPITVGEPTVEQAVQILLGLRDRYEAHHRTQITDEAVEAAVKMSDRYISDRFLPDKAIDLMDEAASRVRLAAFTAPPDLKSLEEKIEALKSEKEAAVLGQEFEKAAKFRDEEHQLREELAQLRNTWESKRDISQSQVTADDIAQIVASWTGIPVKKLAQEESERLLGLEETLHQRVVGQEDAVKAVSRAVRRARAGLKDPKRPVGSFIFLGPTGVGKTELARALAEALFGEEDALIRIDMSEYMEKHAVSRLVGAPPGYIGHDEGGQLTEAIRRKPYSVILLDEIEKAHPEVFNILLQVLEDGRLTDTKGRTVDFRNAVIIMTSNVGASFMKKEALGFASRRDEETEYKNMSSRVMEELKKTFRPEFLNRVDEIVVFHSLQTEGLLKITEILMKQVNGRLQEQGYDLQVEKSALELIAKEGNDPTFGARPLRRAIQRLIEDSLSEKILLGEFKSGDKIKVEAVEDKMKFAKVRARKSKKAEAAE

SEQ ID NO: 7172 - protein, 354 aa, Desulfitobacterium hafniense
ELEKQLKAAQEAETQGFKLLQDKVTAEEIAEVVARWTGIPVAKMLEGERDKLLKMEQALHARVVGQDEAVRVVSDAVRRSRAGLSDPNRPSGSFLFLGPTGVGKTELCKALAEFLFDSSDAMIRIDMSEFMEKHAVSRLVGAPPGYVGYEEGGYLTEAVRRRPYSVILLDEVEKAHPDVFNILLQVLDDGRLTDGQGRTVDFRNTVIVMTSNLGSQMIQELSSDSSPEAYTQMKAAVMGVVQTHFRPEFINRLDDIVVFHPLEKSQIREIAKIQLHGLEKRLGERGLKLALSEAALTLIGNVGFDPVYGARPLKRAVQQQIENPLAQKILSGEFVSGDTIRVDAAGGHLVFAKG

SEQ ID NO: 7173 - protein, 384 aa, Desulfitobacterium hafniense
MLKEVQEREDIILFIDELHTVVGAGAAEGAMDAGNMLKPMLARGELHMVGATTLDEYRKYIEKDAALERRFQPVTVGAPSVEDTISILRGLKERYETHHGVRITDGAIIAAAVLSDRYISDRFLPDKAIDLIDEAAARMRMEITSDPYELDQIKRRILQLEIEREALKKEKDEGSKERLEKIEEDLANLKEERSALEAQLQGEREVLTRINSLKEDIDQNRLKMEQAQQAFDYNKAAELQYGILPKLEKELNALEEQLRNRKNTLLKQEVGEEDIAEVVAKWTQVPVAKLLESEMDKLVHMEARIHQRVIGQEEAVKAVADAVRRSRAGLQDPNRPLGSFLFLGPTGVGKTELAKALAEFLFDDDQGSCASTCPNIWRSIPFPA

SEQ ID NO: 7174 - protein, 232 aa, Desulfitobacterium hafniense
MRIDMSEYMEKHTVSRLIGAPPGYVGYEEGGQLTEAVRRKPYSVVLFDEVEKAHGDVFNVLLQLLDDGRLTDGQGRVVNFKNTVVILTSNIASPLIQELTASGAAQEVLRSRVTEELRLHFRPEFLNRLDEIIVFHPLGQEHIGSIVQIQINKLRDYLAPRKMTLELSQGALNKIIQQGYDPIYGARPLKRVIQQNLQNPLAMKILQGILHEGDHVLVDLDPQGQLLFKKSE

SEQ ID NO: 7175 - protein, 810 aa, Neurospora crassa
MQTRRQLLSTATRRISEASRASLSRTTRQFPRAPALGVTVPALNATHLASSLRLLPTIATRSYANGRPRPPGGTHRMNLGGEDEKPALEQYGIDLTAKAREGKLDPVIGRAAEIQRTIQILSRRTKNNPVLIGCAGVGKTAILEGLALEIVKGAVPESIKNRRVISLDLGSLIAGAKFRGDFEERLKKVLGEVQEANGEVILFIDELHTLLGLGKAEGSIDASNLLKPALSRGELQCCGATTMTEYRQIEKDVALARRFQPIIVSEPTVEDTISILRGIKEKYEVHHGVRITDGALVAAATYSNRYITDRFLPDKAIDLMDEAASSLRLQQESKPDDIQRLDQKIMTIQIELESLRKEKDVASVERREKLEADLKKYQDEVAVLTERWLKEKAEIDSIKQTQAELDRARIELEQAQRTGNFARASELRFGVIPNLEKKLPKDGERPTRDLSLIHDSVTADDIANVVSRITGIPISKLSSGHTERLIHMEDILRESVRGQDEALKAVADAVRMQRAGLSGENRPLASFFFLGPTGVGKTELCKKLAGFLFSTETAVVRFDMSEFQEKHTISRLIGAPSGYVGYEDAGQLTEAVRRKPYAVILLDEFEKAHRDISALLLQVLDEGYLTDAQGHKVDFKNTIIVLTSNLGADILVGANPMVPYKETEDGDIHPDVKQAVMDVVASQYPPEFLNRIDSFIIFKRLAMEALRDIVDIRLKELQERLNDRRITLDVPEEVRQWLAERGYDPKFGARPLNRLITTEIGNGLADKIIRGQIKSGDKAVVEIKEDRSGLNVYAEQQEQPPAAEEAEAEA

SEQ ID NO: 7176 - protein, 819 aa, Guillardia theta
MFERFTEKAIKVIMLAQEEARRLGHNFVGTEQILLGLIGEGTGIAAKVLKSMGVNLKDARVEVEKIIGRGSGFVAVEIPFTPRAKRVLELSLEEARQLGHNYIGTEHLLLGLIREGEGVAARVLENLALDLTKVRTQVIRLLGDTAEVSATNGQTKGKTPTLEEFGSNLTQKAAEGKLDPVIGRQKEIERVIQILGRRTKNNPILIGEPGVGKTAIAEGLAQRINNRDVPDILEDKRVVTLDIGLLVAGTKYRGEFEERLKKIIDEIRVANNVILVIDEVHTLIGAGAAEGAIDAANILKPALARGEMQCIGATTLEEYRKHIEKDSALERRFQPVMVGEPSVEETIEILYGLRDRYEKHHKLVISDEALSAAAKFADQYIADRFLPDKAIDLIDEAGSRVRLMNSQLPPAARELDKELREILKQKDEAVRSQDFETAGQLRDREMEIKAQIAAIAHSKKGDEENTKEVSVVTEEDIAQIVAAWTGIPVNKMTRSESEKLLQMEETLHGRIIGQDEAVVAVSKAIRRARVGLKNPNRPIASFIFSGPTGVGKTELTKALASYFFGSEEAMVRLDMSEYMERHTVSKLIGSPPGYVGYNEGGQLTESVRRRPYTVVLFDEIEKGHPDVFNLLLQILEDGRLTDSKGRTVDFKNTLLILTSNVGSKVIEKGGGGLGFDLSEDQTESQYGRIKALVNEELKQYFRPEFLNRLDEIIVFRQLTKDEVGEIAEIMLKEVFTRISEKGIQLEVTARFKTHLINEGYNPIYGARPLRRAVMRLLEDTLSEEFLAEKIKEGDTAVVDVDDDGKVKVLLGEKLELVAN

SEQ ID NO: 7177 - protein, 765 aa, Plasmodium falciparum
MIILNNLYCTKELIIIFIKSEYLALKYNNNFIMPIHLLLGLLLTDNLCTKFLKINKKIINNKIILSLLNKYKYNNKNIININFSNKVINILIKLNFNFKINSFNLLLLLLEEKNNNKDINYLFKYLNLNFSNLNLNNYIKTNIFSNNIRIKLKEISVNLLNLNYIYNNNLNFYKQQYIQLLQILNLKIKKHIILEGVNDNIFIFLQLLINNIKNKIIPIYLKYTEIWVLNDLLTYDIQTLIYKILNISKYFTNKYKLILIIKNIEIFNLSDNINNDNNKLYYLFLLLNKLYGYNIHIIIVTNKKEYNTYFKYNIIKDSYFYKIRIKDLSILQTFLIIKNNIYKYINYYKININNYIIYELINLSKKYIKPLILPTTPLILLENSCSNKYLLNNKISYSNFNYLFTYNNNIIYNNKNNNLTIEDIKNSISNYLNISKTILFKDNKLTKLNLTKLENYLYNHIYGQNHIFNKIIPFIKQNFIGLKNKNKPIGSWILCGPSGTGKTELAKILSKQLFGSEKELIRFDMSEYMEKHSISRLIGSPPGYVGYSEGGQLTEQVYKKPNSVILFDEIEKAHPDIYNIMLQILDEGRLTDSTGKLIDFTHTIILLTSNLGCPKNYDLYLKNKNFLSKSDLKEIEKNIKININNYFKPELLNRLTNILIFNPLNINNLLFIFNKFINELKIKLYLNKLNIIIHINKELKYFLVKLMYNPLYGARPLKRILELIFDKSISDLLLTYNKHYFIKNKYILYYYLNKYYKLNFNIYLL

SEQ ID NO: 7178 - protein, 766 aa, Plasmodium falciparum
MIILNNLYCTKELIIIFIKSEYLALKYNNNFIMPIHLLLGLLLTDNLCTKFLKINKKIINNKIILSLLNKYKYNNKNIININFSNKVINILIKLNNFNFKINSFNLLLLLLEEKNNNKDINYLFKYLNLNFSNLNLNNYIKTNIFSNNIRIKLKEISVNLLNLNYIYNNNLNFYKQQYIQLLQILNLKIKKHIILEGVNDNIFIFLQLLINNIKNKIIPIYLKYTEIWVLNDLLTYDIQTLIYKILNISKYFTNKYKLILIIKNIEIFNLSDNINNDNNKLYYLFLLLNKLYGYNIHIIIVTNKKEYNTYFKYNIIKDSYFYKIRIKDLSILQTFLIIKNNIYKYINYYKININNYIIYELINLSKKYIKPLILPTTPLILLENSCSNKYLLNNKISYSNFNYLFTYNNNIIYNNKNNNLTIEDIKNSISNYLNISKTILFKDNKLTKLNLTKLENYLYNHIYGQNHIFNKIIPFIKQNFIGLKNKNKPIGSWILCGPSGTGKTELAKILSKQLFGSEKELIRFDMSEYMEKHSISRLIGSPPGYVGYSEGGQLTEQVYKKPNSVILFDEIEKAHPDIYNIMLQILDEGRLTDSTGKLIDFTHTIILLTSNLGCPKNYDLYLKNKNFLSKSDLKEIEKNIKININNYFKPELLNRLTNILIFNPLNINNLLFIFNKFINELKIKLYLNKLNIIIHINKELKYFLVKLMYNPLYGARPLKRILELIFDKSISDLLLTYNKHYFIKNKYILYYYLNKYYKLNFNIYLL

SEQ ID NO: 7179 - protein, 842 aa, Prochlorococcus marinus subsp. pastoris str. CCMP1378
MFERFTEKAIKVIMLAQEEARRLGHNFVGTEQILLGLIGEGTGVAAKVLKSLGVNLKDSRIEVEKIIGRGSGFVAVEIPFTPRAKRVLELSLEEARQLGHNYIGTEHLLLGLIREGEGVAARVLENLGIDLTKVRTQVIRMLGETAEVGSGGSSNKGNLKTATLDEFGTNLTKLASESKLDPVVGRYAEIDRVIQILGRRTKNNPVLIGEPGVGKTAIAEGLAQRIQLGEIPDILEDKRVLTLDIGLLVAGTKYRGEFEERLKKIMEEIKSAGNVILVIDEVHTLIGAGAAEGAIDAANILKPALARGELQCIGATTLDEYRKHIERDAALERRFQPVMVGEPSIADTIEILKGLRERYEQHHRLKITDNALEAAAHLGDRYISDRFLPDKAIDLIDEAGSRVRLINSKLPPEAKQIDKELRQVQKQKEESVRDQNFDQAGVLREKEIELSAKIKELLENKKESSEKNEISNANETTENNSTIIHDPLVSEEDVAHIVASWTGVPVQKLTETESVKLLNMEETLHQRLIGQDEAVKAVSKAIRRARVGLQNPNRPIASFIFSGPTGVGKTELTKSLASYFFGSEEAMIRLDMSEFMERHTVSKLIGSPPGYVGFNEGGQLTEAVRRRPYTVVLFDEVEKAHPDVFNLLLQLLEDGRLTDSKGRTVDFKNTLLIMTSNIGSKVIEKGGGGLGFEFSGDSVEDSQYNRIKSLVNEELKQYFRPEFLNRLDEIIVFRQLSKNEVKDIAEIMLKEVFSRLNEKGIKLDVTDAFKERLVEEGYNPAYGARPLRRAVMRLLEDSLAEEVLSGRIKDGDKAIVDIDENKKVIVNISTEESSQELAGANF

SEQ ID NO: 7180 - protein, 919 aa, Prochlorococcus marinus subsp. pastoris str. CCMP1378
MRETLTSNPELFSDISWNLLLLGEETAKKWDHSEFNIEHIIHTLFTSSEFFSFIEKLSIDQNTVLDITEEFLEETPINDSDIFTIGEELEILLDNANQIKTQWGSKFIDIPHLLIALGSDPRIGNYVFQEGDLSVEQLEEELKFSPNIIQRQNYIENKKYISDEDKILINKSIDESDKEELIKESKAIIPSPKSNLIIKTKQKTEENVLSLYGKDLTESAEKGLLDPVIGRGDEINNVMRVLSRRSKNNPILIGHPGVGKTSIAKLLAQLIVEKKVPDLLKNSKIISLDLGALVSGTKFRGQLEERLSLILNEIKDSNQGIILFIDEIHTIITSDRTTTDISNILKPLLTDGELRCIGTTTPEKFRESIEKDQSLNNCFQKILVNEPSVELSAKILQGIKKKYELHHGIRITEEAINCSARLADRYISDKCLPDKAIDLIDEAAAQLKIESNIKPQTIIDEEKNIDTIESKLQNIFPENIEEREKLLESKELSIKKLNEITNDWENDREKMEQLFFLLKEENRLILKIEELSIHSDEIDNFDNLNNLEAELNEVECEIKNVEISCQKLQRNRNYNLKYQVEPDDIADVISKITGIPIAKVVSNERKKLVNLELEISEKVIGQEKAIKAVSSAIRRARVGMKNPKRPIGSFLFMGPTGVGKTELAKSLASSLFDEEEALLRLDMSEYMEKNAVARLLGAPPGYVGYEEGGQLTEAVRRKPYSVILLDEIEKAHSEVFNILLQVLDEGRLTDSQGRTVDFKNTVIIMTSNLAGKIILEDSKIITNQKENSELRKQTLQDSINKSLSSIFRPEFLNRIDEIVKFDTLSIDQLQKIILLQIEDLKKLLLEQGIKINIDKRVIQKIANDSYQPEYGARPLGRELRRQIENPLASKLLEDNFKNKKNISVKISPSKKDEILFKPS

SEQ ID NO: 7181 - protein, 880 aa, Nostoc punctiforme
MQPTNPEQFTEKAWEALVRTPEIAKQFQHQQIESEHLMLALLEQEGLASSIFNKAGVNVQKLHERTIDFINRQPKVSGASSGSVYIGHSLERLLDRAEQYRKEFGDEYISIEHLILAFAKDDRFGKGLFQEFGLDEKKLRNIIQQIRGSQKVTDQNPEVKYEALEKYGRDLTQLAHEGILDPVIGRDEEIRRTIQILSRRTKNNPVLIGEPGVGKTAIVEGLAQRIVSGDVPESLRVGIAGRRHRKLIALDMGALIAGAKYRGEFEERLKAVLKEIQEAQGQIVLFIDEIHTVVGAGATQGSMDASNLLKPMLARGELRCIGATTLDEYRKYIEKDAALERRFQQVYVDQPSVEDTISILRGLKERYELHHGVKISDSALVAAATLSARYISDRFLPDKAIDLVDEAAAKLKMEITSKPEELDEIDRKILQLEMERLSLQKETDSASRERLERLERELAELKERQDALNAQWQAEKQIIDRIRQIRQEIERVNVEIQQAERDYDLNRAAELKYSKLTELQRQLKEAEARLAQIQTSGKSLLREEVTEADIAEIISKWTGIPVSRLVESEMQKLLHLEEELHKRVIGQDEAVRAVADAIQRSRAGLADPNRPIASFIFLGPTGVGKTELAKALAEYLFDTEDALVRIDMSEYMEKHAVARLIGAPPGYVGYEEGGQLTEAIRRRPYSVILFDEIEKAHPDVFNVLLQILDDGRLTDSQGRTVDFKNTIAIMTSNIGSIYILDVAGDDSKYEQMRDRVMEAVRESFRPEFLNRIDEIIIFHSLRKDELREIVKLQVQRLEERLRERKLSLKISDQALDWIVQVGYDPVYGARPLKRAIQRELETPIAKAILRGEFHEGDTIYVHVEHERLVLKRLSPELVNA

SEQ ID NO: 7182 - protein, 872 aa, Nostoc punctiforme
MQPTNPNQFTEKAWEAIAHTPDIVKQYQQQQIESEHLMKALLEQDGLATGILTKAGVNLQKLRDRTEQFFQRQPKVSGTSSSVYLGRSLDTLLDRADVYRKEFQDEYISIEHLLLAYAKDDRFGKALFQEFGLDEGKLKDIIKQVRGSQKVTDQNPEGKYEALEKYGRDLTEAARKGQLDPVIGRDDEIRRTVQILSRRTKNNPVLIGEPGVGKTAIAEGLAQRIIAGDVPQSLKDRKLISLDMGALIAGAKFRGEFEERLKAVLKEVTESGGNIVLFIDEIHTVVGAGATQGAMDAGNLLKPMLARGELRCIGATTLDEYRKHIEKDAALERRFQQVYVDQPSVEDSISILRGLRERYENHHGVKISDSALVAAAVLSSRYISDRFLPDKAIDLVDEAAARLKMEITSKPEELDEIDRKILQLEMEKLSLQKESDAASRERLERLEKEIADLKEEQRTLNTQWQSEKDIIDKIQSVKKEIERVNLEIQQAERDYDLNRAAELKYGNLTSLHRQLEAVEAELASAQRSGKSLLREEVTEADIAEIISKWTGIPISKLVESEKEKLLHLEDELHHRVIGQEEAVTAVADAIQRSRAGLADPNRPIASFIFLGPTGVGKTELAKALAGYMFDSEDALVRIDMSEYMEKHAVSRLIGAPPGYVGYEEGGQLTEAIRRRPYSVILFDEIEKAHPDVFNIFLQILDDGRVTDAQGHKVDFKNAIIIMTSNIGSQYILDVAGDNAHYDEMRRRVMEAMRNSFRPEFLNRIDEIIIFHGLDKKELRQIVLLQVQRLRQRLADRKISLKLSDAALDFLAEVGYDPVYGARPLKRAIQRELETQIAKAILRGEFTDGNTIFVDVQNERLSFSRLPAEVFTS

SEQ ID NO: 7183 - protein, 879 aa, Nostoc punctiforme
MQPTDPNKFTDKAWEAIVKSQDIVRAYQQQQLDVEHLIIALLEEPTSLAIRILARSEVDPIRFQQQLEAFIQRQPKVGKSDQLYLSRSLDVLLDKAEEARVRMKDSYISVEHILLAFAEDDRIGRKILKSFSADAAKLEATIKAVRGSQKVTDQSPESRYEALQKFGRDLTEQAKAGKLDPVIGRDDEIRRVIQVLSRRSKNNPVLIGEPGVGKTAIAEALAQRMVNGDVPESLKNRQLISLDIGSLIAGAKLRGEFEERLKAVLKEVMDSNGQIVLFIDELHTVVGTGSSQQGAMDAGNLLKPMLARGELRCIGATTLDEFRKHIEKDAALERRFQQVFVDQPSVENTISILRGLKERYEVHHNVKISDSALVAAATLSARYISDRFLPDKAIDLVDEAAAQLKMEITSKPAELETIDRRLMQLEMEKLSLAGEEKGTPQTKERLERIEQEIANLTEKQQIFNEQWQGEKQILEAISALKKEEDALRVQIEQAERAYDLNKAAQLKYGKLEGVQHEREAKEASLLEIQNQGSTLLREQVTEADIAEIVAKWTGIPVNRLLESERQKLLQLESHLHQRVIGQEEAVEAVAAAIRRARAGMKDPSRPIGSFLFMGPTGVGKTELARALAQFLFDSDDALVRLDMSEYMEKHSVSRLVGAPPGYVGYEEGGQLSEAVRRRPYSVVLLDEVEKAHPDVFNILLQVLDDGRITDSQGRTVDFRNSVIVMTSNIGSEHILDVSGDSQYETMRKRVMEGLRSHFRPEFLNRVDDIILFHTLNRTEMRQIIRIQLKRVENLLREQKIFFEISQAACDHLVESGYDPVYGARPLKRAIQREVENPLATKLLENTFISGDTILIDKNENGLSFSKKVLVKVSVPQIAT

SEQ ID NO: 7184 - protein, 822 aa, Nostoc punctiforme
MFERFTEKAIKVIMLAQEEARRLGHNFVGTEQILLGLIGEGTGVAAKVLKSMGVNLKDARIEVEKIIGRGSGFVAVEIPFTPRAKRVLELSLEEARQLGHNYIGTEHLLLGLIREGEGVAARVLENLGVDLSKVRTQVIRMLGETAEVSPGGSSGRTKTPTLDEFGSNLTQMAIDNKLDPVVGRAKEIERVIQILGRRTKNNPVLIGEPGVGKTAIAEGLASRIATKDVPDILEDKRVVTLDIGLLVAGTKYRGEFEERLKKIMDEIRSAGNVILVIDEVHTLIGAGAAEGAIDAANILKPALARGELQCIGATTLDEYRKHIERDAALERRFQPVMVGEPTVDETIEILYGLRERYEQHHKLKISDEALVAAAKLSDRYISDRYLPDKAIDLVDEAGSRVRLINSQLPPAAKELDKELRQILKEKDDAVRSQDFDKAGELRDREMEIKAEIRAIAQSKTNATGTEGEEPVVTEEDIAHIVASWTGVPVNKLTESESEKLLHMEDTLHQRLIGQDEAVRAVSRAIRRARVGLKNPNRPIASFVFSGPTGVGKTELAKSLAAYFFGSEEAMIRLDMSEYMERHTVSKLIGSPPGYVGYNEGGQLTEAVRRRPYTVVLFDEIEKAHPDVFNMLLQILEDGRLTDAKGRTVDFKNTLLILTSNIGSKVIEKGGSGIGFEFSEDASESTYNRIRSLVNEELKQYFRPEFLNRLDEIIVFRQLSKPEVTQIAEIMLKEVFGRLTEKGITLEVTDRFKDRLIQEGYSPSYGARPLRRAIMRLLEDSLAEEILSGRIKDGDTALVDVDENGVVQVSSQQRRELLPQGVE

SEQ ID NO: 7185 - protein, 836 aa, Nostoc punctiforme
MRVNFISPKVQAAREQEPIMFEHFTSEAIRVIMLAQEEARRLGHNFVGTEQILLGLMGEGTGVAAKVLAELGVTLKDARREVEKIIGRGSGFVPPEIPFTPKVKSLFEQSFKEAHSLGQNYINTEHLLLGLTEAGEGVAAKVLQNLGVDFKSVRSAIVRRLGENAPAFAGSGSQKRTQPLTMEEYGRNLTKLAQEGRLDPVVGREKEIERAIQILGRRTKNNPVLIGEPGVGKTAIAEGLAQRIINQDVPETLQDKQVISLDMGSLVAGTRFRGDFEERIKKVVEEVRTVGNIILVIDEIHTLVGAGGTEGGLDAANILKPALARGELQCIGATTLDEYRKHIERDAALERRFQPIMVGEPSVEETVQILYGLRGAYEQHHKVTILDSALVAAAELSDRYISDRFLPDKAIDLIDEAGSRVRLRNSQSSPNKELKRELAGVTKEKEAAVRVQDFDKAVTLRDQELKLAEQLQATFTPNEQPVNSTVVDEEDIAQIVASWTGVPVNKLTESESELLLHLEDTLHQRLIGQEQAVSAVSRGIRRARVGLKNPNRPIASFIFSGPTGVGKTELAKALASYFFGAEDSMIRLDMSEYMESHTVAKLIGSPPGYVGYDEGGQLTEAVRRKPYTVLLFDEIEKAHPDVFNMLLQILDDGHLTDAKGRKVDFKNTLIILTSNIGSKVIEKGGSGLGFDFDTQANASYNRIRTLVNEELKAYFRPEFLNRLDEIIVFTQLSRDEVKQIAEIMLREVSKRLTEKGITLEVSDRFKELVVQEGYNPSYGARPLRRAIMRLLEDSLAEAMLSGEITDGDTALIDVDDDSQVRVQKLEKRELLLANVG

SEQ ID NO: 7186 - protein, 856 aa, Haemophilus influenzae Rd
MNIEKFTTKFQEALSERQSLAIGKDNQFIEPVHLLTALLNQQGGSIAPILTASGVNVALLRNELKTELNKLPQVIGNGGDVQLSRQLINLLNLCDKFAQQNQDKFISSELFLFAALEERGTISDILKKCGAKKEQISQAIQHIRGGQNVNDQNAEESRQALEKYTIDLTARAESGKLDPVIGRDEEIRRAIQVLQRRTKNNPVLIGEPGVGKTAIVEGLAQRIVNGEVPEGLKNKRVLSLDMGALIAGAKYRGEFEERLKAVLNELSKEEGRVILFIDEIHTMVGAGKTDGAMDAGNLLKPSLARGELHCVGATTLDEYRQYIEKDAALERRFQKVFVDEPSVEDTIAILRGLKERYEIHHHVDITDPAIVAAATLSHRYISDRQLPDKAIDLIDEAASSIRMEIDSKPEPLDRLERRIIQLKLEQQALQKEEDEASRKRLEMLEKELAEKEREYAELEEVWKSEKATLSGSQHIKQELDTAKTELEQARRAGDLAKMSELQYGRIPDLEKQLEQAETSEGKEMTLLRYRVTDEEIAEVLSKATGIPVSKMMEGEKEKLLRMEDELHKRVIGQEEAVDAVANAIRRSRAGLSDPNRPIGSFLFLGPTGVGKTELCKTLAKFLFDSEDAMVRIDMSEFMEKHSVSRLVGAPPGYVGYEEGGYLTEAVRRRPYSVILLDEVEKAHADVFNILLQVLDDGRLTDGQGRTVDFRNTVVIMTSNLGSDLIQGNKDESYSEMKALVMSVVSQHFRPEFINRIDETVVFHPLGKENIRAIASIQLERLAKRMETRGYELVFTDALLDFIGEVGYDPIYGARPLKRAIQQEIENSLAQQILSGALLPGKVVTIDYANAEVQARQ

SEQ ID NO: 7187 - protein, 1122 aa, Plasmodium yoelii yoelii
MILRFVLNIKISKKVSFLNNTYNLNKYNEFKIKRNKYIKIYNSKNDKTNKFLFDEYDENCIKALIMAREVAKNNNENEVLLKHLLVAIIKTDSHIIDHIFKYFNISLQHFINKFNTEIAKNSFKKTGQEPYDNNHIPPEQIEFQKCSTKNNDQEKTLINNIIGNKIKDEEYNHIVTNNLDKEATKNNDTEASKNNSTESTKDNSTEATNNENCESEHVTDVSSSYNKMQENGIDTKLAAHEKDEKQNDEKQNEKQNDEPFLVNDNSGKRNNQKELKSNKEIKFSENCKLVLQNAILEAKKKNKIFVNLTDILISIINIAQENKECDFVKYLNELNISLSDLKKQVTNYDENNLNSNLIHCPINKNPIKNDEEQDGNKNLNNYSDKQNKNMTDQPNNIINNMNNEYINQEKYFKNNEDNNFTQNNKFMSSIITKDCLVDMVQQAYEKKLENFFGRKDEIKRIIEILGRKKKSNPLLVGETGVGKTAIVEQLAYLILKNKVPYHLKNCKIFQMNLGNIVAGTKYRGEFEEKMKQILANISKDKKNILFIDEIHVIVGAGSGEGSLDASNILKPFLSSDNLQCIGTTTFQEYSKYIETDKALRRRFNCVNIKPLNSNETYKLLKKIKNSYEQYHNIYYTDEALKSIILLSDDYLPTLNFPDKAIDILDEAGSYQKIKYERYITKKLRNENNIKTDSIKVSTNTNSNKIDNNSTNVTSQIESNYLVDDLHMKYVTSDVIENIVSKKSSISFIKKNKKEEEKIQNLKEKLNKIIIGQEKVIDILAKYLFKAITNIKDANKPIGTLLLCGSSGVGKTLSAQVISQYLFNDDNIIVINMSEYIDKHSVSKLFGSYPGYVGYKEGGELTEAVKKKPFSIILFDEIEKAHSDVLHVLLQILDNGLLTDSKGNKVSFKNTFIFMTTNVGSDIITDYFKVYNKNYANFGFKYYTQKEKIEKPDLQNSTNNNTQNDKDKIQTDLDIFEEKIKTNKWYDELKPEIEEELKKKFLPEFLNRIDEKILFRQFLKRDIIQILENMIQDLKKRIKKRKKLNILIDDNIIKYICSDENNIYDINFGARSIRRALYKYIEDPIAAFLISNEYNPNDTMHLTLLPNNKIHVELLNHTTTSLS

SEQ ID NO: 7188 - protein, 865 aa, Prochlorococcus marinus str. MIT 9313
MQPTADQFTEKGWAAIVLAQQLAQQRKHQQLETEHLLLSLLQQNALAGRILEKAGVSIGNLQTAVEAHLQEQPTMQAAPDSVYLGKGVNDLLDQAEKHKQAFGDSFISIEHLLLALAGDNRCGRKLLNQAGVDAGKLKVAIDAVRGNQKVTDQNPEGTYESLEKYGRDLSAAAREGKLDPVIGRDDEIRRTIQILSRRTKNNPVLIGEPGVGKTAIVEGLAQRIVNGDVPAALQNRQLITLDMGALIAGAKYRGEFEERLKAVLKEVTASEGQIVLFIDEIHTVVGAGATGGAMDASNLLKPMLARGELRCIGATTLDEHRQHIEKDPALERRFQQVLVDQPTVQDTISILRGLKERYEVHHGVRIADNALVAAAVLSSRYIADRFLPDKAIDLMDESAARLKMEITSKPEEIDEIDRKIVQLEMEKLSLGRESDSVSKERLEKLERELAELAEQQSALNAQWQQEKGAIDDLSSLKEEIERVQLQVEQAKRSYDLNKAAELEYGTLAGLQKQLSEKETALAQDGEAGDKSLLREEVTEDDIADVIAKWTGIPVAKLVQSEMEKLLGLEAELHQRVIGQEQAVQAVADAIQRSRAGLSDPNRPIASFLFLGPTGVGKTELSKALASQLFDSEAALVRIDMSEYMEKHSVSRLIGAPPGYVGYEAGGQLTEAVRRRPYAVILFDEVEKAHQDVFNVMLQILDDGRVTDGQGRTVDFTNTVLILTSNIGSQSILDLGGDDSQYREMERRVHDALHAHFRPEFLNRLDETIIFHSLRREELRQIVALQVNRLRERLCDRKLGLEISDTAADWLANAGYDPVYGARPLKRAIQRELETPIAKSILAGLYGDSQIVHVDVDVDQERLSFR

SEQ ID NO: 7189 - protein, 863 aa, Prochlorococcus marinus str. MIT 9313
MPRTMFERFTEKAIKVIMLAQEEARRLGHNFVGTEQILLGLIGEGTGVAAKVLKSMSVNLKDARVEVEKIIGRGSGFVAVEIPFTPRAKRVLELSLEEARQLGHNYIGTEHLLLGLIREGEGVAARVLENLGVDLAKVRTQVIRMLGETAEVTAGGGGGKGSTKTATLDEFGSNLTQLANESKLDPVVGRQNEIDRVIQILGRRTKNNPVLIGEPGVGKTAIAEGLAQRIQQGDIPDILEEKRVLTLDIGLLVAGTKYRGEFEERLKKIMEEIKAAGNVILVIDEVHTLIGAGAAEGAIDAANILKPALARGELQCIGATTLDEYRKHIERDAALERRFQPVMVGEPSIAETIEILQGLRERYEQHHRLKITDEALDAAANLGDRYISDRFLPDKAIDLIDEAGSRVRLLNSKLPPAAKEVDKELRKVQKEKEDAVRDQDFAKAGELREKEVELREKIRTLLQSSRQGSEESPPAEAENAVRSSDETPTPQPEKNTTAALIPHLTTPLVTEEDIANIVAAWTGVPVQKLTESESVKLLNMEETLHQRLIGQDEAVKAVSKAIRRARVGLKNPNRPIASFIFSGPTGVGKTELTKALATYFFGSEEAMIRLDMSEFMERHTVSKLIGSPPGYVGFNEGGQLTEAVRRRPYTVVLFDEIEKAHPDVFNLLLQLLEDGRLTDSKGRTVDFKNTLIIMTSNIGSKVIEKGGGGLGFEFSGENAEDSQYNRIKSLVNEELKQYFRPEFLNRLDEIIVFRQLSRNEVKEIAEIMLQEVFSRMQDKGITLTVSDAFKERLVEEGYNPSYGARPLRRAVMRLMEDSLAEEVLTGRIKDGDAAEMDVDDNKQIVVRHVSKTTATPELAGAGV

SEQ ID NO: 7190 - protein, 928 aa, Prochlorococcus marinus str. MIT 9313
MHPETSQAASAQGSLTSDPDRFSDDAWDLLLVGQDVARRWRHGQLDVEHLIQVLFSDRRYSDWVLALPIDSTALLDRLEGFLAEQPMARGDELFIGDDLEDLLEEADRSRVRWGSRLIDVSHLLIALGRDPRIGAELFEELGMPSERLEAELRRLPKGRRQLRTSTPTSPPAPDSAPPAPASVASQTRPVSSPTPPIIQEPAVATEEPTPLQLQQEPQALEAYGRDLTAAAQAGQLDPVIGRDPEIRRLIKVLSRRSKNNPVLIGAPGVGKTAIAELLAQRIVAGEVPDSLKGLRLVSLDLGALIAGAKFRGQFEERLRSVLKEVSDPDAGVVLFIDELHTVVSSDRSSADAGSLLKPALARGDLRCIGATTPENYRRTVEKDQALNRRFQQVLIKEPSLELSVEILRGLKERYELHHGVTITDGAVTAANRLADRYISDRCLPDKAIDLIDEAAAQLKMDVTSKPQVVEEAEAELRRVELALLAAEQAPEVERVQLQAARIAAASQLTELQERWQIERDHLAELRDLLQQDEDLRNAIAEAERLGDLEAAARLQYDQLHRVQQRRADLEETLAVAQASGSALLREQVEAEDIADVVARWTGIPVQRLLAAERQKLLDLEAHLGERVIGQPEAVQAVAAAIRRARAGMKDPRRPVGSFLFLGPTGVGKTELAKALAASLFDEEEALVRLDMSEFMERNAVARLLGAPPGYVGYEEGGQLTEAVCRRPYAVLLLDEIEKAHPDVFNVLLQVLDDGRLTDSQGRTVDFRHTVVVMTSNLASRAILDASRLAQQEGTDGDCLDQSLTQKVDQALNKQFRPEFLNRIDEVIRFRPLKAADLQRIVQLQLADLSSLLAEQGLELRVEADAVEALALQGYEPEYGARPLRRVLRRRVENPLATELLEERFSGARAVRVIPGAQASEPFQFLSED

SEQ ID NO: 7191 - protein, 855 aa, Pasteurella multocida
MNIEKFTTKFQQALQEAQSLAIGKDNQFIEPVHLLTALLNQQGGSTAPILTASGANLPLLRNELNAELSKLPQVSGSGGDVQVSRSLVNLLNLCDKLAQQRQDKFISSELFLLAALEDKTLGDVLKKCGVKKENLQQAIEKVRGGQNVNDPNAEESRQALEKYTIDLTARAESGKLDPVIGRDEEIRRAIQVLQRRTKNNPVLIGEPGVGKTAIVEGLAQRIVNGEVPEGLKNKRVLSLDMGALIAGAKYRGEFEERLKAVLNELSKEEGRVILFIDEIHTMVGAGKTDGAMDAGNLLKPSLARGELHCVGATTLDEYRQYIEKDAALERRFQKVFVGEPTVEDTIAILRGLKERYEIHHHVQITDPAIVAAATLSHRYVSDRQLPDKAIDLIDEAASSIRMEIDSKPQPLDRLERRIIQLKLEQQALQKEDDDASRKRLAMLEKELGEKEREYAELEDVWKAEKAALSGTQHIKAELDSAKTQMEQARRASDFAKMSELQYGVIPALEKQLAQAESAEGKEMTLLRYRVTDEEIAEVLSRATGIPVAKMMEGEKEKLLRMEEELHKRVIGQHEAIEAVSNAIRRSRAGLSDPNRPIGSFLFLGPTGVGKTELCKTLANFLFDDENAMVRIDMSEFMEKHSVSRLVGAPPGYVGYEEGGYLTEAVRRRPYSVILLDEVEKAHHDVFNILLQVLDDGRLTDGQGRTVDFRNTVVIMTSNLGSHLIQENSTLDYPSMKELVMSVVGQHFRPEFINRIDETVVFHPLGKENIREIATIQLARLIKRMESHGYQLHFTDACLDFIGEVGYDPVYGARPLKRAIQQEIENPLAQQILSGKLLPNQLVTIDYVDGKVIANQ

SEQ ID NO: 7192 - protein, 854 aa, Chlamydia trachomatis
MFEKFTNRAKQVIKLAKKEAQRLNHNYLGTEHILLGLLKLGQGVAVNVLRTLGVDFDTAKHEVERLIGYGPEIQVCGDPALTGRVKKSFESANEEAALLEHNYVGTEHLLLGILNQSDGVALQVLENLHVDPKEIRKEILKELETFNLQLPPSSSITPRNTNSSSSSKSSSPLGGHTLGGDKPEKLSALKAYGYDLTEMFKESRLDPVIGRSAEVERLILILCRRRKNNPVLVGEAGVGKTAIVEGLAQKIVSGEVPEALRKKRLITLDLALMIAGTKYRGQFEERIKAVMDEVRKHGNILLFIDELHTIVGAGAAEGAIDASHILKPALARGEIQCIGATTLDEYRKHIEKDAALERRFQKIVVQPPSVDETVEILRGLKKKYEEHHNVFITDEALVAAAKLSDQYVHGRFLPDKAIDLLDEAGARVRVNTMGQPSDLVRLEAEIEKTKQAKEQAIGTQEYEKAASLRDEEKKLREKLGNMKQQWESNKEEHQVPVDEEAVAQVVSVQTGIPAARLTEAESEKLLTLETTLQKKVIGQSQAVASICRAIRRSRTGIKDPNRPMGSFLFLGPTGVGKTLLAQQIAIEMFGGEDSLIQVDMSEYMEKFAATKMMGSPPGYVGHEEGGHLTEQVRRRPYCVVLFDEIEKAHPDIMDLMLQILEQGRLTDSFGRKIDFRNTIIIMTSNLGADLIRKSGEIGFGLRSHMDYAVIKEKIDAAVKKHLKPEFINRLDESVIFKPLEKEALSEIIHLEINKLGSRLQNYQMDLNIPDSVISFLVTKGHSPEMGARPLRRVVEQYLEDPLAEMLLKESCRQEARKLRARLTEERVVFEREEEAVSALAIEGDGSEPITADES

SEQ ID NO: 7193 - protein, 848 aa, Mycobacterium tuberculosis CDC1551
MFERFTDRARKVVVLAQEEARMLNHNYIGTEHILLGLIHEGEGVAAKSLESLGISLEGVRSQVEEIIGQGQQAPSGHIPFTPRAKKVLELSLREALQLGHNYIGTEHILLGLIREGEGVAAQVLVKLGAELTRVRQQVIQLLSGYQGKEAAEAGTGGRGGESGSPSTSLVLDQFGRNLTAAAMEGKLDPVIGREKEIERVMQVLSRRTKNNPVLIGEPGVGKTAVVEGLAQAIVHGEVPETLKDKQLYTLDLGSLVAGSRYRGDFEERLKKVLKEINTRGDIILFIDELHTLVGAGAAEGAIDAASILKPKLARGELQTIGATTLDEYRKYIEKDAALERRFQPVQVGEPTVEHTIEILKGLRDRYEAHHRVSITDAAMVAAATLADRYINDRFLPDKAIDLIDEAGARMRIRRMTAPPDLREFDEKIAEARREKESAIDAQDFEKAASLRDREKTLVAQRAEREKQWRSGDLDVVAEVDDEQIAEVLGNWTGIPVFKLTEAETTRLLRMEEELHKRIIGQEDAVKAVSKAIRRTRAGLKDPKRPSGSFIFAGPSGVGKTELSKALANFLFGDDDALIQIDMGEFHDRFTASRLFGAPPGYVGYEEGGQLTEKVRRKPFSVVLFDEIEKAHQEIYNSLLQVLEDGRLTDGQGRTVDFKNTVLIFTSNLGTSDISKPVGLGFSKGGGENDYERMKQKVNDELKKHFRPEFLNRIDDIIVFHQLTREEIIRMVDLMISRVAGQLKSKDMALVLTDAAKALLAKRGFDPVLGARPLRRTIQREIEDQLSEKILFEEVGPGQVVTVDVDNWDGEGPGEDAVFTFTGTRKPPAEPDLAKAGAHSAGGPEPAAR

SEQ ID NO: 7194 - protein, 848 aa, Mycobacterium tuberculosis H37Rv
MFERFTDRARRVVVLAQEEARMLNHNYIGTEHILLGLIHEGEGVAAKSLESLGISLEGVRSQVEEIIGQGQQAPSGHIPFTPRAKKVLELSLREALQLGHNYIGTEHILLGLIREGEGVAAQVLVKLGAELTRVRQQVIQLLSGYQGKEAAEAGTGGRGGESGSPSTSLVLDQFGRNLTAAAMEGKLDPVIGREKEIERVMQVLSRRTKNNPVLIGEPGVGKTAVVEGLAQAIVHGEVPETLKDKQLYTLDLGSLVAGSRYRGDFEERLKKVLKEINTRGDIILFIDELHTLVGAGAAEGAIDAASILKPKLARGELQTIGATTLDEYRKYIEKDAALERRFQPVQVGEPTVEHTIEILKGLRDRYEAHHRVSITDAAMVAAATLADRYINDRFLPDKAIDLIDEAGARMRIRRMTAPPDLREFDEKIAEARREKESAIDAQDFEKAASLRDREKTLVAQRAEREKQWRSGDLDVVAEVDDEQIAEVLGNWTGIPVFKLTEAETTRLLRMEEELHKRIIGQEDAVKAVSKAIRRTRAGLKDPKRPSGSFIFAGPSGVGKTELSKALANFLFGDDDALIQIDMGEFHDRFTASRLFGAPPGYVGYEEGGQLTEKVRRKPFSVVLFDEIEKAHQEIYNSLLQVLEDGRLTDGQGRTVDFKNTVLIFTSNLGTSDISKPVGLGFSKGGGENDYERMKQKVNDELKKHFRPEFLNRIDDIIVFHQLTREEIIRMVDLMISRVAGQLKSKDMALVLTDAAKALLAKRGFDPVLGARPLRRTIQREIEDQLSEKILFEEVGPGQVVTVDVDNWDGEGPGEDAVFTFTGTRKPPAEPDLAKAGAHSAGGPEPAAR

SEQ ID NO: 7195 - protein, 857 aa, Escherichia coli O157:H7
MRLDRLTNKFQLALADAQSLALGHDNQFIEPLHLMSALLNQEGGSVSPLLTSAGINAGQLRTDINQALNRLPQVEGTGGDVQPSQDLVRVLNLCDKLAQKRGDNFISSELFVLAALESRGTLADILKAAGATTANITQAIEQMRGGESVNDQGAEDQRQALKKYTIDLTERAEQGKLDPVIGRDEEIRRTIQVLQRRTKNNPVLIGEPGVGKTAIVEGLAQRIINGEVPEGLKGRRVLALDMGALVAGAKYRGEFEERLKGVLNDLAKQEGNVILFIDELHTMVGAGKADGAMDAGNMLKPALARGELHCVGATTLDEYRQYIEKDAALERRFQKVFVAEPSVEDTIAILRGLKERYELHHHVQITDPAIVAAATLSHRYIADRQLPDKAIDLIDEAASSIRMQIDSKPEELDRLDRRIIQLKLEQQALMKESDEASKKRLDMLNEELSDKERQYSELEEEWKAEKASLSGTQTIKAELEQAKIAIEQARRVGDLARMSELQYGKIPELEKQLEAATQLEGKTMRLLRNKVTDAEIAEVLARWTGIPVSRMMESEREKLLRMEQELHHRVIGQNEAVDAVSNAIRRSRAGLADPNRPIGSFLFLGPTGVGKTELCKALANFMFDSDEAMVRIDMSEFMEKHSVSRLVGAPPGYVGYEEGGYLTEAVRRRPYSVILLDEVEKAHPDVFNILLQVLDDGRLTDGQGRTVDFRNTVVIMTSNLGSDLIQERFGELDYAHMKELVLGVVSHNFRPEFINRIDEVVVFHPLGEQHIASIAQIQLKRLYKRLEERGYEIHISDEALKLLSENGYDPVYGARPLKRAIQQQIENPLAQQILSGELVPGKVIRLEVNEDRIVAVQ

SEQ ID NO: 7196 - protein, 175 aa, Escherichia coli O157:H7
HPDVFNILLQVLDDGRLTDGQGRTVDFRNTVVIMTSNLGSDLIQERFGELDYAHMKELVLGVVSHNFRPEFINRIDEVVVFHPLGEQHIASIAQIQLKRLYKRLEERGYEIHISDEALKLLSENGYDPVYGARPLKRAIQQQIENPLAQQILSGELVPGKVIRLEVNEDRIVAVQ

SEQ ID NO: 7197 - protein, 870 aa, Chlamydia muridarum
MSYMLKSIPPRHIQVFMFEKFTNRAKQVIKLAKKEAQRLNHNYLGTEHILLGLLKLGQGVAVNVLRTLGVDFDTAKNEVERLIGYGPEIQVYGDPALTGRVKKSFESANEEASILEHNYVGTEHLLLGILNQADGVALQVLENLHIDPKEIRKEILKELETFNLQLPPSSSITPRNTNSSSSSSSKSSSLGGHSLGGDKPEKLSALKAYGYDLTEMFKEARLDPVIGRSAEVERLILILCRRRKNNPVLIGEAGVGKTAIVEGLAQKIVSGEVPEALRKKRLITLDLALMIAGTKYRGQFEERIKAVMDEVRKHGNILLFIDELHTIVGAGAAEGAIDASHILKPALARGEIQCIGATTLDEYRKHIEKDAALERRFQKIVVQPPSVDETVEILRGLKKKYEEHHNVFITDEALVAAAKLSDQYVHGRFLPDKAIDLLDEAGARVRVNTMGQPSELLRLEAEIESTKQAKEQAIGTQEYEKAASLRDEEKKLREKLSNMKQQWESNKEEHQVPVDEEAVAQVVSVQTGIPAARLTEAESEKLLMLENTLQKKVIGQDQAVASICRAIRRSRTGIKDPNRPMGSFLFLGPTGVGKTLLAQQIAVEMFGGEDSLIQVDMSEYMEKFAATKMMGSPPGYVGHEEGGHLTEQVRRRPYCVVLFDEIEKAHPDIMDLMLQILEQGRLTDSFGRKIDFRNTIIIMTSNLGADLIRKTGEIGFGLRSHMDYGVIKEKIDAAVKKHLKPEFINRLDESVIFKPLEKEALSEIIHLEINKLGSRLQNHQMALNIPDSVVSFLVDKGHSPEMGARPLRRVVEQYLEDPLAEMLLKESCRQEARKLCARLIEERVIFEREDEISALAVEGDGPASVTADES

SEQ ID NO: 7198 - protein, 875 aa, SYNECHOCOCCUS SP. WH 8102
MPIRFVQDNRNSHMQPTAEQFTEQAWAAIVAAQQLAQASRHQQLETEHLLLALLRQNGLAGRILSKTGVDVTTFEASVEGHLQRLPSLGSAPDSVFLGRSLNKALDRAEQRRDGFGDSFIAIEHLLLALAEDDRCGRQLLSQAGVTTNTLKEAITAVRGNQTVTDQNPEATYESLAKYGRDLTAAARDGQLDPVIGRDEEIRRTIQILSRRTKNNPVLIGEPGVGKTAIVEGLAQRIVNGDVPQALQNRQLITLDMGALIAGAKYRGEFEERLKAVLKEVTTSDGQIVLFIDEIHTVVGAGASGGAMDASNLLKPMLARGELRCIGATTLDEHRQHIEKDPALERRFQQVLVDQPTVPDTISILRGLKERYEVHHGVRIADSALVAAAMLSSRYITDRFLPDKAIDLVDESAARLKMEITSKPEQIDEIDRKILQLEMEKLSLGRESDSASQERLQRIERELAELGEQQSSLNAQWQSEKGAIDQLSALKEEIERVQLQVEQAKRNYDLNKAAELEYGTLATLQRQLQEQEDLLEDEDGTDKTLLREEVTEDDIAEVIAKWTGIPVARLVQSEMEKLLQLEDDLHQRVIGQNQAVTAVADAIQRSRAGLSDPNRPIASFLFLGPTGVGKTELSKALANRLFDSDDAMVRIDMSEYMEKHTVSRLIGAPPGYVGYEAGGQLTEAVRRRPYAVILFDEVEKAHPDVFNVMLQILDDGRVTDGQGRTVDFTNTVLILTSNIGSQSILELAGDPEQHTAMEQRVNEALKAKFRPEFLNRLDDQIIFRSLEKEELRRIVSLQVERLRSRLEQRKLDLQLSDIAADWLATIGFDPVYGARPLKRAIQRELETPIAKAILAGQLSEGQTVQVDAGDDKLSIS

SEQ ID NO: 7199 - protein, 846 aa, SYNECHOCOCCUS SP. WH 8102
MFERFTEKAIKVIMLAQEEARRLGHNFVGTEQILLGLIGEGTGVAAKVLKSMGVNLKDARVEVEKIIGRGSGFVAVEIPFTPRAKRVLELSLEEARQLGHNYIGTEHLLLGLIREGEGVAARVLENLGVDLAKVRTQVIRMLGETAEVSGGGGGGGAKGSTKTPTLDEFGSNLTQMANEAKLDPVVGRHNEIERVIQILGRRTKNNPVLIGEPGVGKTAIAEGLAQRIQQGEIPDILEDKRVLTLDIGLLVAGTKYRGEFEERLKKIMEEIKAAGNVILVIDEVHTLIGAGAAEGAIDAANILKPALARGELQCIGATTLDEYRKHIERDAALERRFQPVNVGEPSIDDTIEILRGLRERYEQHHRLKITDDALVAAATLGDRYISDRFLPDKAIDLIDEAGSRVRLLNSKLPPEAKEVDKELRGVQKQKEDAVRDQDFTKAGELREKEVELRDQIRSLLQANRTDATAVAEASADQSDAPAAESAESSPMVNEEDIAQIVASWTGVPVQKLTESESVKLLNMEETLHQRLIGQDEAVKAVSKAIRRARVGLKNPNRPIASFIFSGPTGVGKTELTKALATYFFGSEEAMIRLDMSEFMERHTVSKLIGSPPGYVGFNEGGQLTEAVRRRPYTVVLFDEIEKAHPDVFNLLLQLLEDGRLTDSKGRTVDFKNTLVIMTSNIGSKVIEKGGGGLGFEFSGESAEESQYTRIRSLVNEELKQYFRPEFLNRLDEIIVFRQLSRDEVKEIAEIMLKEVFGRMGEKGITLTVSDAFKERLVEEGYNPAYGARPLRRAVMRLLEDSLAEEVLSGRIKDGDHAEVDVDDDKKVVVRHKGLAESSPQLAGAAV

SEQ ID NO: 7200 - protein, 900 aa, SYNECHOCOCCUS SP. WH 8102
MTGTPASRGSLTHEPDRFSDPAWELLLAGQDMARRWRHDQLDVEHLIQVLFSDSSFRRWVEPLPLRSDDLLDRLEDVLADQPPARGDQLFIGEDLEQLLETADQVRGRWGDRSIDVPQLIVAVGADPRIGAELFAAQGLAVDRLESLLRQPSVSPAPAPPPVPTAASAPAPTPRSAPAPRVMAPEPEPMVELEREPSALEAYGRDLTEEAEAGSLDPVIGRDSEIRNLIKVLSRRSKNNPVLIGEPGVGKTAIAELLAQRIVAGEVPDSLQGLRLIALDLGALIAGAKFRGQFEERLRSVLEEVSRSDSGVVLFIDELHTVVGSDRSSTDAGSLLKPALARGDLRCIGATTPEEYRRTVEKDPALNRRFQQVLIREPDLELSLEILRGLRERYELHHGVTITDEAIQTANRLADRYISDRCLPDKAIDLIDEAAAQLKIEVTSKPQVVEEAEADLRRVELALLAAEEAPEEERIQLQRQRLEVSSRLDDLRRRWQEERTQLEELGQLLQQDEDLRHAIAEAEREGALEEAARLQYDQLHTVQQRREALEASQAEAQSAGTALLREQVEAGDIADLVARWTGIPVQRLLAGERRKLLALESHLSERVIGQVEAVAAVAAAIRRARAGMKDPRRPVGSFLFLGPTGVGKTELAKALATSLFDEEEALVRLDMSEFMERNASARLIGAPPGYVGYEEGGQLTEAVRRRPYAVLLLDEVEKAHPDVFNLLLQVLDDGRLTDSQGLTVDFRHTVVVMTSNLASPVILEHARSGSSDDAQLQQQVDAALSSQFRPEFLNRIDEVIRFRPLKVKDLVRIVRLQLADLSTLMAEQGLSLEVDDAVADSLARQGHEPEYGARPLRRVLRRQLENPLATQLLEERFRSAHGIRVRCGTDDGASLEFEPLE

SEQ ID NO: 7201 - protein, 813 aa, Bacillus halodurans
MMFGRFTERAQKVLALAQEEAIRLGHNNIGTEHILLGLIREGEGIAAKALQALGLGPEKIQKEVETLIGKGQDGAKTIHYTPRAKKVIELSMDEARKLGHSYVGTEHILLGLIREGEGVAARVLNNLGVSLNKARQQVLQLLGSNETSSSSQQGGGAANANTPTLDSLARDLTAIAREEGLDPVIGRSKEIERVIQVLSRRTKNNPVLIGEPGVGKTAIAEGLAQAIIHNEVPETLRNKRVMTLDMGTVVAGTKYRGEFEDRLKKVMDEIRQAGNVILFIDELHTLIGAGGAEGAIDASNILKPSLARGELQCIGATTLDEYRKYIEKDAALERRFQPIQVNEPSLDESIQILKGLRDRYEAHHRVTITDEAIEEAVKLSDRYIQDRFLPDKAIDLIDEAASKVRLRSYTAPPNLKELEQKLEETRKEKDAAVQSQEFEKAASLRDSEQRIREELDQMKNDWKQKQGQENTQVVVDDIAQVVASWTGIPVSKLAEEETERLLKMEEILHKRVIGQEEAVKAISKAVRRARAGLKDPKRPIGSFIFLGPTGVGKTELARAVAETLFGDEDAFIRIDMSEYMEKHATSRLVGSPPGYVGHDEGGQLTEKVRRKPYSVILLDEIEKAHPEVFNILLQVLEDGRLTDSKGRTVDFRNTAVIMTSNVGASTLRKNKFLGFTTDSEGSEYKDMKDKVMTELKNSFRPEFLNRIDEIIVFHSLEKKHVREIITLMADQLKKRLEEQGVSFELTEAAKDKITDLGYDPEYGARPLRRALQREVEDRLSEELLKGTIQKGQRAIIDVENGELVVHSKEGATL

SEQ ID NO: 7202 - protein, 711 aa, Bacillus halodurans
MKCQQCQTNEATVTLHVKINQSSQQLHVCSSCYQQIEQPFGFSDFSSFDNMFKQWIGSTSSSMNGSDQPVSSIAMKSKTNHSGGGFLDQHGRNVTAEAKAGQIDPVIGRDQEVERLIQILCRRTKNNPVLIGEAGVGKTAIVEGFARRIAEGNVPAKMKNKEVYELELSSLVAGTSYRGQFEEKMEQLVRELEARDDVILFIDEIHMVVGAGATSEGSMDAGNILKPALARGQLQIIGATTLNEYRKIEKDPALERRFQPITVKEPTLEAAVEILKGVRPIYEAYHHVSYPDDVLEACVRLSDRYIQDRFLPDKAIDLMDEIGSALTLTSGPTTLDELKERLAEITKEKQQATAQEDYERAAKLRDEENLLHKQMNENRAEKTEVTVADIQGLIEKRTGIPVRKLQKAEQTKMKDLHNRLARQVIGQAEAVEKVAKAIKRSRAGLKPKNRPISFMFVGPTGVGKTELTKTLAQELFGSKEAMIRLDMSEFMEKHSVSKLIGSPPGYVGHDEGGQLTEQVRRKPYSIILLDEIEKAHPDVQHMFLQILEDGRLTDSQGRAVSFKDTVIIMTSNAGVGVKKITVGFEKNVETQNKAGILEQINQYFKPEFLNRLDAIIEFNHLTEQDLMRIVDLMLQDLGDRLAEQDISLTVSEKAKAQLVKIGSDRAFGARPLRRAIQDHVEDSITEKLIDEESINAIHVDYDVVQQSFTFA

SEQ ID NO: 7203 - protein, 290 aa, Dichelobacter nodosus
LNERVVGQKTAVEAVANAIRRNRAGLSDPKRPIGSFLFLGPTGVGKTELCRTLAQFLFDSEENMVRIDMSEFMEKHSVARLIGAPPGYVGYDQGGYLTEAVRRKPYSVVLFDEVEKAHSDVFNTLLQVLDEGRLTDGQGRTVDFRHTVIIMTSNLGSDMIQLLAEKSYEEMKSAVMEIVMAHFRPEFINRIDEAIVFHGLAKTHMYRIAQIQLERLRQRLQTRELLLSVEEDAINQLVELGYDPLFGARPLKRAIQNYIENPLAQALLAGQYLPQSTITIGFDGTNFTFH

SEQ ID NO: 7204 - protein, 857 aa, Salmonella enterica subsp. enterica serovar Typhi
MRLDRLTNKFQLALADAQSLALGHDNQFIEPLHLMSALLNQEGGSIRPLLTSAGINAGQLRTAIDQALSRLPQVEGTGGDVQPSSELVRVLNLCDKLAQKRGDNFISSELFVLAALESRGTLTDLLKSAGATTANITQAIEQMRGGESVNDQGAEDQRQALKKYTVDLTERAEQGKLDPVIGRDEEIRRTIQVLQRRTKNNPVLIGEPGVGKTAIVEGLAQRIINGEVPEGLKGRRVLALDMGALVAGAKYRGEFEERLKGVLNDLAKQEGNVILFIDELHTMVGAGKADGAMDAGNMLKPALARGELHCVGATTLDEYRQYIEKDAALERRFQKVFVAEPSVEDTIAILRGLKERYELHHHVQITDPAIVAAATLSHRYIADRQLPDKAIDLIDEAASSIRMQIDSKPEELDRLDRRIIQLKLEQQALMKESDEASKKRLDMLNEELDDKERQYSELEEEWKAEKASLSGTQTIKAELEQAKIAIEQARRVGDLARMSELQYGKIPELEKQLEAATQSEGKTMRLLRNKVTDAEIAEVLARWTGIPVSRMLEGEREKLLRMEQELHSRVIGQNEAVEAVSNAIRRSRAGLSDPNRPIGSFLFLGPTGVGKTELCKALANFMFDSDDAMVRIDMSEFMEKHSVSRLVGAPPGYVGYEEGGYLTEAVRRRPYSVILLDEVEKAHPDVFNILLQVLDDGRLTDGQGRTVDFRNTVVIMTSNLGSDLIQERFGELDYGRMKEMVLGVVSQNFRPEFINRIDEVVVFHPLGEQHIASIAQIQLQRLYKRLEERGYEIHISDEALKLLSANGYDPVYGARPLKRAIQQQIENPLAQQILSGELVPGKVIRLEANDDRIVAVQ

SEQ ID NO: 7205 - protein, 887 aa, Salmonella enterica subsp. enterica serovar Typhi
METPVSRSALYGKLAGPLFRSLESATAFCKLRSNPWGELTHWLHQLTQQPDNDILHVLRHYQIPLSDVEKALLRQLDMLPAGASAISDFSHHIDLSVEKAWMLASVRYGDNKIRSGWLLLALLTTPELRRVLSSICAPLATLPVDELTEILPSLIETSPEAQERPYDGSGLASAIPGESSQAIPNGVQDGKSALAKYCQDMTAQARDGKIDPVTGREHEIRTMTDILLRRRQNNPLLTGEAGVGKTAVVEGFALAIAQGEVPPALREVRLLALDVGALLAGASMKGEFESRLKGLLEEAGRSPQPVILFVDEVHTLVGAGGASGTGDAANLLKPALACGTLRTIGATTWSEYKRHIEKDPALTRRFQVLQIAEPEEIPAMEMVRGLVDTLEKHHNVLILDEAVRAAVQLSHRYIPARQLPDKAISLLDTAAVRVALTLHTPPASVQFLRQQLKAAEMERSLLQKQEKMGIQSDERCDALTARIFSLNDELTASESRWQRELELVHTLQELRVAESDADDKTTLQQAETALREWQGDAPVVFPEVSAAIVAAIVADWTGIPAGRMVKDEASQVLELPARLAQRVTGQDGALAQIGERIQTARAGLGDPRKPVGVFMLAGPSGVGKTETALALAEAIYGGEQNLVTINMSEFQEAHTVSTLKGAPPGYVGYGEGGVLTEAVRRHPWSVVLLDEIEKAHHDVHELFYQVFDKGGMEDGEGTHVDFKNTTLLLTTNVGSDLISQMCEDPALMPDATGLKEALMPELRKHFPAAFLGRVTVIPYLPLDETSRGVIARLHLDRLVARMGEQHGVTLTYSEELVAHIVACCPMHETGARLLIGYIEQHILPQLSRYWLQAMTEKAAIRQIDIGVNGDEQIVFETTSQEGICQKS

SEQ ID NO: 7206 - protein, 707 aa, Homo sapiens
MLGSLVLRRKALAPRLLLRLLRSPTLRGHGGASGRNVTTGSLGEPQWLRVATGGRPGTSPALFSGRGAATGGRQGGRFDTKCLAAATWGRLPGPEETLPGQDSWNGVPSRAGLGMCALAAALVVHCYSKSPSNKDAALLEAARANNMQEVSRLLSEGADVNAKHRLGWTALMVAAINRNNSVVQVLLAAGADPNLGDDFSSVYKTAKEQGIHSLEDGGQDGASRHITNQWTSALEFRRWLGLPAGVLITREDDFNNRLNNRASFKGCTALHYAVLADDYRTVKELLDGGANPLQRNEMGHTPLDYAREGEVMKLLRTSEAKYQEKQRKREAEERRRFPLEQRLKEHIIGQESAIATVGAAIRRKENGWYDEEHPLVFLFLGSSGIGKTELAKQTAKYMHKDAKKGFIRLDMSEFQERHEVAKFIGSPPGYVGHEEGGQLTKKLKQCPNAVVLFDEVDKAHPDVLTIMLQLFDEGRLTDGKGKTIDCKDAIFIMTSNVASDEIAQHALQLRQEALEMSRNRIAENLGDVQISDKITISKNFKENVIRPILKAHFRRDEFLGRINEIVYFLPFCHSELIQLVNKELNFWAKRAKQRHNITLLWDREVADVLVDGYNVHYGARSIKHEVERRVVNQLAAAYEQDLLPGGCTLRITVEDSDKQLLKSPELPSPQAEKRLPKLRLEIIDKDSKTRRLDIRAPLHPEKVCNTI

SEQ ID NO: 7207 - protein, 677 aa, Homo sapiens
MLGSLVLRRKALAPRLLLRLLRSPTLRGHGGASGRNVTTGSLGEPQWLRVATGGRPGTSPALFSGRGAATGGRQGGRFDTKCLAAATWGRLPGPEETLPGQDSWNGVPSRAGLGMCALAAALVVHCYSKSPSNKDAALLEAARANNMQEVSRLLSEGADVNAKHRLGWTALMVAAINRNNSVVQVLLAAGADPNLGDDFSSVYKTAKEQGIHSLEVLITREDDFNNRLNNRASFKGCTALHYAVLADDYRTVKELLDGGANPLQRNEMGHTPLDYAREGEVMKLLRTSEAKYQEKQRKREAEERRRFPLEQRLKEHIIGQESAIATVGAAIRRKENGWYDEEHPLVFLFLGSSGIGKTELAKQTAKYMHKDAKKGFIRLDMSEFQERHEVAKFIGSPPGYVGHEEGGQLTKKLKQCPNAVVLFDEVDKAHPDVLTIMLQLFDEGRLTDGKGKTIDCKDAIFIMTSNVASDEIAQHALQLRQEALEMSRNRIAENLGDVQISDKITISKNFKENVIRPILKAHFRRDEFLGRINEIVYFLPFCHSELIQLVNKELNFWAKRAKQRHNITLLWDREVADVLVDGYNVHYGARSIKHEVERRVVNQLAAAYEQDLLPGGCTLRITVEDSDKQLLKSPELPSPQAEKRLPKLRLEIIDKDSKTRRLDIRAPLHPEKVCNTI

SEQ ID NO: 7208 - protein, 322 aa, Homo sapiens
GKTELAKQTAKYMHKDAKKGFIRLDMSEFQERHEVAKFIGSPPGYVGHEEGGQLTKKLKQCPNAVVLFDEVDKAHPDVLTIMLQLFDEGRLTDGKGKTIDCKDAIFIMTSNVASDEIAQHALQLRQEALEMSRNRIAENLGDVQISDKITISKNFKENVIRPILKAHFRRDEFLGRINEIVYFLPFCHSELIQLVNKELNFWAKRAKQRHNITLLWDREVADVLVDGYNVHYGARSIKHEVERRVVNQLAAAYEQDLLPGGCTLRITVEDSDKQLLKSPELPSPQAEKRLPKLRLEIIDKDSKTRRLDIRAPLHPEKVCNTI

SEQ ID NO: 7209 - protein, 848 aa, Cytophaga hutchinsonii
MEAKFSNRVKEVISLSREEALRLGHDYIGAEHLLLGMIREGEGVAISLLKKLGITLDSLKKSLEEAVRGTATGNVKNLTNIPLTRQAEKVLKITYLEAKIFKSDLIGTEHLLLSVLRDEDNVATQILNKFDITYDVIKELLEYHTHTPKATDAEDADDDSSRLFGNSGSGAGKEAARPGAEKSRTPVLDNFGRDLTKYAEDGKLDPIIGREKEIERVAQILSRRKKNNPILIGEPGVGKTAIAEGLALRIVQKKVSRVLFGKRVVTLDLASLVAGTKYRGQFEERMKAVMNELEKSPEVILFIDEIHTIVGAGGASGSLDASNMFKPALARGDIQCIGATTLDEYRQYIEKDGALARRFQIVMVDATTPEETVQILNNIKEKYEDHHNVIYSPEALEACVKLSDRYISDRFLPDKAIDVLDEAGARVHINNIHVPADILKLEEQIENIKKEKNKVVKSQKYEEAAQLRDSEKKLIEQLDNAKLRWEEETKKKRYHVKEENVAEVIAMMTGIPSARVAQKESLKLLSMGSDLKAAVVGQDQAIEKLVKAIQRTRVGLKDPKKPIGSFIFLGPTGVGKTELAKSLAKYLFDKEDSLVRIDMSEYMEKFSVSRLVGAPPGYVGYEEGGQLTEKIRRKPYSVVLLDEIEKAHPDVFNLMLQVLDDGILTDGLGRRVDFRNTIIIMTSNIGVRDLKDFGSGIGFNTQSRKENVDEMMKGTIQNALRKAFSPEFLNRLDDVIVFNSLTREDIHVIIDITLAKVFSRITTLGYTIELTDKAKDFLAERGYDQQYGARPLNRAIQKYLEDPIAEEILKGDVQEGDTILADYKEGADGLTVRNKKQAEETTEGEKEK

SEQ ID NO: 7210 - protein, 491 aa, Burkholderia fungorum
NGDLTDVARYLFIDEIHTLIGAGAASGGTLDASNLLKPALSSGTLKCIGATTFTEYRGIFEKDAALSRRFQKVDVTEPTVEQTVAILRGLKSRFEEHHGVKYSSGALSAAAELSARFITDRHLPDKAIDVIDEAGAAQRILPKSKQKKTIGKNEIEEIISKIARVPPQSVSQDDRSKLQTLDRDLKSVVFGQDPAIDALSAAIKMARAGLGKLDKPIGAFLFSGPTGVGKTEVAKQLAFTLGIELIRFDMSEYMERHAVSRLIGAPPGYVGFDQGGLLTEAVTKKPHCVLLLDEIEKAHPDIYNVLLQVMDHGTLTDNNGRKADFRNVIIIMTTNAGAEAMGKSVIGFTNRRETGDEMVDIKRMFTPEFRNRLDAVISFRSLDEEIIMRVVDKFLMQLEDQLHEKKVDALFTDALRKHLAKHGFDPLMGARPMQRLIQDTIRRALADELLFGKLMNGGRVTVDVDAEDKVQLTFDEHPAPRNPNPEAVEVE

SEQ ID NO: 7211 - protein, 194 aa, Burkholderia fungorum
MRRNPYSVILLDEIEKAHPDVFNVLLQVLDDGRMTDGQGRTVDFKNTVIVMTSNLGSQVIQAMVGEPQEAVKDAVWEEVKLHFRPEFLNRIDDVVVFHALDRSNIQSIARIQLQRLQERLAKLDMQLLVSDEALEHVGKVGYDPLFGARPLKRAIQQEIENPVAKLILAGKFGPKDVIPVEVEDGKLVFERVVH

SEQ ID NO: 7212 - protein, 137 aa, Lactococcus lactis
EGRTKSVLGQLGDFFSPEFMNRFDGIIEFSALSKENLLKIVDLMLDEVNEQIGRNDIHLSVTQAAKEKLVDLGYNPAMGARPLRRIIQENIEDSIADFYIEHPEYKQLVADLIDDKIVISNQTQETAETTDEEVPAE

SEQ ID NO: 7213 - protein, 836 aa, Agrobacterium tumefaciens str. C58 (Cereon)
MPTFSPSLEKALHQALTFANERHHEYATLEHLLLALIDDADAAAVMAACNVDLDALRKTVSDYVDNELTNLVTGYDEDSKPTSGFQRVIQRAVIHVQSSGREEVTGANVLVAIFAERESHAAYFLQEQEMTRYDAVNYISHGIGKRPGTSQTRAPRGADEPESESKPSRGNPEEDGSSAKKQQDALKAYCVNLNDKARNGKIDPLIGRHDEVNRTIQILCRRSKNNPLYVGDPGVGKTAIAEGLAKRIVEGKVPEALANDTIFSLDMGTLLAGTRYRGDFEERLKQVVKELEEFPGAVLFIDEIHTVIGAGATSGGAMDASNLLKPALSSGAIRCIGSTTYKEYRQFFEKDRALVRRFQKIDVNEPSIDDAIAIMKGLKPYFEDYHHLRYSNEAIKAAVELSARYISDRKLPDKAIDVIDETGAAQMLLPASKRRKLITEREIEATIATMARIPPKTVSKDDEMVLANLEKELRSVVYGQDIAIEALATAIKLARAGLREPNKPIGSYVFSGPTGVGKTEVAKQLAASLGVEMLRFDMSEYMERHTVSRLLGAPPGYVGFDQGGLLTDGVDQHPHSVVLLDEIEKAHPDIYNILLQVMDHGSLTDHNGKKIDFRNVILIMTTNAGASEMAKSAIGFGSSRRTGEDEEAINRLFTPEFRNRLDAIIPFSPLPTAVIHKVVQKFVMQLETQLSERNVTFDLHEDAISWLAEKGYDEKMGARPLSRVIQEHIKKPLANEILFGKLKKGGVVSVTVGKKDDGADGLILEVLPETAPVKPQPEAELKAAKSPGKPKAKAKTASKAAKTADEAEILVAEADKSDEDKPRRKTNTVPKVPKKK

SEQ ID NO: 7214 - protein, 610 aa, Streptococcus agalactiae NEM316
MEDELKTPYLDQYTDNLTAKVTKKSDDYQVYGRNKEVQSVIISLLRRTKNNPILVGEAGVGKSAIVEGITLAILRGQVPEPLKGLTVRSLELSSLMSEDDEGFIAKFKKIIEEMVATRGHNLLFVDEFHTIIGAGSQNGQALDAGNVIKPVLARGDIQLIGATTLDEFHEYIETDRALERRMQPVMVEEPTISQAITIIEQAKVIYEKFHGIQISSDAVHQAIRLSVRYLTDRFLPDKAFDLIDEAATIASVEGKSKVTEKDIAQVLKDKTGIPVTTILKGDQERLEGFKERLMNRVKGQEDAIEAVVDAVTIAQAGLQNEKRPLASFLFLGPTGVGKTELAKAIAEALFDDEAAMIRFDMSEYKQKEDVTKLIGNRATRIKGQLTEGVKQKPYCVLLLDEIEKAHSEVMDLFLQVLDDGRLTDSSGRLISFKNTIVIMTTNIGAKKIINKWELKGNFKDLTDRDRKQFEKSMDSELQNEFRPEFLNRIENKLIFNLLERDVIEKIAEKNLSEIADRMKRQNLTLSYEPSLIQYLSDVGTDVKNGARPLERLMKRKVLAPISVKSLQLDKSKQGYNVHLWVEGRAPDGNHRQEQRQIHMEIEGERDNFFS

SEQ ID NO: 7215 - protein, 639 aa, Streptococcus agalactiae NEM316
MRLTHVSLWMPSKRSWPLKLQLLRKGVIELEDELKTPYLDQYTDNLTAKVTKKSDDYQVYGRNKEVQSVIISLLRRTKNNPILVGEAGVGKSAIVEGITLAILRGQVPEPLKGLTVRSLELSSLMSEDDEGFIAKFKKIIEEMVATRGHNLLFVDEFHTIIGAGSQNGQALDAGNVIKPVLARGDIQLIGATTLDEFHEYIETDRALERRMQPVMVEEPTISQAITIIEQAKVIYEKFHGIQISSDAVHQAIRLSVRYLTDRFLPDKAFDLIDEAATIASVEGKSKVTEKDIAQVLKDKTGIPVTTILKGDQERLEGFKERLMNRVKGQEDAIEAVVDAVTIAQAGLQNEKRPLASFLFLGPTGVGKTELAKAIAEALFDDEAAMIRFDMSEYKQKEDVTKLIGNRATRIKGQLTEGVKQKPYCVLLLDEIEKAHSEVMDLFLQVLDDGRLTDSSGRLISFKNTIVIMTTNIGAKKIINKWELKGNFKDLTDRDRKQFEKSMDSELQNEFRPEFLNRIENKLIFNLLERDVIEKIAEKNLSEIADRMKRQNLTLSYEPSLIQYLSDVGTDVKNGARPLERLMKRKVLAPISVKSLQLDKSKQGYNVHLWVEGRAPDGNHRQEQRQIHMEIEGERDNFFS

SEQ ID NO: 7216 - protein, 755 aa, Shewanella oneidensis MR-1
MLNKDLEVTLNLAFQQAREARHEYMTVEHLLLALIDNPAAQEALIACGANLDKLRDEVASFIQQTTPIIADMDDDKETQPTLGFQRVLQRAVFHVQSSGRNEVTGANVLVAIFSEQESQAVYLLRRSDISRLDVVNFISHGFSKNEDSDAHQDQERSEEQAEASEERSMLSQFATNLNQLAKQGVIDPLIGRDQEIERAIQTLCRRRKNNPLLVGEAGVGKTAIAEGLAYRIVNHQVPEVMAQATVYSLDLGSLLAGTKYRGDFEKRFKNLLKELSADKHAILFIDEIHTIIGAGAASGGVMDASNLLKPLLSSGNLRCMGSTTFQEYQSIFEKDRALARRFQKVDINEPSVAETTKILMGLKSKYEEYHGVRYTQAAINSAAVLSAKHINDRHLPDKAIDVIDEAGARMAMLPQSKRKKTIGQAEIETIVAKIARIPEKSVSATDKDLLRNLERNLKMVVFGQDKAIETLSSAIRLSRSGLGTDKKPVGSFLFAGPTGVGKTEVTNQLANCLGMKLVRFDMSEYMESHTVSRLIGAPPGYVGYDQGGLLTDAVIKNPHCVVLLDEIEKAHPDVYNLLLQVMDHGTLTDNNGRKADFRHVTLVMTTNAGVQETIRKSIGFTQQDHTQDALSEINRVFSPEFRNRLDSIIWFNHLDMTIIAKVVDKFLVELQAQLDAKHVVLEVSDEARTLLAQKGYDKSMGARPMARVVTELIKRPLADELLFGELEHGGIAHVDAKDGEIVIHAERNEKTTSKA

SEQ ID NO: 7217 - protein, 824 aa, Brucella melitensis 16M
MPSFSPSLERALHQALTIANERHHEYATLEHLLLALIDDQDAGAVMRACNVDLDYLKHIVTDYIDRELDNLITGYDEDSKPTAAFQRVIQRAVIHVQSSNRDEVTGANVLVAIFAERESHAAYFLQEQQMTRYDAVNYISHGISKRPQGSEPRTPRGVESASEERTGIEQEEAPKKKQDALSAYCINLNEKAKAGRIDPLIGRDSEINRTIQVLCRRSKNNPLYVGDPGVGKTAIAEGLAKRIVEGQVPDALADATIFSLDMGTLLAGTRYRGDFEERLKQVVKELEEFPGAVLFIDEIHTVIGAGATSGGAMDASNLLKPALSSGAIRCIGSTTYKEYRQFFEKDRALVRRFQKIDVNEPSIPDTIEIMKGLKPYFEDFHKVKYTVDAIKSAVELSARYISDRKLPDKAIDVIDETGASQMLLPENKRKKTIGVKEIEATIATMARIPPKSVSKDDEEVLSHLEAELKRVVYGQDLAIDALSASIKLARAGLREPDKPIGSYLFSGPTGVGKTEVAKQLASSLGVELLRFDMSEYMERHTVSRLIGAPPGYVGFDQGGLLTDGVDQHPHCVLLLDEIEKAHPDLFNILLQVMDHGALTDHNGKKIDFRNVILIMTTNAGASDMAKAAIGFGSTRREGDDMEAINRLFTPEFRNRLDAIIPFGPLPVPVIHQVVQKFVLQLEAQLAERGVTFELTDAAIAWLADKGYDERMGARPLARVIQEHIKKPLADEVLFGKLKHGGTVRVDVTTKEDGNTDLMLESIAEKPVKPKKDIPPEKKLPQRRKAAPKKAEKEKVLAGKDEPAPKPTTKATPIKSSVPKVPRKK

SEQ ID NO: 7218 - protein, 822 aa, Mesorhizobium loti
MPAFSQGLEKALHQALTLANERHHEYATLEHLLLALIDDTEAAAVMRACNVDLDELKHTVLTYIDTELDNLVTGYDEDSKPTAGFQRVIQRAVIHVQSSGREEVSGANVLVAIFAERESHAAYFLQEQQMTRYDAVNYISHGIAKRPGASETRSPRGADDEQGGQNGAEPQEEGGKKKQQQDALTAYCVNLNNKAKAGKIDPLIGRESEINRTIQVLCRRSKNNPLYVGDPGVGKTAIAEGLAKRIVEGDVPEVLHNATIFALDMGTLLAGTRYRGDFEERLKQVVKELEDYPGAVLFIDEIHTVIGAGATSGGAMDASNLLKPALSSGAIRCIGSTTYKEFRQFFEKDRALVRRFQKIDVNEPTIEDAIEIMKGLKPYFEEFHKVRYTSEAIKASVELSARYINDRKLPDKAIDVIDETGASQMLVPEAKRKKTIGIKEIEATIATMARIPPKTVSADDEKVLQGLDIELKRVVYGQDTAITALTSAIKLARAGLREPEKPIGSYLFSGPTGVGKTEVAKQLAASLGVELIRFDMSEYMERHTVSRLIGAPPGYVGFDQGGLLTDGVDQHPHCVLLLDEVEKAHPDLFNILLQVMDHGKLTDHNGKQIDFRNVILIMTTNAGASDAQRAAIGFGSTKREGDDVEAINRLFTPEFRNRLDAIIPFGSLPVPVIHQVVQKFVMQLEAQLSERGVTFDLSPDAIAWLADKGYDERMGARPLGRVIQEHIKKPLADEVLFGKLKKGGTVRVTVEKKETGETGLKLESLADEAPVKPKKEEPEDAPKPPKAVAKKPAAKKVVAQKPEPKGKDGGKRSLVPQLPRKG

SEQ ID NO: 7219 - protein, 838 aa, Sinorhizobium meliloti
MPTFSPSLEKALHQALTFANERHHEYATLEHLLLALIDDADAAAVMGACNVNLDTLRKTVTDYVDNELSNLVTGYDEDSKPTAGFQRVIQRAVIHVQSSGREEVTGANVLVAIFAERESHAAYFLQEQEMTRYDAVNFISHGIGKRPGSSEARPVRGAEDQDSEQKASRESEEAGPKKQQDALTAYCVNLNEKAKSGKIDPLIGRHAEVNRTIQVLCRRSKNNPLYVGDPGVGKTAIAEGLAKRIIEKKVPEALQDATIFALDMGTLLAGTRYRGDFEERLKQVVKELEDYPGAVLFIDEIHTVIGAGATSGGAMDASNLLKPALSSGAIRCIGSTTYKEYRQFFEKDRALVRRFQKIDVNEPTIADTIEIMKGLKPYFEDYHQLKYTNDAIKAAVELSARYINDRKLPDKAIDVIDESGAAQMLLPVSKRRKLITEREIEATVATMARIPPKTVSKDDEAVLANLEQELRSVVYGQDLAIEALASSIKLARAGLREPNKPIGCYVFSGPTGVGKTEVAKQLATSLGVELLRFDMSEYMERHTVSRLIGAPPGYVGFDQGGLLTDGVDQHPHCVLLLDEIEKAHPDLFNILLQVMDHGSLTDHNGKKIDFRNVILIMTTNAGASDMARAAIGFGSSKRTGEDVEALNRLFTPEFRNRLDSVIPFNSLPTPVIHKVVQKFVMQLETQLAERNVTFDLAPDAIAWLAERGYDEKMGARPLARVIQENIKKPLADEILFGKLKKGGVVKVTIGNKEDGTKGLMLEAVPETAPIKPKAEVSRPAGKGAKPKKAAEKESVAAAEDGAKAKSKKTTAKSSNKSGGSSGAAPLRGRTVPKVPRKK

SEQ ID NO: 7220 - protein, 857 aa, Escherichia coli
MRLDRLTNKFQLALADAQSLALGHDNQFIEPLHLMSALLNQEGGSVSPLLTSAGINAGQLRTDINQALNRLPQVEGTGGDVQPSQDLVRVLNLCDNVAQKRGDNFISSELFVLAALESRGTVADILKAAGATTANITQAIEQMRGGESVNDQGAEDQRQALKKYTIDLTERAEQGKLDPVIGRDEEIRRTIQVLQRRTKNNPVLIGEPGVGKTAIVEGLAQRIINGEVPEGLKGRRVLALDMGALVAGAKYRGEFEERLKGVLNDLAKQEGNVILFIDELHTMVGAGKADGAMDAGNMLKPALARGELHCVGATTLDEYRQYIEKDAALERRFQKVFVAEPSVEDTIAILRGLKERYELHHHVQITDPAIVAAATLSHRYIADRQLPDKAIDLIDEAASSIRMQIDSKPEELDRLDRRIIQLKLEQQALMKESDEASKKRLDMLNEELSDKERQYSELEEEWKAEKASLSGTQTIKAELEQAKIAIEQARRVGDLARMSELQYGKIPELEKQLEAATQLEGKTMRLLRNKVTDAEIAEVLARWTGIPVSRMMESEREKLLRMEQELHHRVIGQNEAVDAVSNAIRRSRAGLADPNRPIGSFLFLGPTGVGKTELCKALANFMFDSDEAMVRIDMSEFMEKHSVSRLVGAPPGYVGYEEGGYLTEAVRRRPYSVILLDEVEKAHPDVFNILLQVLDDGRLTDGQGRTVDFRNTVVIMTSNLGSDLIQERFGELDYAHMKELVLGVVSHNFRPEFINRIDEVVVFHPLGEQHIASIAQIQLKRLYKRLEERGYEIHISDEALKLLSENGYDPVYGARPLKRAIQQQIENPLAQQILSGELVPGKVIRLEVNEDRIVAVQ

SEQ ID NO: 7221 - protein, 594 aa, Escherichia coli
MRLDRLTNKFQLALADAQSLALGHDNQFIEPLHLMSALLNQEGGSVSPLLTSAGINAGQLRTDINQALNRLPQVEGTGGDVQPSQDLVRVLNLCDKLAQKRGDNFISSELFVLAALESRGTLADILKAAGATTANITQAIEQMRGGESVNDQGAEDQRQALKKYTIDLTERAEQGKLDPVIGRDEEIRRTIQVLQRRTKNNPVLIGEPGVGKTAIVEGLAQRIINGEVPEGLKGRRVLALDMGALVAGAKYRGEFEERLKGVLNDLAKQEGNVILFIDELHTMVGAGKADGAMDAGNMLKPALARGELHCVGATTLDEYRQYIEKDAALERRFQKVFVAEPSVEDTIAILRGLKERYELHHHVQITDPAIVAAATLSHRYIADRQLPDKAIDLIDEAASSIRMQIDSKPEELDRLDRRIIQLKLEQQALMKESDEASKKRLDMLNEELSDKERQYSELEEEWKAEKASLSGTQTIKAELEQAKIAIEQARRVGDLARMSELQYGKIPELEKQLEAATQLEGKTMRLLRNKVTDAEIAEVLARWTGIPVSRMMESEREKLLRMEQELHHRVIGQNEAVDAVSNAIRRSRAGLADP

SEQ ID NO: 7222 - protein, 195 aa, Escherichia coli
HMQALKKYTIDLTERAEQGKLDPVIGRDEEIRRTIQVLQRRTKNNPVLIGEPGVGKTAIVEGLAQRIINGEVPEGLKGRRVLALDMGALVAGAKYRGEFEERLKGVLNDLAKQEGNVILFIDELHTMVGAGKADGAMDAGNMLKPALARGELHCVGATTLDEYRQYIEKDAALERRFQKVFVAEPSVEDTIAILR

SEQ ID NO: 7223 - protein, 771 aa, Rhodobacter sphaeroides
MPSFSTTLEQAIHGALALANARRHELATLEHLLLALIDEPDASRVMKACSVDLDELRKTLVDFIDDDLSTLVTSVEGSEAVPTAAFQRVIQRAAIHVQSSGRTEVTGANVLVAIFAERESNAAYFLQEQDMTRYDAVNFIAHGVAKDPSYGEPRPVTGAEEHHETPKAEAGEAKESALSKYCVDLNVKARKGDVDPLIGREHEVERCIQVLCRRRKNNPLLVGDPGVGKTAIAEGLARKIVNGETPDILARATIFSLDMGALLAGTRYRGDFEERLKAVVKEMEDHPDAILFIDEIHTVIGAGATSGGAMDASNLLKPALQGGKLRCMGSTTYKEYRQHFEKDRALSRRFQKIDVNEPSVEDTVKILMGLKPYFEEHHDLRYTQDAIRTAVELSARYIHDRKLPDKAIDVIDEAGAAQHLLADSKRRKTIGPREIEAVVAKIARIPPKSVSKDDAEVLRDLEKTLKRVVFGQDRAIEALSSAIKLARAGLREPEKPIGNYLFAGPTGVGKTEVAKQLASILGVELLRFDMSEYMEKHAVSRLIGAPPGYVGFDQGGMLTDGVDQHPHCVLLLDEIEKAHPDVYNILLQVMDHGKLTDHNGRSVDFRNVILIMTSNAGAAELAKSAIGFGRDRREGEDTAAIERTFTPEFRNRLDAVISFAPLGKEIILQVVEKFVLQLEAQLMDRGVHIELSPEAAAWLGDKGYDDKMGARPLGRVIQENIKKPLAEELLFGRLVKGGVVKVGVKDDTIDLQIEEPKPRLTGSKPPLLTAD

SEQ ID NO: 7224 - protein, 794 aa, Rhodopseudomonas palustris
MPTFSQSLEQSLHRALAIANERHHQYATLEHLLLSLVDDSDAAAVMRACSVDLDKLRTSLVNYLETEFENLVTDGSEDAKPTAGFQRVIQRAVIHVQSSGREEVTGANVLVAIFAERESHAAYFLQEQDMTRYDAVNYISHGIAKRPGVSEARPVRGVDEETETKGGDDSKKKGDALETYCVNLNKKARDGKIDPVIGRNAEISRAIQVLCRRQKNNPLFVGEAGVGKTAIAEGLAKRIVDGEVPEVLSAATVFSLDMGTLLAGTRYRGDFEERLKQVLKELEAHPNAILFIDEIHTVIGAGATSGGAMDASNLLKPALASGTIRCMGSTTYKEYRQHFEKDRALVRRFQKIDVNEPTVEDAIAILKGLKPYFEDYHKLKYTNEAIESAVQLSSRYIHDRKLPDKAIDVIDESGAAQMLLSENKRKKTIGIKEIEATVATMARIPPKSVSKDDAEVLKHLEQTLKRVVFGQDKAIEALSASIKLARAGLREPEKPIGCYLFSGPTGVGKTEVAKQLASTLGVELLRFDMSEYMERHTVSRLIGAPPGYVGFDQGGLLTDGVDQHPHCVVLLDEIEKAHPDLYNVLLQIMDHGRLTDHNGKQVNFRNVILIMTTNAGAADLARQAFGFTRNKREGDDHEAINRQFAPEFRNRLDAIVSFAHLNADVIGMVVEKFVLQLEAQLADRDVTIELSEPAKAWLVQHGYDEQMGARPMARVIQEHIKKPLADEVLFGKLKGGGHVKVVLVKDDAVAGVELEKIGFEFLDGPVTPKPENLPGKKRGGSARKAKVKDQVEKA

SEQ ID NO: 7225 - protein, 804 aa, Rhodospirillum rubrum
MAVRHQPQIAARPGRGRNRFKKGAGMLSRNLEQTLHRALALASQRRHEYATLEHLLLALVDDQDAVSVLKACSVDVEKLRKQLAEFVEHELTGLVVAAPEGDPKPTAGFQRVVQRAAIHVQSSGREQVTGANILVALFSERESHAVYFLQMQDMTRLDAVNYISHGIAKAPGHGQARAPRGADEETKSEETATVKKGREALDAYCVNLNEKAAEGKIDPLIGRDQEVERTIQILCRRNKNNPLLVGDPGVGKTAIVEGLARRIVHKEVPEVLHNATIFSLDMGALLAGTRYRGDFEERLKAVVGELEAYEGAVLFIDEIHTVIGAGATSGGSMDASNLLKPALAQGLLRCVGSTTYKEFRNHFEKDRALVRRFQKIDVNEPSVEDTVKILRGIKSYYEDHHKVRYTNDAVRAAVELSNKYINDRKLPDKAIDVIDEVGAARMLLPESRRRKTVTVRDIEEIVAKIARIPPKSVSRDDQAVLKSLERDLKTMVFGQDQAIEALASAIKLARAGLREPTKPIGNYLFSGPTGVGKTEVARQLARILGIELVRFDMSEYMERHSVSRLIGAPPGYVGFDQGGLLTDAVDQQPHCVLLLDEIEKAHPDLFNILLQVMDHGKLTDHNGKHVDFRNVILIMTTNAGAQMLAKNAMGFGRETRSGDDTEEIERSFSPEFRNRLDAIIPFANLAAETVGMVVDKFVMELEAQLADRNVTIELTDKARSWLAEKGYDRRMGARPLARIIQETIKKPLAEELLFGKLTKGGRVKVGVKDGKPDFAFFDLPPKDLLEKEGERGDNDESPTEEVAD

SEQ ID NO: 7226 - protein, 248 aa, Chloroflexus aurantiacus
DGEILLLNGGRRVSFQQSIVIFTTNVGAKEMVDFLDRRTIGFRTPHKDVEATGREIYQIGFEALQKVFQPEWINRLDEIIAFRPLSAETLSHVFDRMIAECNQQYLRYAIQLRVTPEAKEYLLNKGFDSRFGARPLRQRILKDIESPLSDLLASGGIPAGSLVELRYTGIDQHGQALEFYYTEAPELIERAEELRQRDLQRIAVGQSDGPQPPSISLTHERSNAAEGGIFTTRGPRVTPRRDPHFGDK

SEQ ID NO: 7227 - protein, 771 aa, Ralstonia metallidurans
MRDGGSMIAQELEVSLHMAFVEARQARHEFITVEHLLLALLDNPTAAEVLRACAANIEDLRTSLKNFIADNTPVVPGTDEVDTQPTLGFQRVIQRAIMHVQSTSNGKKEVTGANVLVAIFGEKDSHAVYYLQQQGVTRLDVVNFISHGIRKDQAEPAKHGDGNAEGEGGDGKESPLEQYTQNLNTLAKAGKIDPLIGRESEVERVVQVLCRRRKNNPLLTGEAGVGKTAIAEGLAWRITKGEVPDILEKAVVYSLDMGALLAGTKYRGDFEQRLKGVLKSLKDNPNAILFIDEIHTLIGAGAASGGTLDASNLLKPALSSGQLKCIGATTFTEYRGIFEKDAALSRRFQKIDVVEPSVDQTVQILRGLKSRFEEHHGVKYAASALTAAAELSARFITDRHLPDKAIDVIDEAGAAQRILPKSKQKKTIGKAEIEDIVSRIARIPPQSVNQDDRSKLQTLERDLKSVVFGQDPAIEALASAIKMSRAGLGKTDKPIGSFLFSGPTGVGKTEVAKQLAFIMGIELLRFDMSEYMERHAVSRLIGAPPGYVGFDQGGLLTEAVTKKPHCVLLLDEIEKAHPDIFNILLQVMDHGSLTDNNGRRADFRNVIIIMTTNAGAETMNRATIGFTTAREQGDEMADIKRMFTPEFRNRLDAMISFRSLDEEIILRVVDKFLMQLEEQLHEKKVDASFSEKLRKYLAKKGFDPLMGARPMQRLIQDMIRKALADELLFGKLVSGGKVAVDLDDDDQIKLTFSEADPEPPEAPESEQRAEV

SEQ ID NO: 7228 - protein, 82 aa, Ralstonia metallidurans
MRIDKLTTRFQEALAEAQSLALGNDNQYIEPQHLLRALLAQDDGAARTLLSRAGVNVGGLQSALDAAIHRLPQVQGTNEVQV

SEQ ID NO: 7229 - protein, 769 aa, Neisseria meningitidis MC58
MLAPELEQILQQLYREARKAHYEFISLEHLLLVLIEEDASVHNVLKLCGADLKVVSEQLAASVAENTPLIPEHLLDTVETRPTLGFQRVMQRAMVHTQSAGKAAVEPLDVLVALMSETDSHTVYFLKLQSVTRFEVLRCIAHGSPDEDEDEDEDEDDGNYSSDGMDDDNGNRTKPGKNPLSAYTVNLNAEVKAGRIDPLIGRKHEMERLVQILCRRRKNNPLLVGEAGVGKTALAEGLAHQIVNGGIPDALKDAEVYALDMGSLLAGTKYRGDFEARVKSVLKQLEKIPHAILFIDEIHTIIGAGSTSGGTMDASNLLKPALAKGSLRCIGATTYDEYRTIFDKDHALSRRFQKIDVVEPTVSETVQILRGLKPMFEAFHQVRYTQGALEAAAELSARYINERFLPDKAIDVMDEAGAEQRILPKSKQKKVIGKAQIETVIAKVARIPEKTVSHDDKQVLQFLGRDLKNMVYGQENAIDALVAAVKMSRSGLALPDKPIGSFLFSGPTGVGKTEVAKQLAYSMGVPLQRFDMSEYMERHAVSRLIGAPPGYVGFEQGGLLTEAINKQPHCVLLLDEIEKAHPDIFNVLLQVMDAGKLTDNNGKSADFRNVILIMTTNAGAESLSRPSLGFTAKRERGDEMQAINKLFTPEFRNRLDAIIPFAPLSEPVITKVVDKFLLQLEHRLLDKKVEAEFTSALHKYLAEKGFDPQMGARPMHRLIQEKIRKPLADELLFGKLSDGGFVRIDWDAAKEEAVLKFKKSKVKIKTASA

SEQ ID NO: 7230 - protein, 759 aa, Neisseria meningitidis Z2491
MLSPELEHILQLLYREARNARYEFISLEHLLLVLIEEDAAVPNVLKLCGADLKVLSEQLAASVAENTPQIPDHLLDTVETQPTLGFQRVIQRAMVHTQSAGKAAVEPLDILVAMMSESESHAVYFLKLQSITRFEVLRCIAHGSPDDEDGNDSDGLGREGEEAEQKTGSLSDYTVNLNAEVKAGRIDPLIGRKHEMERLVQILCRRRKNNPLLVGEAGVGKTALAEGLAHQIVKGDIPDALKDAEVYALDMGSLLAGTKYRGDFEARVKSVLKQLEKIPHAILFIDEIHTIIGAGSTSGGTMDASNLLKPALAKGALRCIGATTYDEYRTIFDKDHALSRRFQKIDVVEPTVSETVQILRGLKPMFEGFHQVRYTQGALEAAAELSARYINERFLPDKAIDVMDEAGAAQRILPKSKQKKVIGKAQIETVIAKVARIPEKTVSHDDKQVLQFLGRDLKNMVYGQENAIYALVAAVKMSRSGLGLPDKPIGSFLFSGPTGVGKTEVAKQLAYSMGVPLQRFDMSEYMERHAVSRLIGAPPGYVGFEQGGLLTEAVNKQPHCVLLLDEIEKAHPDIFNVLLQVMDAGKLTDNNGKSADFRNVILIMTTNAGAESLSRPSLGFTAKRERGDEMQAINKLFTPEFRNRLDAIIPFAPLSEPIIVKVVDKFLLQLEHRLLDKKVEAEFTPALRKYLAEKGFDPQMGARPMNRLIQEKIRKPLADELLFGKLVDGGFVRIDWDAAKEEAVLKFKKSKVKPETETV

SEQ ID NO: 7231 - protein, 747 aa, Deinococcus radiodurans
MTNRFDDRARLVFHYAREEGNRLGHAMVGPEHLLLGLMREGGSAAQILGEFGATLDSLRRKVEDIIGRGEGSRLNDAPSITPRARRVMELSGAEARALGSQTTSTQHILLGIIREGDGVAFRILQDLTKDVETIRWRILAEDSGEGGKAAKPVPTPFLDEYGRDLTKWAREGKLDPVIGRSEEIRRVTQILTRRTKNNPVLIGDPGVGKTAIVEGLALAIHEQRTPPSLHGVRLISLDLSGVVAGTKYRGEFEERLRQIIEELRTAKVMAFIDELHTLVGAGGAEGTLDAANILKPALSRGEIQVIGATTTGEYHRYIEKDAALERRFQPVIVLEPSPAETLQILRGLKPKYEEHHGVQIPDSALELAVRIGERSLPGRNFPDKAIDLIDEAASRVRLNMSVGLPVAENESGEPMVTREDMESVINSMGGIYSEETGAALIDLEEQLNDQVYGQPDAVKALTSAMRRARVGLGGRTRVSASFLFVGPSGVGKTHLAKALARTLFGSERALIRVDMSEFQEGHSISKLIGSPPGYVGFEQGGRLTEAVRRQPFSVILLDEIEKAHPDIYNTFLQVLDDGRLTDGQGRTVDFRRTVIIMTSNTGFNVNPTVGFSPVTPDSNAPLRNIFTPEFLDRLDDVIRFKSLGEDELVRVAQQLLGEMREELASRELNVTFDPAIAAWVVGKLKARSPKHAVGSSRQLRTLLREELEDPLALYLIGSDARDLRVVLGENSIDFEQVERSAPPQILA

SEQ ID NO: 7232 - protein, 741 aa, Deinococcus radiodurans
MLSEHLQAALQRAADLAQAAGHEYITQEHLLLALLGDPEAKDALNALGADLNALREALTEQLAELDILDDPDPDFTLGVHRVVQGAVLQLHASGKGKEQADGARVLVELLEEDDSPARAALEAQGVTRLDLLNYLSHGVAKAPGHSRERRVAGVDGELTAEGAPAEENPLEAYAQNLTEAAKNGEFDPVIGRGAELERVVHILARRGKNNPVLVGEPGVGKTALAEGLAQRVADGKAPGFLRGASVYALDLGALLAGTRYRGDFEGRLKAVLAALDGQNSVLFIDELHTLVGAGATEGGSVDAANLLKPALARGKLRVMGATTPAELRLLEKDRALWRRFQTVDVPEPSEADAVQILQGLAPKYAAHHGVTYTPPALEAAVRLSARYLRDRFLPDKAIDVLDEAGAARSSTGQGGEIDVPDIESTVARMARVPVGAVKAEEVQSLATLEADLNRRVYGQEPAVSAVSSAVKLARAGLRNPQKPQGSFLFAGPTGVGKTELARALAERLGVELIRFDMSEYQEPHTVARLIGAPPGYVGFDQGGLLTDAVAKNPHAVLLLDEIEKAHPDVYNIFLQLMDHGTLTDHAGKKVDGRGLILIFTTNAGAADASRPALGFSREGRAGEQAEAVKRTFTPEFRNRLDAVIYFAPLSRTVMTSVVDKFLRELGEQLTERGVTLTVTPAARARLAELGYDPLLGARPLARVIEDKLGRPLADELLFGRLKDGGAVKVGVQGGEFSFAVS

SEQ ID NO: 7233 - protein, 750 aa, Clostridium acetobutylicum
MKLDEIVNEIITAAYSEAKFDMHKYFTPEHILYASLFYNDGINIIKNTGGSVEGLKKQLEKYFMKNVEKLESGDPTQTVGVENIINQAANHVLTSGKDYVTIGDIYVAIYDDNASFGSYYLKQQGITRLKLLNYITHGISAVNDSDEDDIEPLPENEYLFDDYHEDEVCAIDKYTEDITEKAKNGLIDPLIGREDILKKTLQVLCRRRKNNPIHVGEPGVGKTAITEGLATLIAEDKVPTVLKGSKIYTLNMGTMVAGTKYRGDFEERIKNVLNEISKCEKPIVYIDEIHTIIGAGAVSGGTVDAANILKPYFTDGKIKFIGSTTYDEYKKIFDKDRALSRRFQKIDVGEPTINETYDILMGIKTRYEQFHNVHYTNASLKAAAALSAKCINDRFLPDKAIDVIDECGAFAEMNRKDTEKVYINVKDVENVISSISGIPVKDLSKTQIEKLKNLKKNLKSKIFGQDKALESIVQSIKRSSAGFNDENKPVASFLFVGPTGVGKTEISKQLAEALNIKLIRFDMSEYQEKHTVARLIGSPPGYVGYEEGGLLTDAVRKNPYCILLLDEIEKAHSDILNVLLQVMDYATLTDNSGKKADFRNIILIMTSNAGASEVGKNKVGFGNRVVGEDNIDKEVSKIFSPEFRNRLDDIIIFNKMDEDMAIRVAKRSLDEFQQKLNKKHIKIKVTDECYKWIASKGLNSNYGAREILRVIQEKIKPYFIDEVLFGNLTKGGETLIDVKDNNIKFESIDK

SEQ ID NO: 7234 - protein, 758 aa, Escherichia coli O157:H7 EDL933
MLNQELELSLNMAFARAREHRHEFMTVEHLLLALLSNPSAREALEACSVDLVALRQELEAFIEQTTPVLPASEEERDTQPTLSFQRVLQRAVFHVQSSGRNEVTGANVLVAIFSEQESQAAYLLRKHEVSRLDVVNFISHGTRKDEPTQSSDPGSQPNSEEQAGGEERMENFTTNLNQLARVGGIDPLIGREKELERAIQVLCRRRKNNPLLVGESGVGKTAIAEGLAWRIVQGDVPEVMADCTIYSLDIGSLLAGTKYRGDFEKRFKALLKQLEQDTNSILFIDEIHTIIGAGAASGGQVDAANLIKPLLSSGKIRVIGSTTYQEFSNIFEKDRALARRFQKIDITEPSIEETVQIINGLKPKYEAHHDVRYTAKAVRAAVELAVKYINDRHLPDKAIDVIDEAGARARLMPVSKRKKTVNVADIESVVARIARIPEKSVSQSDRDTLKNLGDRLKMLVFGQDKAIEALTEAIKMARAGLGHEHKPVGSFLFAGPTGVGKTEVTVQLSKALGIELLRFDMSEYMERHTVSRLIGAPPGYVGFDQGGLLTDAVIKHPHAVLLLDEIEKAHPDVFNILLQVMDNGTLTDNNGRKADFRNVVLVMTTNAGVRETERKSIGLIHQDNSTDAMEEIKKIFTPEFRNRLDNIIWFDHLSTDVIHQVVDKFIVELQVQLDQKGVSLEVSQEARNWLAEKGYDRAMGARPMARVIQDNLKKPLANELLFGSLVDGGQVTVALDKEKNELTYGFQSAQKHKAEAAH

SEQ ID NO: 7235 - protein, 777 aa, Xylella fastidiosa Dixon
MENPRSCLILCVTVVGVTHMFSKDLEQTIGQCYKRTREACHEFMTVEHLLLSLLDNPLAHAVLKACGADVTRLKRDLEQAIEVSITRLDADDGRDTQPTLGFQRVLQRAVYHVQSSGKKEVTGANVLVAIFGEKDSHAVYFLNQQDISRLDIVNYLSHGITRMGEESDIGQAAENEAKGESEANKGDALAEYAINLNEHARNGRIDPLVGRKDEIERTIQVLCRRRKNNPLYVGEAGVGKTAIAEGLAKRIVDRSVPEVLADAVIYSLDLGALVAGTKYRGDFEKRLKGVLSALRKTPNVVLFIDEIHTIIGAGSASGGTMDASNLIKPALASGELRCIGSTTFQEYRGIFEKDRALARRFQKIDIVEPTAGEAFEILQGLKPKYEAHHGVTYADDALRAAVDLSVKHIGDRLLPDKAIDVIDEAGARQRLLPEKERKELIDIEEIETIVTKMARVPAKQVSVSDKDILKHLERNLKMVIFGQEPAIEMLSSAIKLARSGLGNPDKPIGNFLLAGPTGVGKTEVTKQLAHHLGIELVRFDMSECMEPHSVSRLIGAPPGYVGFDQGGLLTEKIVKTPHCVLLLDEVEKAHIDVFNILLQVMDRGVLTDTNGREASFKNVILVMTTNAGASQSSRRTIGFTKQDHTSDAMEVICRSFSPEFRNRLDAIVQFQPLGFSHILRVVDKFIIELEMLLQEKRVVLSATPIARDWLAQHGFDPLMGARPMARVIQEKIKRPLADELLFGKLLNGGRVGIDVRDNELIVETYSEPELLFPATVE

SEQ ID NO: 7236 - protein, 777 aa, Xylella fastidiosa Ann-1
MENPRSCLILCVTVVGVTHMFSKDLEQTIGQCYKRTREACHEFMTVEHLLLSLLDNPLAHAVLKACGADVTRLKRDLEQAIEVSITRLDADDGRDTQPTLGFQRVLQRAVYHVQSSGKKEVTGANVLVAIFGEKDSHAVYFLNQQDISRLDIVNYLSHGITRMGEESDIGQAAENEAKGESEANKGDALAEYAINLNEHARNGRIDPLVGRKDEIERTIQVLCRRRKNNPLYVGEAGVGKTAIAEGLAKRIVDRSVPEVLADAVIYSLDLGALVAGTKYRGDFEKRLKGVLSVLRKTPNVVLFIDEIHTIIGAGSASGGTMDASNLIKPALASGELRCIGSTTFQEYRGIFEKDRALARRFQKIDIVEPTAGEAFEILQGLKPKYEAHHGVTYADDALRAAVDLSVKHIGDRLLPDKAIDVIDEAGARQRLLPEKERKELIDIEEIETIVTKMARVPAKQVSVSDKDVLKHLERNLKMVIFGQEPAIEMLSSAIKLARSGLGNPDKPIGNFLLAGPTGVGKTEVTKQLAHHLGIELVRFDMSEYMEPHSVSRLIGAPPGYVGFDQGGLLTEKIVKTPHCVLLLDEVEKAHMDVFNILLQVMDRGVLTDTNGREASFKNVILVMTTNAGASQSSRRTIGFTKQDHTSDAMEVICRSFSPEFRNRLDAIVQFQPLGFSHILRVVDKFIIELEMLLQEKRVVLSATPIARDWLAQHGFDPLMGARPMARVIQEKIKRPLADELLFGKLLNGGRVGIDVRDNELIVETYSEPELLFPATVE

SEQ ID NO: 7237 - protein, 563 aa, Magnetococcus sp. MC-1
MERVGLYRGYLMISKHLETSLNKALQLAHARRHQFATLEHLLLALLDNPEVVDILIPCGCDMQQLNMELAEHLEQHIPLSADAAPSIADITPTIAFQRVIQRAVQQVQSSGRDMVTGAYVLVAMFNEKDAHAVYFLAKQNINKLDVQSMIAHGGESEATGAGEHGHAHEGSAAGAGNKEKDDPLAAYTVNLNIRAQEGKIDPLIGRENEIRRTLQILCRRRKNNPLYVGDAGVGKTHLAEGLALKIVNGEVPEILADAEVFSLDMGSLLAGTKYRGDFESRLKNVLRALKERPKSVLFIDEIHTVIGAGATSGSTMDASNLLKPMLQNGELRCIGSTTFEEYRTIFEQDRALARRFQKVDVLEPSLEETIKILKGLKIRFEDHHGVRFTNQALQTAAELSARHINDRKHPDSAIDVIDEAGAASQLLPLSKRKKSIGVKEIEQVVALMARIPTRSVSKDDRQVLRNLDKNLRLSLFGQDGAIDKTCEAIKLNRSGLGNPEKPIGSFLFAGPTGVGKTELARLLAAEMGVELIRFDMSEYMERHAVSRLIGAPPGYVGLSRVDC

SEQ ID NO: 7238 - protein, 308 aa, Magnetococcus sp. MC-1
SCISVSFCSFFVFLLPVYPRPCIRSWQCFVLVLGVVSDPYPGACFGPRVVTDCPLLLLMGCLSRYILSIWASSVSRLIGPPQLCGFEQVVLLTDAWTFNPHSVLLLDEIEKAHRDVLNILLQVMDHGKLTDNNGRQADFRNVVLIMTTNAGASDLERASVGFVTQTHVGDDMKAINQTFAPEFRNRLDAIIPFVQLNRETILRVVDKFLVRLETQLEEKGVALFVDDSARHLLAKKGYDKKHGARPMERAIQQELRKPLSDELLFGKLVHGGAVHVSAVEAANELAILVEDSHEVEKAEKTSEETSEA

SEQ ID NO: 7239 - protein, 809 aa, Treponema pallidum
MKIIISASVQIILDQAFDLARKRRHEYITAEHVLFSALAHPAALEIINLCSADIALIHSNLSEFLKTQVPVDLSHTPSQSLGFQHLLKRAVLYCEANKKSALEVGDLLVSLLQAETNYASYYMRMSGMSTARLIEVIARVNGIRHGDKNVSMGSNAQERYSESDDVGESAGHGPPLDGTEGDGNTADVHVHYEHCAHKRTDADTHRYTVLEKYTVNLTERARRGELAPLIGRTQEIERTIQILCRRQKNNPVHVGEAGVGKTAITEGLAQRIVRCDVPEALEGVEIFSLDMTSLLAGTKFRGDFEERLKRLAEELEKKTQAILFIDEIHTVVGTGSGGSGGLDASNLLKPLLSSGKIRCIGSTTYEEYTKHFRKDQALARRFQKIDIEEPSEEETLRILEGIRTLYEDFHAVHYSDEALAAAVRLSVQYIQGRHLPDKAIDIIDEAGACAKLSRGKHGTEGVCSVIGESDIDEIVAKIAKIPKQRVSASEIEKLRNFERSISEKIFGQGEAIDLVTRTLKRARVGLRVKHKPIANLLFVGATGVGKTELARTLAQELGIVLHRFDMSEYQEKHTVSRLIGSPPGYVGFEEGGLLTDAVRKQPHAVLLLDEIEKAHPDIFNVLLQVMDYATLTDNQGRKADFRNVILIMTSNAGARNMGVSLIGFHKGQVGTAVIDEAVERIFSPEFRNRLDAVIRFDALSLETMERIARKELALVCEQLQKKHIRFDITDDALALLAERSHSGGSGARNVARLVEQEVANVLADLMLFGGVAEGDALRCTVKDRHAQCNFLRIECVQSSYSGSIQDALG

SEQ ID NO: 7240 - protein, 756 aa, Pseudomonas putida KT2440
MLNRELEVTLNLAFKEARSKRHEFMTVEHLLLALLDNEAAATVLRACGANLDKLKHDLQEFIDSTTPLIPVNDEDRETQPTLGFQRVLQRAVFHVQSSGKREVTGANVLVAIFSEQESQAVFLLKQQSVARIDVVNYIAHGISKVPGHGAQSESEQDMQDDEGGETSSSSNPLDAYASNLNELARAGRIDPLVGREQEVERVAQILARRRKNNPLLVGEAGVGKTAIAEGLAKRIVDGQVPDLLAQSVVYSLDLGALLAGTKYRGDFEKRFKALLGELRKRPQAILFIDEIHTIIGAGAASGGVMDASNLLKPLLSSGEIRCIGSTTFQEFRGIFEKDRALARRFQKVDVSEPSVEDTVGILRGLKGRFESHHNIEYSDEALRAAAELASRYINDRHMPDKAIDVIDEAGAYQRLQPEASRVKRIDVPQVEDIVAKIARIPPKHVTSSDKELLRNLERDLKLTVFGQDQAIDSLATAIKLSRAGLKSPDKPVGSFLFAGPTGVGKTEAARQLAKALGVELVRFDMSEYMERHTVSRLIGAPPGYVGFDQGGLLTEAITKQPHCVLLLDEIEKAHPEVFNLLLQVMDHGTLTDNNGRKADFRNVILIMTTNAGAETAARASIGFTHQDHASDAMEVIRKSFTPEFRNRLDTIIQFGRLSTETIKSIVDKFLIELQAQLEDKRVLLEVSDEARGWLAVSGYDVQMGARPMARLIQDKIKRPLAEEILFGELAEHGGVVHVDLRDGELVFDFETTAEVA

SEQ ID NO: 7241 - protein, 758 aa, Xylella fastidiosa 9a5c
MFSKDLEQTIGQCYKRTREACHEFMTVEHLLLSLLDNPLAHAVLKACGADVARLKRDLEQAIEVSITRLDADDGRDTQPTLGFQRVLQRAVYHVQSSGKKEVTGANVLVAIFGEKDSHAVYFLNQQDISRLDIVNYLSHGITRMGDESDIGQAAENEAKGDSEANKGDALAEYAINLNEHARNGRIDPLVGRKDEIERTIQVLCRRRKNNPLYVGEAGVGKTAIAEGLAKRIVDRSVPEVLADAVIYSLDLGALVAGTKYRGDFEKRLKGVLSALRKTPNAVLFIDEIHTIIGAGSASGGTMDASNLIKPALASGELRCIGSTTFQEYRGIFEKDRALARRFQKIDIVEPTAGEAFEILQGLKPKYEAHHGVTYADDALRAAVDLSVKHIGDRLLPDKAIDVIDEAGARQRLLPEKERKELIDIEEIETIVTKMARVPAKQVSVSDKDVLKHLERNLKMVIFGQEPAIEMLSSAIKLARSGLGNPDKPIGNFLLAGPTGVGKTEVTKQLAHHLGIELVRFDMSEYMEPHSVSRLIGAPPGYVGFDQGGLLTEKIVKTPHCVLLLDEVEKAHMDVFNILLQVMDRGVLTDTNGREASFKNVILVMTTNAGASQSSRRTIGFTKQDHTSDAMEVICRSFSPEFRNRLDAIVQFQPLGFSHILRVVDKFIIELEMLLQEKRVVLSATPIARDWLAQHGFDPLMGARPMARVIQEKIKRPLADELLFGKLLNGGRVGIDVRDNELIVETYSEPERLFPATVE

SEQ ID NO: 7242 - protein, 758 aa, Xylella fastidiosa Temecula1
MFSKDLEQTIGQCYKRTREACHEFMTVEHLLLSLLDNPLAHAVLKACGADVTRLKRDLEQAIEVSITRLDADDGRDTQPTLGFQRVLQRAVYHVQSSGKKEVTGANVLVAIFGEKDSHAVYFLNQQDISRLDIVNYLSHGITRMGEESDIGQAAENEAKGESEANKGDALAEYAINLNEHARNGRIDPLVGRKDEIERTIQVLCRRRKNNPLYVGEAGVGKTAIAEGLAKRIVDRSVPEVLADAVIYSLDLGALVAGTKYRGDFEKRLKGVLSALRKTPNVVLFIDEIHTIIGAGSASGGTMDASNLIKPALASGELRCIGSTTFQEYRGIFEKDRALARRFQKIDIVEPTAGEAFEILQGLKPKYEAHHGVTYADDALRAAVDLSVKHIGDRLLPDKAIDVIDEAGARQRLLPEKERKELIDIEEIETIVTKMARVPAKQVSVSDKDVLKHLERNLKMVIFGQEPAIEMLSSAIKLARSGLGNPDKPIGNFLLAGPTGVGKTEVTKQLAHHLGIELVRFDMSEYMEPHSVSRLIGAPPGYVGFDQGGLLTEKIVKTPHCVLLLDEVEKAHMDVFNILLQVMDRGVLTDTNGREASFKNVILVMTTNAGASQSSRRTIGFTKQDHTSDAMEVICRSFSPEFRNRLDAIVQFQPLGFSHILRVVDKFIIELEMLLQEKRVVLSATPIARDWLAQHGFDPLMGARPMARVIQEKIKRPLADELLFGKLLNGGRVGIDVRDNELIVETYSEPELLFPATVE

SEQ ID NO: 7243 - protein, 760 aa, Yersinia pestis KIM
MPMLNQELELSLNMAFARAREHRHEFMTVEHLLLALLSNPAAREALEACTVDLVALRQELEAFIEQTTPTLPVSEEERDTQPTLSFQRVLQRAVFHVQSSGRNEVSGANVLVAIFSEQESQAAYLLRKHDVSRLDVVNFISHGARKDEPSQTPNVDNSPSEEQASGEDRMENFTTNLNQLARVGGIDPLIGRDKELERTIQVLCRRRKNNPLLVGESGVGKTAIAEGLAWRIVQGDVPDVISECTLYSLDIGSLLAGTKYRGDFEKRFKALLKQLENDKDSILFIDEIHTIIGAGAASGGQVDAANLIKPLLSSGKIRVIGSTTYQEFSNIFEKDRALARRFQKIDIIEPTPEETVQIINGLKPKYEAHHDVRYTAKAIRAAVELSVKYINDRHLPDKAIDVIDEAGARSRLMPVNKRKKTVNVSDIESVVARIARIPEKTVSASDRDVLRNLSDRLNMLVFGQDKAIEALSEAIKMSRAGLGHERQPVGSFLFAGPTGVGKTEVTVQLAKALDIELLRFDMSEYMERHTVSRLIGAPPGYVGYDQGGLLTDSVIKHPHAVLLLDEIEKAHPDVFNLLLQVMDNGTLTDNNGRKADFRNVILVMTTNAGVRETQRTSIGFKQQDSSTDALEEIKKIFTPEFRNRLDNIIWFNHLSPAVIQQVVDKFIVELQAQLDAKGVSLEVSDEARDWLSEKGYDKAMGARPMTRVIQENLKKPLANELLFGSLVDGGSVTVNLDKEKQQLAYEFQSAQKRKTEGAVH

SEQ ID NO: 7244 - protein, 765 aa, Magnetospirillum magnetotacticum
MLSRNLEQSLHRALSQASERRHEYATLEHLLLALTDDQDAVAVLRACNVDIDKLKRDLGEFIDTNLSELVSPRGTDPKPTAGFQRVVQRAAIHVQSSGREEVTGANVIVALFSERESHAVYFLQNQDMTRLDAVNYISHGVAKAPGRGQSRTVHGADEDANPDKVVKKGQEALNAYCVNLNKKAAQGKIDPLIGRDEEIDRTIQILCRRSKNNPLYVGDPGVGKTAIAEGLARRIVNGEVPDVLKNATIFALDMGALLAGTRYRGDFEERLKAVVTELENYDGAVMFIDEIHTVIGAGATSGGSMDASNLLKPALASGSLRCIGSTTYKEFRNHFEKDRALVRRFQKIDVAEPSIPDAIKILNGIKTYYESHHKVRYTAEAIKAAVELSAKYITDRKLPDKAIDVIDEVGASRMLLPESKRRKTVTVKDIEDIVAKIARIPPKSVSTNDVEALRNLERDLKTLVFGQDKAIEALASAIKLARAGLREPEKPIGCYLFSGPTGVGKTEVARQLAKIMGIELTRFDMSEYMERHSVSRLIGAPPGYVGFDQGGLLTDAIDQHPHSVLLLDEIEKAHPDLFNILLQVMDHGRLTDHNGKTVDFRNVILIMTTNAGAADLAKSAIGFGRESREGDDTDAINRMFSPEFRNRLDSTIAFASLTPEIVAQVVDKFVMHLETQLGDRDVTIELTDEARAWLSKKGYDRSFGARPLARVIQEHIKKPLAEELLFGRLSKGGIVRIRVGEDNKLAFEFLATIHKTADKIPELVE

SEQ ID NO: 7245 - protein, 445 aa, Magnetospirillum magnetotacticum
MPGPEEESSSDRPSGDDGEARPKKKADALEAYCVNLNKKARDGKIDPLIGRHSEVERTIQVLCRRQKNNPLLVGDPGVGKTAIAEGLARKIIQNEVPEVLADATVFSLDMGTLLAGTRYRGDFEERLKQVMKEIEAHPNAIMFIDEIHTVIGAGATSGGAMDASNLLKPALASGALRCIGSTTYKEYRQYFEKDRALVRRFQKIDVNEPSIPDTIEILKGLKPYFEEFHKLKYTTDAVKAAVELSARYINDRKLPDKAIDVIDETGASQMLVPEARRKRTIGVKEIETTIATMARIPPKTVSKDDAVVLKNLTENLKRVVYGQTNAIEALTSAIKLARAGLRDPDKPIGSYLFAGPTGVGKTEAAKQLAASLGVEMLRFDMSEYMERHTVSRLIGAPPGYVGFDQGGLLTDGIDQHPHCVLLLDEIEKAHPDLFNILLQVMDHES

SEQ ID NO: 7246 - protein, 332 aa, Magnetospirillum magnetotacticum
MRASNGPCPGQKSAWPRRGGSDAGMGCGSRLRPCIRPGARREGAHRSGPDPLVLRKRNTRSALPAALKKRRCPGGADPAGQRIDHAVPRQRADNGSIRGKDKRMNFEKYTERARGFVQAAQNLAVREGNPQLAPGHLLKVLLDDPEGLCAGLIDRAGGQSRVAHAQIEQWLAKQPKVSGNSAQPQATRELVRLFDTAEQAAEKAGDSYVTVERLLLAFAVEKESEAGRILTAAGVTAASLNGAINALRKGRTADNASAENAYDALKKYARDLTEAAREGKLDPVIGRDEEIRRTIQVLSRRTKNNPVLIGEPGVGKTAIVEGLALRIVNGDV

SEQ ID NO: 7247 - protein, 382 aa, Magnetospirillum magnetotacticum
TYGTRWSPAPPTRPLRARGPSPDNDRGRRCGWRDSGSCPLAKTCRGRFATMRASNGPCPGQKSAWPRRGGSDAGMGCGSRLRPCIRPGARREGAHRSGPDPLVLRKRNTRSALPAALKKRRCPGGADPAGQRIDHAVPRQRADNGSIRGKDKRMNFEKYTERARGFVQAAQNLAVREGNPQLAPGHLLKVLLDDPEGLCAGLIDRAGGQSRVAHAQIEQWLAKQPKVSGNSAQPQATRELVRLFDTAEQAAEKAGDSYVTVERLLLAFAVEKESEAGRILTAAGVTAASLNGAINALRKGRTADNASAENAYDALKKYARDLTEAAREGKLDPVIGRDEEIRRTIQVLSRRTKNNPVLIGEPGVGKTAIVEGLALRIVNGDV

SEQ ID NO: 7248 - protein, 123 aa, Magnetospirillum magnetotacticum
MEVVRASFRPEFLNRLDEILLFHRLGRGDMAGIVDIQLKRLRALLADRKIELSLDGGAMEWLAEKGYDPAYGARPLKRVIQRALQNPLAGLILEGLVKDGDSVSVTAGEGGLLMNGRFTGNEV

SEQ ID NO: 7249 - protein, 746 aa, Leptospira interrogans serovar lai str. 56601
MILTEEMERTLRKAWEEAKKRRNEFITLEHILLALTYDSVAKEVLEACGADIERLRKDLIDYLESELESFPESSGEVDPIYTIGVQHVLQLAEFHVQSTRNKKMDGGDVLAALFREDQSNAVYFLGSQDISRLDIVRYISHGIRKDSKKNPGKEMAGEEGEKISDPLRAFCVDLTAKAKEGKLDPMVGREDELDRTIHILCRRRKNNPIFVGEAGVGKTSIVEGLAQRVVDGKVPEPLKNLKVYSLDMGLLLAGTKFRGEFEERLKNVVAQITAQEDHVLFIDEIHTIIGAGAVSGGSLDASNLLKPALSSGELRCIGTTTYKEFKTIFEKDHALSRRFQKVEVGEPSISETIEILKGLLEKYESFHKVKYSSSAVEQAAELSARYILDRKLPDKAIDLLDEAGARVRLRESGKKTVTVREIEDLVSKIAKVPSVTVKADDREKLKNLDEELKAKIYGQDSAIDQLVQSIRLSRSGLSEPGKPVGSFLFAGPTGVGKTELTRKLAEILGVELIRFDMSEYMEKHTVSRLIGSPPGYVGFEQGGQLTDAVYRNPHCVLLLDEIEKAHEDIYNILLQIMDHATLTDNNGRKSDFRQVILVMTTNTGARERSTNPVGFANDLLEDRSLKAIEKQFSPEFRNRLTAVIEFSSLNQENVTKVVAKQLALLQERLNSKQIELEFNEDVLVYIADKAYTPEFGARPVQRWIDTHISKRISEEILFGVLKSGGKAKLISGKEGIEMEFSSGKKN

SEQ ID NO: 7250 - protein, 760 aa, Xanthomonas campestris pv. campestris str. ATCC 33913
MFSKDLEQTIGQCYKRAREARHEFMTVEHLLLSLLDNPSAQAVLKACGADQVRLHTDLEQAIEASVSRLAEDDGRDTQPTLGFQRVLQRAVYHVQSSGKKEVTGANVLVAIFGEKDSHAVYFLNQQDITRLDIVNYLSHGIAKLGEDGEQPSASDGEPKSDAGEGEGKGDALAEYATNLNDHARNGKIDPLVGRADEIERTIQVLCRRRKNNPLYVGEAGVGKTAIAEGLAKRIVDADVPEVLADAVIFSLDLGALVAGTKYRGDFEKRLKGVLTALKKVPNAVLFIDEIHTIIGAGSASGGTMDASNLIKPALASGELRCIGSTTFQEYRGIFEKDRALARRFQKIDIVEPTVGETFEILQGLKPKYEAHHGVTYADDALQAAVDLSVKHIGDRLLPDKAIDVIDEAGARQRLLPEGQRKELIDIQEIETIVAKMARIPAKQVSATDKDVLQHLERNLKMVIFGQNPAIETLAGSIKLARSGLANPEKPIGNFLFAGPTGVGKTEVTKQLALQLGIELVRFDMSEYMEAHSISRLIGAPPGYVGFDQGGLLTEKIVKTPHCVLLLDEVEKAHPDIFNILLQVMDRGILTDTNGREANFKNVILVMTTNAGATQASRRSIGFTKQDHSTDAMESIRRGFTPEFRNRLDAIVQFQPLGFDHILRVVDKFIIELEMLLQEKHVSLSATPTARDWLAQHGFDPLMGARPMSRVIQEKIKRPLADELLFGKLVEGGRVNIDVKDGELVVEAHPEPERLLPATVD

SEQ ID NO: 7251 - protein, 760 aa, Xanthomonas axonopodis pv. citri str. 306
MFSKDLEQTIGQCYKRAREARHEFMTVEHLLLSLLDNPSAQAVLKACGADQVRLHNDLEQAIEASVSRLAEDDGRDTQPTLGFQRVLQRAVYHVQSSGKKEVTGANVLVAIFGEKDSHAVYFLNQQDITRLDIVNYLSHGIAKLGEDGEQPSAPDGESKSEGGEGEAKGDALAEFASNLNEQARNGKIDPLVGRSDEIERTIQVLCRRRKNNPLYVGEAGVGKTAIAEGLAKRIVDNDVPEVLADAVIYSLDLGALVAGTKYRGDFEKRLKGVLAALKKVPNAVLFIDEIHTIIGAGSASGGTMDASNLIKPALSSGELRCIGSTTFQEYRGIFEKDRALARRFQKIDIVEPTVGETFEILQGLKPKYEAHHGVTYADDALQAAVDLSVKHIGDRLLPDKAIDVIDEAGARQRLLPEGTRKELIDIEEIETIVAKMARIPAKQVSATDKDVLQHLERNLKMVIFGQNPAIETLAGSIKLARSGLANPEKPIGNFLFAGPTGVGKTEVTKQLALQLGIELVRFDMSEYMEAHSISRLIGAPPGYVGFDQGGLLTEKIVKTPHCVLLLDEVEKAHPDIFNILLQVMDRGILTDTNGREANFKNVILVMTTNAGATQASRRSIGFTKQDHSTDAMESIRRGFTPEFRNRLDAIVQFQPLAFDHILRVVDKFIIELEMLLQEKHVSLSATPTARDWLAQHGFDPLMGARPMSRVIQEKIKRPLADELLFGKLVDGGRVNIDVKDGELVVEAHPEPERLLPATVD

SEQ ID NO: 7252 - protein, 776 aa, Caulobacter crescentus CB15
MPSFSRPLEESLHRAVAYANQRKHEYATLEHLLLSLTDDEDAAGVMRACDVDLAALKKSLSNYLDVELTSLVVDDEEDAKPTAGFQRVIQRAVIHVQSSGREEVTGANVLVAIFSERESHAAYFLQEQDMTRYDAVNFIAHGIAKKAGASEPKSVKGASTGSNATEEDGDKSTTKTGGEALEAYCVDLNEKARQGKVDPLIGRANEVERAIQILCRRTKNNPLLVGDPGVGKTAIAEGLARKIVTHQVPEVLEGATIYSLDMGALLAGTRYRGDFEERLKQVVKELENHPNAVLFIDEIHTVIGAGATSGGAMDASNLLKPALASGTLRCMGSTTYKEFRQHFEKDRALVRRFQKIDVNEPTVEDTIKILKGLKTYYEDFHKLKYTADALKVAVELSAKYITDRKLPDKAIDVIDEAGASQMLLPESRRKKTIGVKEIESVVAKIARIPPKSVSKSDTEALKELESDLKRAVFGQDEALSQLAAAMKLARAGLREPNKPIGSYLFSGPTGVGKTEAAKQLAQTLGIEMLRFDMSEYMERHTVSRLIGAPPGYVGFDQGGQLTDAVDQHPHAVVLLDEIEKAHGDVYNILLQVMDNGTLTDSNGKKVDFRNVVLIMTTNAGASDAQRNSIGFGRSKVEGEEEAALKRLFTPEFRNRLDAVVAFKPLSADIIRQVVQKFVMQLEAQLADRNITIELSDDAADWLAKNGFDELYGARPLARVIQEHIKKPLADDILFGRLVRGGHVKVVLKDSKIDFEIDSSTAPKAGKTDETEPAMAE

SEQ ID NO: 7253 - protein, 709 aa, Campylobacter jejuni subsp. jejuni NCTC 11168
MKYQENLQKYLDNAKNLSLINHHEFVTCEHVLFALLKLSTDFKDIFEEFSDGDLELLETELKNYISQNNQVIKQEIEPTISVVLDEILLSSKNKNNEIKIIDFLEKLIQDSRSYSSYLLKKHNINLNKIQELQNHENIQNLNNHTSDLTLLAQNGKIDPLIGRKFELERMMQILSRRKKNNPILVGEAGVGKTAIVEGLALAIAEKKVPKNLQNAKIFSLDMASILAGTKYRGDFEKRIKEILSELEKIPNAILFIDEIHTIVGAGSTGESHTDFSNLLKPALSNGTLKCIGATTFMEYKNTFDKNKPLSRRFAKINVDEPSQEESLQILKGLKNKYEEFHHIKLNDEILQYAVIWGKKFFNDKFLPDSAIDLIDELGASFALNPRAKKNANLKDLENVLAKMTHHHKMFEFDQNKALMNLKTNLKAKIFGQDEVIDSLVSSLKQSFAGFKNSNTPRGVFLFTGSSGVGKTELCKALAEFLGLNLERFDMSEYAEKHAISKLIGSPAGYIGFEEGGLLSNAIRKNPFSLVLFDEIEKAHPDLSNTFLQIFDNAELTDNSGLKVDFKNTIIIMTSNLGLKESNELGFLSKNEEKSNRAIKDFFAPEFINRIDKILHFNDLNDAILVKIIEKELDEISKNLNNIKLSVDDKAKIYLAKKAYNKEFGVRLLKRIISEEIGEKISDEILFGKLKKGGIAKIKLGKNEKLEFIF

SEQ ID NO: 7254 - protein, 655 aa, Corynebacterium glutamicum ATCC 13032
MNSRGLPHTTNHYKKEPPTVPFHDFTDPDSDPRQNAPANPTAQPPSAPTSHSSQQGLPPGAIMIPFPGQPQQQSAPNDETRFIDLNERHKDDEPALFRDDVIDQTLAILISKNKPNALLVGPAGTGKSRIAEDIARRLANDDVSIPDQLVGHRILDVSIAELVAGAGVVGQLEERILDLIKYATDPSNKVIIFIDEIHQIAGDQSSHSGSQAKVAQILKPYLARGDLRVIGATTTQEARDFDHDPALKRRFSRVNVDEFDRDQTLTILHAARDGYLKHFNNAVTVSDDVLGYVYTYSQQFNPGNTAQPDAALTLFDKALASLTMEKQRLINNHVIAPSLKFPVSERHIHNTARKLAFGSQVPASINTDDARDKLETLFGQDHIIEPVLTAIKREQLGIFPRTKPLSWVFAGSSGVGKTEMARILSRAINGGDPIIINGPEYISPESITGLIGSSDGYIGSNSKRAKPLDPLISNPRQVIVLDEFEKSHPHFQQLFMAALDTGTMAMANGTTLNFSQAIIIATTNAARDKIGRDSFGFDSDNSGVLGSAQAATDPRAQERLKSLMSKDFPVELLNRFQNIFAFNRIDAGTYREILDNLYQRRRDAVLLSHPHYAAQIPADIDSDTLDQLVETTFISDFGARPAARTIEDHIASLLM

SEQ ID NO: 7255 - protein, 595 aa, Corynebacterium glutamicum ATCC 13032
MTQVVAGTLVGESINREIDEDKYPYLSSYAAPVAVPVREIIGREEEVNKIMAALMRPEISNVMLVGPAGSGKTTLVQQALVKDPERNYIEVDVAKMVADLSTPAQMAARIKGVFEDAIAYRKHEGHELVLFVDEFHQIVQLSNAAVEAIKPILAMSGVLGVRVIAATTLEEFHEHIRPNQALTERLQEIRLTPTDQKTTVAILRGMADRYGVSDQFYDDHVFEQIYSTTERFMPSSVQPRKSIRVLDAMVGWHRLSGKPMDMDLLGDVLHDAIGVDIAFKVDGTSIKDKLDEKVMAQSLATTVVARRLQLVVADLHDKSRPLSNFLFTGPTGVGKTELVKQLARVLFGDDTGRLIRFDMSEFALESSLDLFRSELTRRVADQGNAIVLLDEVEKADRAIARLLLQVLDDGRLSDDYNREVSFLNTYIVMTTNAGSEIFETISNYATDDTGDGRAIKDFVKNIHTSIKNKGFPPELLGRVDEIVPFQPLSETTQDRIISKKLQDVATEVYERHGVKLHCSQKVMEFLLVDQVEESAESGGARGAVRSLQREVVTEVATFINTYPEVRDIYVDVDGQMRNKTNRVSTARVVIKRVEG

SEQ ID NO: 7256 - protein, 763 aa, Shigella flexneri 2a str. 301
MGEVPMLNQELELSLNMAFARAREHRHEFMTVEHLLLALLSNPSAREALEACSVDLVALRQELEAFIEQTTPVLPASEEERDTQPTLSFQRVLQRAVFHVQSSGRNEVTGANVLVAIFSEQESQAAYLLRKHEVSRLDVVNFISHGTRKDEPTQSSDPGSQPNSEEQAGGEERMENFTTNLNQLARVGGIDPLIGREKELERAIQVLCRRRKNNPLLVGESGVGKTAIAEGLAWRIVQGDVPEVMADCTIYSLDIGSLLAGTKYRGDFEKRFKALLKQLEQDTNSILFIDEIHTIIGAGAASGGQVDAANLIKPLLSSGKIRVIGSTTYQEFSNIFEKDRALARRSQKIDITEPSIEETVQIINGLKPKYEAHHDVRYTAKAVRAAVELAVKYINDRHLPDKAIDVIDEAGARARLMPVSKRKKTVNVADIESVVARIARIPEKSVSQSDRDTLKKLSDRLKMLVFGQDKAIEALTEAIKMARAGLGHEHKPVGSFLFAGPTGVGKTEVTVQLSKALGIELLRFDMSEYMERHTVSRLIGAPPGYVGFDQGGLLTDAVIKHPHAVLLLDEIEKAHPDVFNILLQVMDNGTLTDNNGRKADFRNVVLVMTTNAGVRETERKSIGLIHQDNSTDAMEEIKKIFTPEFRNRLDNIIWFDHLSTDVIHQVVDKFIVELQVQLDQKGVSLEVSQEARNWLAEKGYDRAMGARPMARVIQDNLKKPLANELLFGSLVDGGQVTVALDKEKNELTYGFQSAQKHKAEAAH

SEQ ID NO: 7257 - protein, 758 aa, Shigella flexneri 2a str. 2457T
MLNQELELSLNMAFARAREHRHEFMTVEHLLLALLSNPSAREALEACSVDLVALRQELEAFIEQTTPVLPASEEERDTQPTLSFQRVLQRAVFHVQSSGRNEVTGANVLVAIFSEQESQAAYLLRKHEVSRLDVVNFISHGTRKDEPTQSSDPGSQPNSEEQAGGEERMENFTTNLNQLARVGGIDPLIGREKELERAIQVLCRRRKNNPLLVGESGVGKTAIAEGLAWRIVQGDVPEVMADCTIYSLDIGSLLAGTKYRGDFEKRFKALLKQLEQDTNSILFIDEIHTIIGAGAASGGQVDAANLIKPLLSSGKIRVIGSTTYQEFSNIFEKDRALARRFQKIDITEPSIEETVQIINGLKPKYEAHHDVRYTAKAVRAAVELAVKYINDRHLPDKAIDVIDEAGARARLMPVSKRKKTVNVADIESVVARIARIPEKSVSQSDRDTLKKLSDRLKMLVFGQDKAIEALTEAIKMARAGLGHEHKPVGSFLFAGPTGVGKTEVTVQLSKALGIELLRFDMSEYMERHTVSRLIGAPPGYVGFDQGGLLTDAVIKHPHAVLLLDEIEKAHPDVFNILLQVMDNGTLTDNNGRKADFRNVVLVMTTNAGVRETERKSIGLIHQDNSTDAMEEIKKIFTPEFRNRLDNIIWFDHLSTDVIHQVVDKFIVELQVQLDQKGVSLEVSQEARNWLAEKGYDRAMGARPMARVIQDNLKKPLANELLFGSLVDGGQVTVALDKEKNELTYGFQSAQKHKAEAAH

SEQ ID NO: 7258 - protein, 776 aa, Clostridium thermocellum ATCC 27405
MMRLDDVANKILIAAYNEAKHQKHEFFTPEHILYASLFFDEGRDIIENCGGKVEDIKKDLLEFFRNNMPIVENHEPIESLGINSVMQATAYQCIAAGREYIRIGDIIVALYGEKESFASYILQKNGIKKLDVLKYISHGVSLVPKNMETSLKSLETDTYLEAYQYADDWEYDYEYEDIDEDEDIDEESSSKSNFLEHFTIDLTEKARKGKIDPLIGREDILERTIQVLSRRLKNNPIHVGDPGVGKTAITEGLARLIVEDKVPKSLKGSKIYYLDMGSMLAGTKYRGDFEERIKKVLNEIQNQPKAIVYIDEIHTIVGAGAVSDGAMDASNIIKPFLTQGTLRFIGSTTYEEYKKYFEKDRALSRRFQKIDVPEPSIDDTFKILKGLKDRYEEYHKVKYTDSALRLAAELSAKYIQDRHLPDKAIDVIDETGAYVRLHAKDEDKVITIKNKDIERTVSAIARIPIQSVSRDEISKLKNLDVKLKSTIFGQDKAIDTVVQAIKRSRAGFNENEKPVASLLFVGPTGVGKTELAKQLSLHLGIPFIRFDMSEYQEKHTVSRLIGAPPGYVGYEEGGLLTDAIRKTPHCVLLLDEIEKAHPDIYNVLLQVMDYAVLTDNNGKKADFRNVILIMTSNAGAREVGRTLIGFDSRNVDRSAMTKEVERIFSPEFRNRLDDIVVFNHINEEMALLITKKAINQFKEKLKTKNIKLKVTERCCKWIAQKGLSSIYGAREILRYVQDKIKTYFVDEVLFGELSKGGTAIIDVVDGEIKISKKTQR

SEQ ID NO: 7259 - protein, 757 aa, Pseudomonas syringae pv. syringae B728a
MLNRELEVTLNLAFKEARSKRHEFMTVEHLLLALLDNEAAATVLRACGANLDKLKHDLQEFIDSTTPLIPVHDEDRETQPTLGFQRVLQRAVFHVQSSGKREVTGANVLVAIFSEQESQAVFLLKQQSVARIDVVNYIAHGISKVPGHGEHSSEGEQDMQDDEGGEASSSGNPLDAYASNLNELARQGRIDPLVGRESEVERVAQILARRRKNNPLLVGEAGVGKTAIAEGLAKRIVDNQVPDLLANSVVYSLDLGALLAGTKYRGDFEKRFKALLNELRKRPQAILFIDEIHTIIGAGAASGGVMDASNLLKPLLSSGEIRCIGSTTFQEFRGIFEKDRALARRFQKVDVSEPSVEDTIGILRGLKSRFEQHHSIEYSDEALRAAAELASRYINDRHMPDKAIDVIDEAGAYQRLQPVEKRAKRIDVPEVEDIVAKIARIPPKHVNSSDKELLRNLERDLKLTVFGQDAAIDSLSTAIKLSRAGLKSPDKPVGSFLFAGPTGVGKTEAARQLAKALGVELIRFDMSEYMERHTVSRLIGAPPGYVGFDQGGLLTEAITRQPHCVLLLDEIEKAHPEVFNLLLQVMDHGTLTDNNGRKADFRNVIVIMTTNAGAESAARASIGFTHQDHSSDAMEVIKKSFTPEFRNRLDTIIQFGRLSHEVIKSVVDKFLTELQAQLEDKRVLLEVSEAARSWLAQGGYDAAMGARPMARLIQDKIKRPLAEEILFGELSEHGGVVHIDIKDGEITFDFETTAEMA

SEQ ID NO: 7260 - protein, 64 aa, Pseudomonas syringae pv. syringae B728a
MTLSPEALDKLIAVGYDPVYGARPLKRAIQRWIENPLAQMILSGSFMPGTTITGKVVDDEITFV

SEQ ID NO: 7261 - protein, 756 aa, Pseudomonas fluorescens PfO-1
MLNRELEVTLNLAFKEARSKRHEFMTVEHLLLALLDNEAAATVLRACGANLDKLKHDLQEFIDSTTPLIPVHDEDRETQPTLGFQRVLQRAVFHVQSSGKREVTGANVLVAIFSEQESQAVFLLKQQSVARIDVVNYIAHGISKVPGHGDHSEGEQDMQDDEGGESSSSGNPLDAYASNLNELARQGRIDPLVGRETEVERVAQILARRRKNNPLLVGEAGVGKTAIAEGLAKRIVDNQVPDLLANSVVYSLDLGALLAGTKYRGDFEKRFKALLNELKKRPQAILFIDEIHTIIGAGAASGGVMDASNLLKPLLSSGDIRCIGSTTFQEFRGIFEKDRALARRFQKVDVVEPSVEDTIGILRGLKGRFEQHHNIEYSDESLRAAAELASRYINDRHMPDKAIDVIDEAGAYQRLQPVEKRVKRIEVPEVEDIVAKIARIPPKHVTSSDKELLRNLERDLKLTVFGQDAAIDSLSTAIKLSRAGLKSPDKPVGSFLFAGPTGVGKTEAARQLAKALGIELVRFDMSEYMERHTVSRLIGAPPGYVGFDQGGLLTEAITKQPHCVLLLDEIEKAHPEVFNLLLQVMDHGTLTDNNGRKADFRNVIVIMTTNAGAETAARASIGFTHQDHSSDAMEVIKKSFTPEFRNRLDTIIQFGRLSHEVIKSVVDKFLTELQAQLEDKRVLLEVTDAARSWLAAGGYDSAMGARPMARLIQDKIKRPLAEEILFGELAEHGGVVHIDIKDGELTFDFETTAEMA

SEQ ID NO: 7262 - protein, 796 aa, Desulfovibrio desulfuricans G20
  unsure (1)..(796): unsure at all Xaa locations
MPVPGPKVFRSGAAWKRCNMIGKRLEAVLSVAVSEVKARNHEYLTLEHVLYAMTLEPQGIYILEGCGADAENLRKRLEIFFDSHLESLPEETPTEVVQTMGVQRVLQRAVMQMQSSGKNAVELGDVLAAMFEEEDSYALYFLRAQGVARLDVLEFISHGMGDWSDGEPEPAAQTADGGERQGRASALDQFTVNLTARARDGLIDPLIGRSAELERTVQVLARRRKNNPLFVGDPGVGKTAIAEGLALRIADGDVPESFADAEIFALDMGTLLAGTKYRGDFEARLKAVIKDLSAIPEAILFIDEIHTIVGAGATSGGSMDASNILKPVLASGGIRCIGSTTYEEYRNHFEKDRALSRRFQKIDVQEPSQDECLEILKGLRPYYEEFHEVRYTQPALKAAVELSSRYLQDRFLPDKAIDVIDEAGAVYKLGAHGRKRNTITVSDVERVISRMAQIPAQRVSVSDRGRLERLEEDLHSVVFGQQAAVDSVTKAILRSRAGLSSPERPTGSFLFYGPTGVGKTELAKQLAATLGVSFIRFDMSEYMEKHAVARLIGAPPGYVGFDQGGLLTEAVRKTPHAVVLLDEIEKAHPDMFNILLQVMDYAKLTDNTGRKADFRNVILIMTSNAGAQEMAAKTIGFGDSAGQDMAAKGLKAVEKLFSPEFRNRLDALVPFSNLSREVMLKIVEKFISELQXXXXXXXXXXXXXXXXXRQMKDRRVTIHLSDKARERLAERGYDSAFGARPMGRIIRTGIEDVLAREVLFGRLQKGGTVRIGVRKPAAHGADDDLGLTFRFETSAL

SEQ ID NO: 7263 - protein, 758 aa, Pseudomonas aeruginosa PAO1
MLNRELEVTLNLAFKEARAKRHEFMTVEHLLLALLDNEAAATVLRACGANLDKLRRDLQEFIDSTTPLIPQHDDERETQPTLGFQRVLQRAVFHVQSSGKREVTGANVLVAIFSEQESQAVFLLKQQSIARIDVVNYIAHGISKVPGHAEHPQDGEQDMQDEEGGESATSNHPLDAYASNLNELARQGRIDPLVGREHEVERVAQILARRRKNNPLLVGEAGVGKTAIAEGLAKRIVDGQVPDLLADSVVYSLDLGALLAGTKYRGDFEKRFKALLNELRKRPHAVLFIDEIHTIIGAGAASGGVMDASNLLKPVLSSGEIRCIGSTTFQEFRGIFEKDRALARRFQKVDVTEPSVEDTYGILKGLKGRFEQHHHIEYSDEALRAAAELAARYINDRHMPDKAIDVIDEAGAYQRLQPEEKRVKRIEVAQVEDIVAKIARIPPKHVTTSDKELLRNLERDLKLTVFGQDDAIESLSTAIKLSRAGLKAPDKPVGSFLFAGPTGVGKTEVARQLAKALGVELVRFDMSEYMERHTVSRLIGAPPGYVGFDQGGLLTEAITKTPHCVLLLDEIEKAHPEVFNLLLQVMDHGTLTDNNGRKADFRNIILIMTTNAGAEVAARASIGFNQQDHTTDAMEVIKKSFTPEFRNRLDTIIQFGRLSTETIKSVVDKFLTELQAQLEDKRVQLEVSDAARGWLAEKGYDVQMGARPMARLIQDKIKRPLAEEILFGELAEHGGLVHVDLKGDELAFEFEITAAEPA

SEQ ID NO: 7264 - protein, 627 aa, Pseudomonas aeruginosa PAO1
MALGAICCGHDTRCERLSMPGTALFEKPRWLRDLLRFLPLKSQFVLSGNIRDLQACEVVPGTVTAQSFNQTLCDALLDAGYAQVLAWDPLAGFRVLGRPGSEAGATPQVLLDLGLTPVDGAAPAGIDLLGATLQRLVNRSGEPIALIVDFASRLAVRNDALSAAEHQLFTQALVLSHQARSRPAGEQRKPFFNSVLWVVEKEGDLPDWLLVDNPRLRHIPVSKPDQPARRALAPALLRGLGGAGVAEEALQQAAATFVENTEGLLLLDLNAIVQLARVEGLAMERIADAVRRYKVGVTEDPWLKIDRQRIRQADEIVRRRVKGQQHAVTHMLDIVKRAMTGVGASRKGNRPRGVAFLAGPTGVGKTELAKTVTSLLFGDESAYIRFDMSEFSAEHADQRLIGAPPGYVGYDVGGELTNAIREKPFSVVLFDEIEKAHPRILDKFLQILDDGVLTSGRGDRVYFSEALIVFTSNLGIYRQGENGERVANVLPGEPFEAVQGKVHGEIERYFKLVLNRPEILNRIGENIIVFDFIRADVAEQIFTQMVNGTFADLREQRLVIELAEAPRQALHDLCLGDLSNGGRGIRNQLEARLLNPLSRALFDQDAQPGERFLISALDADGLTLERR

SEQ ID NO: 7265 - protein, 371 aa, Pseudomonas aeruginosa PAO1
MPFLSDMLDQSRRQQDEEQALARENLAEASLLQAHLSHRSALRSRFRFDPAAVMDCLRAEVLGQDPALQAVEDMLKVVRADIADPRRPLFSALFLGPTGVGKTEIVRALARALHGDAEGFCRVDMNTLSQEHYAAALTGAPPGYVGAKEGTTLLEQDKLDGSPGRPGIVLFDELEKASPEVVHALLNVLDNGLLRVASGERTYHFRNTLVFMTSNLCAHEIQRYDERRQRLPWRLLPVGGERRRRDIDGMVRARLLKTFSPEFVNRLDSVVTFNWIERDVVARLVELEVQRLNRRLEKHRCRLEATPEVLAKIARAGFDRQFGARALRRSVRHHLEVPLAEHLLDHHQPGDGNCTTYLASLEHERVRFVRR

SEQ ID NO: 7266 - protein, 758 aa, Yersinia pestis CO92
MLNQELELSLNMAFARAREHRHEFMTVEHLLLALLSNPAAREALEACTVDLVALRQELEAFIEQTTPTLPVSEEERDTQPTLSFQRVLQRAVFHVQSSGRNEVSGANVLVAIFSEQESQAAYLLRKHDVSRLDVVNFISHGARKDEPSQTPNVDNSPSEEQASGEDRMENFTTNLNQLARVGGIDPLIGRDKELERTIQVLCRRRKNNPLLVGESGVGKTAIAEGLAWRIVQGDVPDVISECTLYSLDIGSLLAGTKYRGDFEKRFKALLKQLENDKDSILFIDEIHTIIGAGAASGGQVDAANLIKPLLSSGKIRVIGSTTYQEFSNIFEKDRALARRFQKIDIIEPTPEETVQIINGLKPKYEAHHDVRYTAKAIRAAVELSVKYINDRHLPDKAIDVIDEAGARSRLMPVNKRKKTVNVSDIESVVARIARIPEKTVSASDRDVLRNLSDRLNMLVFGQDKAIEALSEAIKMSRAGLGHERQPVGSFLFAGPTGVGKTEVTVQLAKALDIELLRFDMSEYMERHTVSRLIGAPPGYVGYDQGGLLTDSVIKHPHAVLLLDEIEKAHPDVFNLLLQVMDNGTLTDNNGRKADFRNVILVMTTNAGVRETQRTSIGFKQQDSSTDALEEIKKIFTPEFRNRLDNIIWFNHLSPAVIQQVVDKFIVELQAQLDAKGVSLEVSDEARDWLSEKGYDKAMGARPMTRVIQENLKKPLANELLFGSLVDGGSVTVNLDKEKQQLAYEFQSAQKRKTEGAVH

SEQ ID NO: 7267 - protein, 548 aa, Vibrio vulnificus CMCP6
MLRRKLFWRAKPDLNALRYELDVFIDQTTPFIPDNDETRETQPTLSFQRVLQRAVFHVQSSGRSEVTGANVLVAIFSEQESHAAYLLKKNDISRLDIVNYISHGITKASGASDDSSSSSDSFGSDASSEENSSEERLESFATNLNQVAKDGHIDPLIGRDKELERTIQVLCRRRKNNPLLVGEAGVGKTAIAEGLAWRIVEGSVPDVIKDSVIYSLDIGSLLAGTKYRGDFEKRFKTILKQLEKEKDAILFIDEIHTIIGAGAASGGQVDAANLIKPLLSGGKLRCIGSTTYQEYSNIFEKERALSRRFQKIDVVEPSLDDTTKILMGLKSKYEAHHDVRYTNKALRAAVELSAKYINERHLPDKAIDVIDEAGARSRLTPASRRKKTVGVADIEAMVAKMARIPEKSVSSSDKDILKSLDDKMKMLVFGQDAAIDVLCEAIKLSRAGLGAENKPVGSFLFAGPTGVGKTEVTVQLSKLLGIELLRFDMSEYGERHSVSRLIGAPPGYVGYDQRWFAHRCGDQTSSCPLCCWMKSKKRTQISSTYCCR

SEQ ID NO: 7268 - protein, 173 aa, Vibrio vulnificus CMCP6
MDNGTLTDNNGRKADFRNVILVMTTNAGVAETEKKSIGLIQQDHSHDAMAEIKKVFTPEFRNRLDNIIWFNSLDEAIIHQVVDKFIVELQVQLDARGVSLEVSEDARHWLANKGYDKAMGARPMSRVIQDKLKKPLANELLFGSLIDGGTVKVTLEKDDLKFEYLTTREEAVH

SEQ ID NO: 7269 - protein, 757 aa, Pseudomonas syringae pv. tomato str. DC3000
MLNRELEVTLNLAFKEARSKRHEFMTVEHLLLALLDNEAAATVLRACGANLDKLKHDLQEFIDSTTPLIPVHDEDRETQPTLGFQRVLQRAVFHVQSSGKREVTGANVLVAIFSEQESQAVFLLKQQSVARIDVVNYIAHGISKVPGHGEHSSEGEQDMQDDEGGEASSSGNPLDAYASNLNELARQGRIDPLVGRESEVERVAQILARRRKNNPLLVGEAGVGKTAIAEGLAKRIVDNQVPDLLANSVVYSLDLGALLAGTKYRGDFEKRFKALLNELRKRPQAILFIDEIHTIIGAGAASGGVMDASNLLKPMLSSGEIRCIGSTTFQEFRGIFEKDRALARRFQKVDVSEPSVEDTIGILRGLKSRFEQHHSIEYSDEALRAAAELASRYINDRHMPDKAIDVIDEAGAYQRLQPVEKRVKRIDVPQVEDIVAKIARIPPKHVNSSDKELLRNLERDLKLTVFGQDAAIDSLSTAIKLSRAGLKSPDKPVGSFLFAGPTGVGKTEAARQLAKALGVELIRFDMSEYMERHTVSRLIGAPPGYVGFDQGGLLTEAITRQPHCVLLLDEIEKAHPEVFNLLLQVMDHGTLTDNTGRKADFRNVIVIMTTNAGAESAARASIGFTHQDHSSDAMEVIKKSFTPEFRNRLDTIIQFGRLSHEVIKSVVDKFLTELQAQLEDKRVLLEVSEAARSWLAQGGYDAAMGARPMARLIQDKIKRPLAEEILFGELSEHGGVVHIDIRDGEITFDFETTAEMA

SEQ ID NO: 7270 - protein, 756 aa, Vibrio parahaemolyticus RIMD 2210633
MLNKELESSLNGAFARARDKRHEFMTVEHLLLALLENDAAKEALLACKADLDALRNELDIFIDQTTPLIPESDETRETQPTLSFQRVLQRAVFHVQSSGRNEVTGANVLVAIFSEQESHAAYLLKKNDISRLDIVNFISHGITKASGAGEDPSSSDSFSSDSVEETGSDERLESFATNLNQVAKAGNIDPLIGRDKELERTIQVLCRRRKNNPLLVGEAGVGKTAIAEGLAWRIVEGQVPEVIQNSVIYSLDIGSLLAGTKYRGDFEKRFKSILKQLEKEEDAILFIDEIHTIIGAGAASGGQVDAANLIKPLLSSGKLRCIGSTTYQEYSNIFEKERALSRRFQKIDVVEPSLDDTTKILMGLKPKYEAHHEVRYTNKALRAAVELSAKYINERHLPDKAIDVIDEAGARSRLAPASRRKKTVGVADIEAMVAKMARIPEKSVSSSDKDILKNLDGKMKMLVFGQDNAIDALSEAIKLSRAGLGVDNKPVGSFLFAGPTGVGKTEVTVQLSKLLGIELLRFDMSEYGERHSVSRLIGAPPGYVGYDQGGLLTDAVIKHPHSVVLLDEIEKAHPDIFNLLLQVMDNGTLTDNNGRKADFRNVILVMTTNAGVAETEKKSIGLIQQDHSHDAMAEIKKVFTPEFRNRLDNIIWFNSLDESVIHQVVDKFIVELQVQLDARGVSMEVSQDARHWLAHKGYDKAMGARPMGRVIQEQLKKPLANELLFGSLVDGGTVKVSLVNDALEFEYLSEKEAAMH

SEQ ID NO: 7271 - protein, 802 aa, Bradyrhizobium japonicum USDA 110
MPTFSQSLEQSLHRALAIANERHHQYATLEHLLLSLIDDSDAAAVMRACSVDLDKLRTSLVNYLETEFENLVTDGADDAKPTGGFQRVIQRAVIHVQSSGREEVTGANVLIAIFAERESHAAYFLQEQDMTRYDAVNYISHGIAKRPGVSEARPVRGVDEETETKGSDDAKKKGEALETYCVNLNKKARDGKIDPVIGRNSEINRAIQVLCRRQKNNPLFVGEAGVGKTAIAEGLAKRIVDSEVPEVLAAATVFSLDMGTLLAGTRYRGDFEERLKQVLKELEAHPNAILFIDEIHTVIGAGATSGGAMDASNLLKPALASGTIRCMGSTTYKEYRQHFEKDRALVRRFQKIDINEPTVEDAIAILKGLKPYFEDYHRLKYTNEAIEAAVQLSSRYIHDRKLPDKAIDVIDESGAAQMLVAENKRKKTIGIKEIETTIASMARIPPKSVSKDDAEVLKHLEQTLKRTVFGQDKAIESLAASIKLARAGLREPEKPIGCYLFSGPTGVGKTEVAKQLAASLGVELLRFDMSEYMERHTVSRLIGAPPGYVGFDQGGLLTDGVDQHPHCVVLLDEIEKAHPDLYNVLLQIMDHGRLTDHNGKQVNFRNVILIMTTNAGASDLAKQAFGFTRSKREGDDHDAINRQFAPEFRNRLDAIVSFSHLSVEVIGTVVEKFVLQLEAQLGDRDVTIELSEPAKAWLVQHGYDEQMGARPMARVIQEHIKKPLADEVLFGKLKSGGHVRVVLVKDEADETKEKIGFEFVEGPVTPKQEKLPGARKRPPGKPKPGGPGGSKGPTSKGPLVKA

SEQ ID NO: 7272 - protein, 802 aa, Bradyrhizobium japonicum USDA 110
MPTFSQSLEQSLHRALAIANERHHQYATLEHLLLSLIDDSDAAAVMRACSVDLDKLRTSLVNYLETEFENLVTDGADDAKPTAGFQRVIQRAVIHVQSSGREEVTGANVLIAIFAERESHAAYFLQEQDMTRYDAVNYISHGIAKRPGVSEARPVRGVDEETETKGSDDAKKKGEALETYCVNLNKKARDGKIDPVIGRNSEINRAIQVLCRRQKNNPLFVGEAGVGKTAIAEGLAKRIVDSEVPEVLAAATVFSLDMGTLLAGTRYRGDFEERLKQVLKELEAHPNAILFIDEIHTVIGAGATSGGAMDASNLLKPALASGTIRCMGSTTYKEYRQHFEKDRALVRRFQKIDINEPTVEDAIAILKGLKPYFEDYHRLKYTNEAIEAAVQLSSRYIHDRKLPDKAIDVIDESGAAQMLVAENKRKKTIGIKEIETTIASMARIPPKSVSKDDAEVLKHLEQTLKRTVFGQDKAIESLAASIKLARAGLREPEKPIGCYLFSGPTGVGKTEVAKQLAASLGVELLRFDMSEYMERHTVSRLIGAPPGYVGFDQGGLLTDGVDQHPHCVVLLDEIEKAHPDLYNVLLQIMDHGRLTDHNGKQVNFRNVILIMTTNAGASDLAKQAFGFTRSKREGDDHEAINRQFAPEFRNRLDAIVSFSHLSVEVIGTVVEKFVLQLEAQLGDRDVTIELSEPAKAWLVQHGYDEQMGARPMARVIQEHIKKPLADEVLFGKLKSGGHVRVVLVKDEADETKEKIGFEFVEGPVTPKQEKLPGARKRPPGKPKPGGPGGSKGPTSKGPLVKA

SEQ ID NO: 7273 - protein, 753 aa, Coxiella burnetii RSA 493
MFSKALEKTLNRAFSQAREKRHEFITVEHLLLALLDNPEAGRVLSACGANLERLRAGLGIFIDETTPHIPLNVERDIQPTLSFQRVLQRAIYDVQCNGTPEVTGTNILTAIFSEPESQAVYFLSQENISRIDIINYTTQGITKPRQEARFLSDSQQLPEASGMQETTVDENLIELYATNLNAKARSGRVDPLIGRQEELLRCIQTLCRRTKNNPLLVGDAGVGKTAIVEGLAQLIVQNRVPKPLAHATIYALDLGILLAGTKYRGDFEKRFKSVLKALSREPGAVIFIDEIHNLIGAGSATGGTMDASNLIKPLLTTGELRCMGATTYEEFRNFFSKDHALLRRFQRIDVKEPSVTDTVKILQGLRSRYENYHQIRYTPDALKRAVELSARYISDRQLPDKAIDVIDEAGAFEQLQSDEERKTLITVKEIESIVAKMARIPIHTITQSDKELLIDLPKQLKRVVFGQSQAVESLCNAIKLSRAGLNNADKPVGSFLLAGPTGVGKTEVTRQLAQALGIELIRFDMSEYMERHAVSRLIGAPPGYVGFDQGGLLTEIIRKQPHAVLLLDEIEKAHPDIFNILLQVMDYGYLTDNTGRKADFRHVIIVMTTNAGAEQLERGAIGFAVQDMEQENLGAIKHYFSPEFRNRLDAVIQFKYLDTTTILKIVDKFTRELRDQLKEKGIRLTISSDAKQWLAERGYNEKMGARPMARLIQEKLKVPIANQLLFSELNEGDEIIVNRANGDLVVQRKQIVV

SEQ ID NO: 7274 - protein, 762 aa, Ralstonia solanacearum
MIAQELEVSLHMAFVEARQARHEFITVEHLLLALLDNPTAAEVLRACAANIEDLRTHLKNFIADNTPVVPGTDEVDTQPTLGFQRVIQRAIMHVQSTSNGKKEVTGANVLVAIFGEKDSHAVYYLQQQGVTRLDVVNFISHGIRKDQAEPAKHGDSNPEGEAGDGKESPLEQFTQNLNALAKAGKIDPLIGREQEVERVVQVLCRRRKNNPLLVGEAGVGKTAIAEGLAWRITKGEVPDILARSVVYSLDMGALLAGTKYRGDFEQRLKGVLKSLKDNPNAILFIDEIHTLIGAGAASGGTLDASNLLKPALSSGALKCIGATTFTEYRGIFEKDAALSRRFQKIDVVEPSIDQTVQILRGLKSRFEEHHGVKYAASALTAAAELSARFITDRHLPDKAIDVIDEAGAAQRILPKSKQKKTIGKGEIEDIVSRIARVPPQSVSQDDRSKLQTLERDLKSVVFGQDPAIDALASAIKMSRAGLGKTDKPIGSFLFSGPTGVGKTEVAKQLAFILGIELIRFDMSEYMERHAVSRLIGAPPGYVGFDQGGLLTEAITKKPHCVLLLDEIEKAHPDIFNILLQVMDHGSLTDNNGRKADFRNVIIVMTTNAGAETMNKATIGFTTTREQGDEMADIKRMFTPEFRNRLDATISFRSLDEDIILRVVDKFLMQLEEQLHEKKVDAVFTEKLRRFLAKKGFDPLMGARPMQRLIQDMIRKALADELLFGKLVNGGKVAVDLDDADAVKLEFSENEAPPAPAQEEAEA

SEQ ID NO: 7275 - protein, 909 aa, Azotobacter vinelandii
MSDISRVSLFGKLDPLLFSTLEKATAFCRQRGNPYVELAHWLFQQWQESEGDLRLAARHFELDGERLERDLQAALDRLPRGAGAVSDLSGHIDDAVERAWVYGSLKFGAARIRGAHLLIGLLRTAALRHLLFGISREFERILPDVLGERLDSILAGSSEEVVVSAAAAGAPSPAADRALEQYGVNLSERARTGEIDPVTGRDGEIRQMVDVLLRRRQNNPLLTGEAGVGKTAVVEGLALRIAAGEVPPPLREVELYLLDIGLLQAGASVKGEFERRLRQLIDEVRASPRPIVLFIDEIHTLMGAGGNAGTGDAANLLKPMLARGELRTIGATTWAEYKRHIEKDPALTRRFQVVQIHEPDEERALAMIRGLAGKLAHHHGVLLLDEALRAAVSLSHRYIPARQLPDKAVSLLDTACARVAVSQHALPPELEDCRRRIETLRVERGIVEHECAIGAGDASRLDELATRLAGEEAECERLMARWRDEQELAARIFDLRARLGGGAATPAEEEVRRPLLAELYTVLAELEARQQDEPLILPAVDTHAVAAVVADWTGIPVGRHAQGRGRRRAQPGRHPGGAGDRPAPRPGGDRPADPDRPRAARRSGQAGRRVPARRPFGGGQDRDRAGAGRGVVRRRAEPDRHQHERVPGGAHRQHPERGAARLRRLRRGRRADRGGAPASLQRGAAGRGGEGPPGRARDLLPGVRQGLDGGRRGPPHRLQEHPDHPHLQRRQRPADAPLPGPAADSRPRGAGRRAARAAAPGVPGGAARAPVGGALLPAVGRDAGAHRPPATGADRPPPARQPRHRFPLRAGGGATGRRALHRGRVGRAHGRRHPHPYGAATHQPRTAAARRRRGAADAHPAGRGAGRIRLPLRERADAGRRAKRTGLKAWIVTSRYTACWARTCCCFAP

SEQ ID NO: 7276 - protein, 756 aa, Azotobacter vinelandii
MLNRELEVTLNLAFKEARAKRHEFMTVEHLLLALLDNEAAAAVLRACGANIDKLRHDLQEFIDSTTPLIPQHDEERETQPTLGFQRVLQRAVFHVQSSGKREVTGANVLVAIFSEQESQAVFLLKQQSVARIDVVNYIAHGISKVPGHGDHPDGEHEMQDEEGGDASASGHPLEAYASNLNELARQGRIDPLVGREFEVERVAQILARRRKNNPLLVGEAGVGKTAIAEGLAKRIVDNQVPDLLTHSVVYSLDLGALLAGTKYRGDFEKRFKALLNELRKKPHAILFIDEIHTIIGAGAASGGVMDASNLLKPLLSSGEIRCIGSTTFQEFRGIFEKDRALARRFQKVDVIEPSVEDTVGILRGLKPRFEQHHGIEYSDEALRAAAELSFRYINDRHMPDKAIDVIDEAGAFQRLQPEDRRAKLIDVAQVEDIVAKIARIPPKHVSTSDKELLRNLERDLKLTVFGQDAAIDSLATAIKLSRAGLKSPDKPVGSFLFAGPTGVGKTEAARQLAKALGVELVRFDMSEYMERHTVSRLIGAPPGYVGFDQGGLLTEAITKQPHCVLLLDEIEKAHPEVFNLLLQVMDHGTLTDNNGRKADFRSVIIIMTTNAGAETAARASIGFTLQDHSSDAMEVIKKSFTPEFRNRLDTIIQFGRLSHEVIKNIVDKFLTELQAQLEDKHVQLDVSERARGWLAEHGYDAQMGARPMARLIQDRIKRPLAEEILFGELAEHGGVVHIDLEGEELSFDFETAAEVA

SEQ ID NO: 7277 - protein, 327 aa, Azotobacter vinelandii
MLKDEAAAVLNLADTLAARVIGQRHGLEAIARRIRTARARLDDPGKPVGVFLLAGPSGVGKTETALALAEALYGGEQNLIVINMSEFQEAHTVSTLKGAPPGYVGYGEGGVLTEAVRRRPYSVVLLDEVEKAHPDVHEIFFQVFDKGWMEDGEGRRIDFKNTLIILTSNVGSDLLMRLCQDPQRIPDPEALAGALREPLRRVFPAALLGRLSVVPYYPLSDEMLARIVRLQLERIGRRLRDNHGIDFHYAQAAVQLVGARCTEVESGGRMVDAILTHTVLPHISRELLLRAGGEAPLTRIQLDAEQGEFVYRFESGQTPADAQRGRD

SEQ ID NO: 7278 - protein, 883 aa, Glycine max
  unsure (1)..(883): unsure at all Xaa locations
MARVLVQSTGMPGLLSGQRHGKHKGSGKSKRSVKMMSTLRMTALRMWSFSGLRTLNPMDSLSRPRHTFPLXXTTSRRARAKRCVPKAMFERFTDKAIKVIMLAQEEARRLGHNFVGTEQILLGLIGEGTGIAAKVLKSMGINLKDARVEVEKIIGRGSGFVAVEIPFTPRAKRVLEFSLEEARQLGHNYIGSEHLLLGLLREGEGVAARVLENLGADPNNIRAQVIRMVGEGADSVGATVGPGSGNNNKMPTLVEXGKNLTKLAEEGEDDGAMVTEVDIQHIMQILGRRTKNNPCLIGEPGVGKTAIAEGLAQRIANGDVPETIEGKKVITLDMGLLVAGTKYRGEFEERLKKLMEEIKQSDEIILFIDEVHTLIGAGAAEGAIDAANILKPALARGELQCIGATTLDEYRKHIEKDPALERRFQPVKVPEPTVDETIQILKGLRERYEIHHKLRYTDEALVAAAQLSYQYISDRFLPDKAIDLIDEAGSRVRLQHAQLPEEARELDKEVRQIIKEKEEAVRNQDFEKAGELRDREMDLKAQISTLVEKGKEMSKAETEAGDEGPIVTEADIQHIVSSWTGIPVEKVSTDESDRLLKMEETLHKRVIGQDEAVKAISRAIRRARVGLKXRLDIRGFMERHTVSKLIGSPPGYVGYTEGGQLTEAVRRRPYTVVLFDEIEKAHPDVFNMMLQILEDGRLTDSKGRTVDFKNTLLIMTSNVGSSVIEKGGRKIGFDLDYDEKDSSYNRIKSLVTEELKQYFRPEFLNRLDEMIVFRQLTKLEVKEIADIMLKEVFDRLKAKEIDLSVTERFRERVVDEGYNPSYGARPLRRAIMRLLEDSMAEKMLAREIKEGDSVIVDADSDGNVIVLNGSSGAPDSLEEALPV

SEQ ID NO: 7279 - protein, 953 aa, Glycine max
  unsure (1)..(953): unsure at all Xaa locations
MVRNNSTFQPLLTHRSLPLEPCSTTTTSSVSATSYPPLFTRPYSSLSFLVSQRKGFTLTSLSPIRTNKKRRRASLRVSAVFERFTERAIKAIVLSQREAKALGSELVYTQHLLLGLIAEEDRSSDGFLASGVTVEKAREVVRSVWLRNGSARAGSGAARAGVDDDGSKASATQVPFSVNAKRVFEAAFEYSKSLGHKFVGPEHITVGLVKVDDGSVSRVLYRLGTNGSQLASVAFSRLQKEIAKDGREPNVISKGVPNKSISRKGSDAGASATREESALSQFCVDLTARASEGRIDPVVGREVEVQRIIQILCRKTKSNPILLGEAGVGKTAIAEGMALRIAKADVAPFLLTKRVMSLDIALLMAGAKERGELEERVTKLVKDIIKSGDVILFIDEVHILVQAGTIGRGNKGSGLDIANLLKPALGRGQFQCIASTTLDEYRLYFEKDTALARRFQPVWVDEPSEDDAIKILMGLREKYEAHHKCRYTAEAIKAAVDLSARYIVDRYLPDKAIDLIDEAGSRACIEAFKKKKEHETGILSKCPADYWQEIKDVKSMHEXXENKLKYYGASSIDDTNELILDSYLSSTTTDNEPIEVGPEDIAAVASLWSGIPVQKLTADQRILLLDLENQLRKRVIGQEEAVAAISRAVKRSRVGLKDPDRPIAAMLFCGPTGVGKTELAKSLAACYFGSXEAAMVRLDMSEYMERHTVSKLIGSPPGYVGYGEGGVLTEAIRRKPFTLLLLDEIEKAHPDIFNILLQILEDGQLTDSQGRRVSFKNALVVMTSNVGSSAIAKGRHNSIGFLIPDDXXTTSYNGLKSMVIEELRSYFRPELLNRIDEVVVFQPLEKSQLLQILDLLLQDMKKRVLSLGVHVKVSEAVKNLVCQQGYNPTYGARPLRRAITSLIEDPLSEAFLYGECKQGDTVLIDLDANGNPFVTNQLDQIVXTYLTDTRSCL

SEQ ID NO: 7280 - protein, 544 aa, Glycine max
  unsure (1)..(544): unsure at all Xaa locations
NSARGGLRERYELHHGVKISDSALVSAAVLADRYITERFLPDKAIDLVDEAAAKLKMEITSKPTELDEIDRAILKLEMEKLSLKNDTDKASKERLSKLENDLSLLKQKQKELTEQWDSEKVFMTRIRSIKEEIDRVNLEMEAAERDYDLNRAAELKYGTLMSLQRQLEEAEKNLSDFRNSGQSLLXRRGHYLDITEIVSKWTGIPLSNLQQTEREKLVLLEQVLHKRVVGQDTAVKSVADAIRRSRAGLSDPNRPIASFMFMGPTGVGKTELAKALAGYLFNTENALVRIDMSEYMEKHAVSRLVGAPPGYVGYEEGGQLTEVVRRRPYSVVLFDEIEKAHHDVFNILLQLLDDRRITDSQGRTVSFTNCVVIMTSNIGSHYILDTLRSTQDDKTAVYDQMKRQVVELARQTFHPEFMNRIDEYIVFQPLDSEQISKIVELQMERVKNRLKQKKIDLHYTEKAVKLLGVLGFDPNFGARPVKRVIQQLVENEIAMGVLRGDFKEEDSIIVDADVTLSGKERSPLNKLLIKKLDSPDADAMVVND

SEQ ID NO: 7281 - protein, 534 aa, Glycine max
ADKMKSFLVAEFMQCIGATTLDEYRKHIEKDPALERRFQPVKVPEPTVDETIQILKGLRERYEIHHKLRYTDDALVAAAQLSHQYISDRFLPDKAIDLIDEAGSRVRLQHAQLPEEARELDKEVRQIVKEKEEFVRNQDFEKAGELRDREMDLKAQISALIEKGKEMSKAESEARDEGPMVTEVDIQHIVSSWTGIPVEKVSTDESDRLLKMEETLHKRVIGQDEAVKAISRAIRRARVGLKNPNRPIASFIFSGPTGVEKSELAKALAAYYCGSEEAMIRLDMSEFMERHTVSKLIGSPPGYVGYTEGGQLTEAVRRRPYTVVLFDEIEKAHPDVFNMMLQILEDGRLTDSKGRTVDFKNTLLIMTSNVGSSVIEKGGRKIGFDLDYDEKDSSYNRIKSLVTEELKQYFRPEFLNRLDEMIVFRQLTKLEVKEIADIMLKEVFDRLKAKEIDLSVTERFRERVVDEGYNPSYGARPLRRAIMRLLEDSMAEKMLAREIKEGDSVIVDADSDGNVIVLNGSSGAPDSLEEALPV

SEQ ID NO: 7282 - protein, 695 aa, Glycine max
  unsure (1)..(695): unsure at all Xaa locations
MARVLAQSINVPGLLAEHRHGQQKESGKLKRSTKMMSALRTNGLRMSGFSGLRTFNPLDTMLRPGIDFHSKVSIATSSRRARATRCVPKAMFERFTEKAIKVIMLAQEEARRLGHNFVGTEQILLGLIGEGTGIAAKVLKSMGINLKDARVEVEKIIGRGSGFVAVEIPFTPRAKRVLELSLEEARQLGHNYIGSEHLLLGLLREGEGVAARVLENLGADPTNIRTQVIRMVGESADSVTATVGSGSSGNKMPTLEEYGTNLTKLAEEGKLDPVVGRQPQIERVTQILGRRTKNNPCLIGEPGVGKTAIAEGLAQRIANGDVPETIEGKKVITLDMGLLVAGTKYRGEFEERLKKLMEEIKQSDEIILFIDEVHTLIGAGAAEGAIDAANILKPALARGELQCIGATTLDEYRKHIEKDPALERRFQPVKVPEPTVDETIQILKGLRERYEIHHKLRYTDEALVAAAQLSYQYISDRFLPDKAIDLIDEAGSRVRLQHAQLPEEARELDKEVRQIIKEKEEAVRNQDFXKAGELRDREMDLKAQISTLVEKGKEMSKAETEAGDEGPIVTEADIQHIVSSWTGIPVEKVSTDESDRLLKMEETLHKRVIGQDEAVKAISRAIRRARVGLKNPNRPIASFIFSGPTGGKSELAKALAAYYFGSEXAMIRLDMSEXMERHTVTSIXLNLFTFTVIVE

SEQ ID NO: 7283 - protein, 630 aa, Glycine max
  unsure (1)..(630): unsure at all Xaa locations
MARVLAHSINGPGLLAEPRPGPPKGSGKLKRSPQMMSALPTNGLRMAGFSRLRTFNPLDTMLRPGIDFHSKVSIATSSRRARATRCVPKAMFERFTEKAIKVIMLAQEEARRLGHNFVGTEQILLGLIGEGTGIAAKVLKSMGINXLKDARVEVEKIIGRGSGFVAVEIPFTPRAKRVLELSLEEARQLGHNYIGSEHLLLGLLREGEGVAARVLENLGADPTNIRTQVIRMVGESADSVTATVGSGSSGNKMPTLEEYGTHXLTKLAEEGKLDPVVGRQPQIERVTQILGRRTKNNPCLIGEPGVGKTAIAEGLAQRIANGDVPETIEGKKVITLDMGLLVAGTKYRGEFEERLKKLMEEIKQSDEIILFIDEVHTLIGAGAAEGAIDAANILKPALARGELQCIGATTLDEYRKHIEKDPALERRFQPVKVPEPTVDETIQILKGLRERYEIHHKLRYTDEALVAAAQLSYQYISDRFLPDKAIDLIDEAGSRVRLQHAQLPEEARELDKEVRQIIKEKEEAVRNQDFEKAGELRDREMDLKAQISTLVEKGKEMSKAESEAGDASPVVTEADIQHIVSSWTGIPVEKVSTDESDRLLKMEETLHKRVIGQDEAVKAISRAIRRARVX

SEQ ID NO: 7284 - protein, 622 aa, Glycine max
  unsure (1)..(622): unsure at all Xaa locations
MARVLVQSTGMPGLLSGQRHGKHKGSGKSKRSVKMMSTLRMPALRMSSFSGLRTLNPMDSLSRPRHTFPLXXTTSRRERAKRCVPKAMFERFTEKAIKVIMLAQEEARRLGHNFVGTEQILLGLIGEGTGIAAKVLKSMGINLKDARVEVEKIIGRGSGFVAVEIPFTPRAKRVLEFSLEEARQLGHNYIGSEHLLLGLLREGEGVAARVLENLGADPNNIRAQVIRMVGEGADSVGATVGPGSSNNNKMPTLEEYGTNLTKLAEEGKLDPVVGRQQQIERVTQILGRRTKNNPCLIGEPGVGKTAIAEGLAQRIANGDVPETIEGKKVITLDMGLLVAGTKYRGEFEERLKKLMEEIKQSDEIILFIDEVHTLIGAGAAEGAIDAANILKPALARGELQCIGATTLDEYRKHIEKDPALERRFQPVKVPEPTVNETIQILKGLRERYEIHHKLHYTDDALVAAAQLSHQYISDRFLPDKAIDLIDEAGSRVRLQHAQLPEEARELDKEVRQIVKEKEESVRNQDFEKAGELRDKEMDLKAQISALIEKGKEMSKAESEAGDEGPMVTEVDIQHIVSSWTGIPVEKVSTDESDRLLKMEETLHKRVIGQDEAVKAISRAIRX

SEQ ID NO: 7285 - protein, 313 aa, Glycine max
  unsure (1)..(313): unsure at all Xaa locations
XKDLTAMAKAGKLDPVIGRDDEIRRCIQILSRRTKNNPVLIGEPGVGKTAISEGLAQRIVHGDVPQALMNRRLISLDMGALIAGAKYRGEFEDRLKAVLKEVTESDGQTILFIDEIHTVVGAGATNGAMDAGNLLKPMLGRGELRCIGATTLDEYRKYIEKDPALERRFQQVYVDQPTVEDTISILRGLRERYELHHGVRISDSALVEAAILSDRYISGRFLPDKAIDLVDEAAAKLKMEITSKPTALDEINRSVLKLEMERLSLMNDTDKASTDRLDRLEAELSLFKEKQAELTEQWEHEQAGMTRIQSIKX

SEQ ID NO: 7286 - protein, 317 aa, Glycine max
  unsure (1)..(317): unsure at all Xaa locations
XQGRPEHDVTHALKRAFQXDRMGPQTANGGIARCGXFGATGGGKPEMVKALAEYXFGSEEAMIRLDMSEFMERHTVSKLIGSPPGYVGYTEGGQLTEAVRRRPYTVVLFDEIEKAHPDVFNMMLQILEDGRLTDSKGRTVDFKNTLLIMTSNVGSSVIEKGGRKIGFDLDYDEKDSSYNRIKSLVTEELKQYFRPEFLNRLDEMIVFRQLTKLEVKEIADIMLKEVFDRLKVKDIELQVTERFRDRVVEEGYNPSYGARPLRRAIMRLLEDSMAEKMLAREIKEGDSVIVDVDSDGNVIVLNGSSGAPESLPETLPV

SEQ ID NO: 7287 - protein, 173 aa, Glycine max
PPGYVGHEEGGQLTEQVRRRPYSVILFDEVEKAHVAVFNTLLQVLDDGRLTDGQGRTVDFRNTVIIMTSNLGAEHLLAGMVGKNSMKVARDLVMQEVRRHFRPELLNRLDEIVIFDPLSHEQLRKVARLQMNDVAVRLAERSIALAVTDAALDMILSLSYDPVYGARPIMRWI

SEQ ID NO: 7288 - protein, 359 aa, Glycine max
  unsure (1)..(359): unsure at all Xaa locations
DPRVRRRTPTLTKSVFAAVTASRTSRSRSHSARRLFPAIPRASENSLSRSQIIDXXTNVASAKFLSRSFTRTFHATNPSLRSAASSQVAQTDFTDMAWEGIVGAVDAARVSKQQIVESEHLMKALLEQKDGLARRIFTKAGLDNTSVLQATEDFIAKQPKVTGDTSGPVVGSHFSSLLDNSRKYKKEMGDEYVSVEHLLLAFHSDKRFGQQLFKNLQLSEKALKDAVQAVRGSQRVTDQNPEGKYEALDKYGNDLTELARRGKLDPVIGRDDEIRRCIQILSRRTKNNPVIIGEPGVGKTAIAEGLAQRIVRGDVPEPLMNRKYRGDFEERLKAVLKEVTASNGQIILFIDEIHTVVGX

SEQ ID NO: 7289 - protein, 170 aa, Glycine max
LARGELRCIGATTLDEYREHVEKDKAFERRFQQVLVNEPSVPDTVSILRGVKERYEAHHGVQIMDSALVAAAKLADRYIKGRFMPDKAIDIIDEACANVRVQLDSQPEAIDELERRQLQLQVEATALAKEKDELSKQRLQKVQEELNKIQDELSPLVLRHEAEKARVNEI

SEQ ID NO: 7290 - protein, 230 aa, Glycine max
  unsure (1)..(230): unsure at all Xaa locations
XXIGRRTPYAVILFDDIDKAHADAFNVFLHILDDGRVTDSQSRTVCFTNTRFIMTSDVGSHDIWSTDDDTTPKELAHESIKHRVMDAARSIFRPEYMNRDDEYIVFPPVRREQISSIVRLQLERVQKRIADRKMKIQVTDAAVQLLGSLGYDPNYGARPVKRVIQQNVENELAKGILRGEFKEEDAILIDTELTAFTNGQLPQQKLVFKKLAADSESTPQGTLEPFPQAP

SEQ ID NO: 7291 - protein, 171 aa, Glycine max
  unsure (1)..(171): unsure at all Xaa locations
DEVHTLIGAGAAEGAIDAANILKPALARGELQCIGATTLDEYRKHIEKDPALERRFQPVKVPEPTVDETIQILKGLRERYEIHHKLRYTDDALVAAAQLSHQYIXGSRVRLQHAQLPEEARELDKEVRQIVKEKEEFVRNQDFEKAGELRDREMDLKAQISALIEKGKEMS

SEQ ID NO: 7292 - protein, 147 aa, Glycine max
  unsure (1)..(147): unsure at all Xaa locations
XYTEGGQLTEAVRRRPYTVVLFDEIEKAHPDVFNMMLQILEDGRLTDSKGRTVDFKNTLLIMTSNVGSSVIEKGGRKIGFDLDYDEKDSSYNRIKSLVTEELKQYFRPEFLNRLDEMIVFRQLTKLEVKEIADIMLKEVFERLKVKR

SEQ ID NO: 7293 - protein, 227 aa, Glycine max
  unsure (1)..(227): unsure at all Xaa locations
XARVLXNLAADPNNNRAQVIRMVGEGADSVGATVGPGSSNNNKMPTLEEYGANLTKLAEEGKLDPVMGRQPQIERVTQILGRRTKNNPCLIGEPGVGKTAIAEGLAQRIANGDVPETIEGKKVITLDMGLLVAGTKYRGEQGKRREETGEEKQSSLEEIFKHRAEAQQKAMSSIEGAKERYERAKPSKASKERNIQANKRAEEERRKAESGRELERRTREVEGREWN

SEQ ID NO: 7294 - protein, 80 aa, Glycine max
IILFIDEIHTVVGAGATSGAMDAGNLLKPMLGRGELRCIGATTLNEYRKYIEKDPALERRFQQVFCSQPSVEDTISILRG

SEQ ID NO: 7295 - protein, 179 aa, Glycine max
  unsure (1)..(179): unsure at all Xaa locations
XLXXLERRELQLDVEATALEQEKDEASKVRLQLVREELTKLREQLKPLRMQHDAEKGRVDELRSLKNKIESLRTKAALAERDKNLALAADLKYGAIPELEKKIAQMEAALEEKNKLLSEVVGPEKIAEIVARWTGIPVSKLTQTEKERLLKLSDQLHRRVVGQSEAVDAVAEAVLRSRX

SEQ ID NO: 7296 - protein, 157 aa, Glycine max
  unsure (1)..(157): unsure at all Xaa locations
XRWSGATALEXYRGYVHKDLALKRRFQQVYVPDPSVASPLSTLGGLTERYXGRHGVRTLLRALVVAGQLYSRYISGRHLPGKAVGLVHKACAHVRVLLNSHPEAIDSLERKSRQLEVELHALEKEKGTASKACLVXEVRKEPNXLRVKLQPLDXEVH

SEQ ID NO: 7297 - protein, 205 aa, Glycine max
  unsure (1)..(205): unsure at all Xaa locations
XKGRTVDFTNTVIIMTSNIGAEHLLKGIDQKTGRHGPRRQXDKVMVEVKKHFRPEFLNRLDDIVVFAPLSSSELGNIVRLQLVKLSDRLKDRDVSVKLTDAAAQFILSQAYDPYYGARPLRRYLEKHIVTQLSRMLISGELQNNALVTIDVAAAGAGAAAXQRADVQGAAAGAQVAPRLGRVVGFRGRRRHGHDAGQDYQRRQAX

SEQ ID NO: 7298 - protein, 222 aa, Glycine max
  unsure (1)..(222): unsure at all Xaa locations
XRSVLFSATLAGYLQCIEATTMDEYRKHIEKDPALERRFQPDETIQIXTFCSLFCSFYLFYSFMLEIRQVSFFLLIFMLLEILQISDRFLPDKAIDLIDEAGSRVRLQHAQLPEEARELDKEVRQIVKEKEEFVRNQDFEKAGELRDREMDLKAQISALIEKGKEMSKAESEAGDEGPMVTEVDIQHIVSSWTGIPVEKVSTDESDRLLKMEETLHKRVIGQ

SEQ ID NO: 7299 - protein, 79 aa, Glycine max
  unsure (1)..(79): unsure at all Xaa locations
CIGATTLDEYRKHIEKDPALERRFQPVKVPEPTVDETIQILKGLRERYEIHHKLRYTDEALVAAAQLSYQYISDRFLPX

SEQ ID NO: 7300 - protein, 163 aa, Glycine max
  unsure (1)..(163): unsure at all Xaa locations
XTEKDRCLSANLLPYVEGIILLDMCGDMDGHSGLQLIDTPTGYSASYVGGXLLEAVRRHTYTVXRICDIDNAHPAVFNMKLQILEEGRLSDSLRXSEDFTNTLLIMTSNAGGRVHEKRGRIIXFDLDYDEKDSMLYRIMSXVTDELKPHCMPESLNRENDMIV

SEQ ID NO: 7301 - protein, 147 aa, Glycine max
  unsure (1)..(147): unsure at all Xaa locations
XLEPEEARELDKEVRQIVKEKEESVRNQDFEKAGELRDKEMDLKAQISALIEKGKEMSKAEXEAGDEGPMVTEVDIQHIVSSWTGIPVEKVSTDESDRLLKMEETLHKRVIGQDEAVKAISRAIRRARVGLKNPNRAVGRWIFAGPA

SEQ ID NO: 7302 - protein, 92 aa, Glycine max
  unsure (1)..(92): unsure at all Xaa locations
XKDARXRKTGIRLXRERHTVFKLIGSPSGCVFYTEGGQLTNTILRXSYTDVLLDEIEKAHPDVFNMIAXILXDGRLTDSMVRTFYFKNTLLI

SEQ ID NO: 7303 - protein, 187 aa, Glycine max
  unsure (1)..(187): unsure at all Xaa locations
MNPDKFTHKTNEALVSAHEIATSNGHAQFTPLHLASSLISDKDGIFSQALSNAAGEESARAAERVINNALKKLPSQSPLPDEVPASNALVKAIRRAQTLQKKRGDTHLAVDQLILGLLEDSQIAELLNEAGVAASKVKSEVERLRGREGKEVESATGXDSTFQALKTYGRDLVEQAGXLDPCIGRDE

SEQ ID NO: 7304 - protein, 92 aa, Glycine max
  unsure (1)..(92): unsure at all Xaa locations
LNCRKEKPKMSLLNEERXNRTLWLLHIAATDESDRLLKMEETLHKRVIGQDEAVKAISRAIRRARVGLKNPNRPIASFIFSGPTGVGKSELX

SEQ ID NO: 7305 - protein, 126 aa, Glycine max
  unsure (1)..(126): unsure at all Xaa locations
XHASEFLNRLDEMIVFRQLTKLEVKEIADIMLKEVFDRLKVKDIELQVTERFRDRVVEEGYNPSYGARPLRRAIMRLLEDSMAEKMLAREIKEGDSVIVDVDSDGNVIVLNGSSGAPESLPETLPV

SEQ ID NO: 7306 - protein, 71 aa, Glycine max
  unsure (1)..(71): unsure at all Xaa locations
XISRAMRRASVGLKNPNRPIASLMFPGPTGVANSELAKALAVYYFGSEEAMIRVDMSEFMKRHTGSTLTGS

SEQ ID NO: 7307 - protein, 124 aa, Glycine max
  unsure (1)..(124): unsure at all Xaa locations
XCFRREQISSIVRLQLERVQKRIADRKMKIQVTDAAVQLLGSLGYDPNYGARPVKRVIQQNVENELAKGILRGEFKEEDAIIIDTELTAFTNGQLPQQKLVFKKLAADSESTPQDTLEPFPQAP

SEQ ID NO: 7308 - protein, 114 aa, Glycine max
  unsure (1)..(114): unsure at all Xaa locations
XTIRPELLNRLDDIVVFETLGRKELRQIVLLQFDSVINRLKKAQISVNVTTAALDVILDESYEPQYGARPIKRYIEKHVVTDLSKLIISGQLHAKTQVEITEVNGKLTFVHFLK

SEQ ID NO: 7309 - protein, 120 aa, Glycine max
  unsure (1)..(120): unsure at all Xaa locations
XYTEGGQLTEAVLRLPYTVVXFDEMDKARPVVFNMMLQILEEGRLTHTLGTTVDYKTTLRIPTSIAESRVIERGGLTIGFDLVSDANANMYDRLPSLPTDELYQYSLPESXNGKVEMNAX

SEQ ID NO: 7310 - protein, 106 aa, Glycine max
  unsure (1)..(106): unsure at all Xaa locations
XGELSEIERVTQILXRQTKNNPCLIGEPGVGKTAIAEGLAQQTGYGEEPVTMEGXKVYAFNIHLIDAGLKVFCRYRXRMVVSGLKSSLATLKXLMEFVPLDAFFKX

SEQ ID NO: 7311 - protein, 151 aa, Glycine max
  unsure (1)..(151): unsure at all Xaa locations
XXTKGATTLKKNKKFMVLYPALQNLXQSQKGAAPTNNKTIQILKGLTKHSXIHHKLRYTXYALLAAAHLSHQYIRNRFYSQQAIYXIDKSGSXIRLQHAQLPEEARELYKXFMQIVKDKEXFVLNQYYEKAGXLIDTXIYLNAQISALIQX

SEQ ID NO: 7312 - protein, 98 aa, Glycine max
  unsure (1)..(98): unsure at all Xaa locations
XREXELKAQITAIIDXSKEXXKAETESGDVGPLVTEADIQHIVSSWTGIPVXXKXSSDESDRLLKMEETLHTRIIGQDEAVKAISRAIRRARVGLKNX

SEQ ID NO: 7313 - protein, 441 aa, Glycine max
  unsure (1)..(441): unsure at all Xaa locations
EKELHVSDVLDHRSSSSPTRVTTDLGLGTLYTSTAQDPDTPKLQDQRKHXXQRLSDSVSTDCDDFKSLDRLLNEKVGWQDQAICAISQTLSLCKSGAGKRRGSNGXXADIWLAFLGPDRLGKRKIASVLAETIFGNPESLISVDLGFQDSFYDVLRRKTILDYIAGELSKKPHSVVFLENVDKADVLVQNSLLQALRTGKFSYSHGRVISINNTIFLTTSTLYHLHDSLLLXDCKIFSDERMLEAKRCQMQLLIGQSSSLNKRKPDISDSKEGATSKMQKQDSEASRSFLDLNMPVEDGEEGVNDNDHESESMSENTDAWLSDFFDQIDEKVVFKPFNFNELAEQVLKRIGMLFQRTFGSELQLEIDHEVIAYILAAAWLSDKKNAVEDWIEHVLGKGFVEAQQKYHPAAQYVVKLVNCESIFVEEQAPDVXXLPARINMD

SEQ ID NO: 7314 - protein, 853 aa, Oryza sativa
  unsure (1)..(853): unsure at all Xaa locations
MEGSLVQSAIAPTIYRRSGTARFRVRARATMMRTMPTRTLTLGGFQGLRQTNFLDSRSVIKRDFGSIVASQISRPRGLGSRGVVRAMFERFTEKAIKVIMLAQEEARRLGHNFVGTEQILLGLIGEGTGIAAKVLKSMGINLKDARVEVEKIIGRGSGFVAVEIPFTPRAKRVLELSLEEARQLGHNYIGSEHLLLGLLREGEGVAARVLESLGADPNNIRTQVIRMVGESTEAVGAGVGGGSSGQKMPTLEEYGTNLTKLAEEGKLDPVVGRQDQIERVTQILGRRTKNNPCLIGEPGVGKTAIAEGLAQRISNGDVPETIEGKKVITLDMGLLVAGTKYRGEFEERLKKLMEEIKQNDDIILFIDEVHTLIGAGAAEGAIDAANILKPALARGELQCIGATTLDEYRKHIEKDPALERRDRFLPDKAIDLIDEAGSRVRLRHAQLPDEAKELDKELRQAGELRDREMELKAQITAIIDKSKEMVKAETESGEVGPLVTEADIQHIVSSWTGIPVEKVSSDESDRLLKMEETLHTRIIGQDEAVKAISRAIRRARVGLKNPNRPIASFIFSGPTGVGKSELAKALAAYYFGSEEAMIRLDMSEFMERHTVSKLIGSPPGYVGYTEGGQLTEAVRRRPYTVVLFDEIEKAHPDVFNMMLQILEDGRLTDSKGRTVDFKNTLLIMTSNVGSSVIEKGGRKIGFDLDYDEKDTSYNRIKSLVTEELKQYFRPEFLNRLDEMIVFRQLTKLEVKEIADIMLKEVFDRLKAKDIDLQVTEKFRDRVVDEGYNPSYGARPLRRAIMRLLEDSLAEKMLAGEVKEGDSAIVDVDSEGKVIVLNGGSGVPEPLAPALSVX

SEQ ID NO: 7315 - protein, 787 aa, Oryza sativa
  unsure (1)..(787): unsure at all Xaa locations
MERTLLNPPPRRGARVVARMGFDMFTDKAIKAIMMAQEEARRLGHHAAGSEQLLLGVIGEGTGIGAKVLRGAGLSLKAARAEVEKMAGRGPGMVPMEIKFTPAAKNVLQASQEEAHQLGHNYVGSEHLLLGLLREHGAALVVLKNFQADPSNIRSEGKLDPVVGRQNQVDRVVQILGRRTKNNPCLIGEPGVGKTAIAEGLAQRIAAGNVPETIDGKTVITLDMGLLVAGTKYRGEFEERLKKLMDEVKQNGEIILFLDEVHTLVGAGAAEGAIDAANILKPALARGELQPVKVPEPTVDETIGILKGLRERYEIHHKVQYTDESLIAAARLSYQYISDRFLPDKAIDLVDEAGSLVRLRNAQLPDEAKELEKKLKKIMAEKSEAIRSQDFEKAGALRGEEVELKSEIMSLVDKSKEMSKAAVDSGESPGPTVTEADVQHIVSSWTGVPVEKVTVDESSRLLAMESSLHRRIVGQDEAVTAISRAIRRARVGLRDPRRPIASFIFAGPTGVGKSELAKALAAYYYGSPEAMVRLDMSEFMEKHTVAKLVGSPPGYVGYAEGGQLTEAIRRRPYAVVLFDKVEKAHPDVFNMMLQILDDGRLTDSKGRTVDFKNSLIIMTSNVGSGVIEKGGRQLGFAGDGSGDGGYGVIKNMVEEEMKRYFRPEFLNRLDEMIVFRQLTKLEVKEIAGIMLAEVTGRIGGKGIGLQVTERFKELVVEQGFDPSYGARPLRRAIMRLLEDTLTDKMLAGEICAGDSVIVDADGDGNVVVVGRRSAGLPDLKSPAFTVX

SEQ ID NO: 7316 - protein, 864 aa, Oryza sativa
  unsure (1)..(864): unsure at all Xaa locations
XSARGRAVKAVVLSQREAKGLGEGAVAPRHLLLGLIAEDRSAGGFLSSGCIPGRPRVDEGGIXRQDLTPGAPSPSGSGLEMDIPFSGSCKRVFEVAVEFSRNMGCSFISPEHLALALFTLDDPTTNSLLRSLGADPSQLASVALTRLQAELAKDGREPAGASSFKVPKKSPAGGSAFSKSLNSKKEKGALDQFCLDLTTQASGGFIDPIIGREEEIERVVQIICRRTKNNPILLGEAGVGKTAIAEGLALRIAHGDVPSRLDAKRIMSLDVGLLIAGAKERGELESRVTSLIREVREAGDVILFIDEVHNLIGSGTVGKGKGAGLDIGNLLKPPLARGELQCIAATTLDEHRMHFEKDKALARRFQPVLVEEPSQDDAVKILLGLREKYETYHKCKFTLEAINAAVYLSARYIPDRQLPDKAIDLIDEAGSRARMESFNRKKEGQSSILLKSPDEYWQEIRAAQNMHEVVSSNQMKYSPRQENGSAAIKAPSEDMNELTSELQVEEPIVVGTEEIARVASLWSGIPVQQLTADDRKLLVGLDGELRKRVIGQDDAVMAISRAVKRSRVGLNDPDRPIATLLFCGPTGVGKTELTKALAASYFGSESAMLRLDMSEYMERHTVSKLIGSPPGYIGYGETGTLTEAVRRKPFTVVLLDEIEKAHPDIFNILLQIFEDGHLSDSQGRRVSFKNTLIVMTSNIGSTSISKGRRSMGFXXTEDTESSSYVAMKSLVMEELKAFFRPELLNRIDEMVVFRPLEKTQMLAILDIILQEVKGRLLALGIGLEVSDAMKDLICEEGYDKSYGARPLRRAVTHLIEDVISEAILFGEYKPGDTILMDIDAAGKPCXXSHLNEKVVQLSDPTRTF

SEQ ID NO: 7317 - protein, 491 aa, Oryza sativa
  unsure (1)..(491): unsure at all Xaa locations
PTRPPTRTQTRERTLLHLLLSRXSATNDTDKASRDRLSRIEAELSLLKEKQKDLTEQWEREKSVMTKIQSIKEEIDRVNVEIQQAEREYDLNRAAELKYGSLNALQRQLQTTEKELDEYQSSGKSMLREEVTQDDIAEIVSRWTGIPVSKLKQSDREKLLYLEEELHKRVVGQDPAVKAVSEAIQRSRAGLSDPNRPIASFMFMGPTGVGKTELAKALAAFMFNTEEAVVRIDMSEYMEKHSVSRLIGAPPGYVGYEEGGQLTEAVRRRPYSIILFDEIEKAHGDVFNVFLQILDDGRVTDSQGRKVSFTNSIIIMTPIVGSQLIPXTSQGGSTDSAYENIKKRVMDAARSVFXRPEFMNRIDEYIVFKPLEREQINSIVKLQLARVQKRIADRKIKLEVSPGAVEFLGSLGYDPNYGARPVKRVIQQYVENELAKGILRGDFKDEDSILVDTQVTVPSNGQLPQQKLVFHKMSEESAPAAAEDEKFLPAV

SEQ ID NO: 7318 - protein, 549 aa, Oryza sativa
  unsure (1)..(549): unsure at all Xaa locations
RGRVRCLGATTHDEYHRYMVRDAAFERRFQKVHVAEPSVDDTVAILRRLKPSYQDHHXVDIQDAALVAAAKLSGRYIPGERPLRRAXITNQLCSRCVLLSEALPGQGDRPGRRGVXXTARLLMDRRKKKQAQAAVAPXGRKRRPRPHRTGTTHAGARHRIDVARRRDTXPRLMRMRTCKWTGIPVASLGEDERKKLLELPQLLHRRVIGQDEAVGAVAEAVVRSRSGLGNPNQPSGSFLFLGPTGVSKTELAKALAEQLFGNAKLLVRIDMSEYVNASSVTRLIGSAPGYVGYDKGGQLTELVRCRPYSVVLFDEVEKADAAVFNVFLQILDDGRLTDGQGRTVDFTNTIIIMTSNLGAQHLADAAAADATAAAAKQRVLADVQRHFRPELISRLTEMVVFRPLSGEQLRKVARLQLRGMAARLAEKGIGLDVANAALDVVLARSSDQVRAYGARPIKRCLEKDVMTRISKMVVQEEADDDCYVTVEADQGKEELVFTVDKQADAEENDAAAAXVFVVGGGEEEEAEAAGEVSRXVIDDDEXXIQSXSY

SEQ ID NO: 7319 - protein, 636 aa, Oryza sativa
  unsure (1)..(636): unsure at all Xaa locations
MAEASYHKSKGGQDIFRISGGSSAAAAAATAXXAAKGTLDAFGRDLTAEAANADPVVGREEEIDRVVCILSRKSKNSAVLVGAAGVGKTAIAEGLAQRIARGEVSGVLEGARVVELNVAAMISGTSYRGTFEERMTGVIAEAEAEADAAAGKVVLFVDEIHMLLGAGRYHRYMVRDAAFERRFQKVHVAEPSVDDTVAILRRLKPSYQDHXRVDIQDAALVAAAKLSGRYIXXAIDLVDEACATARLLMDRRKKKQAQAAVAPKDENVGPDHIAQWTGIPVASLGEDERKKLLELPQLLHRRVIGQDEAVGAVAEAVVRSRSGLGNPNQPSGSFLFLGPTGVSKTELAKALAEQLFGNAKLLVRIDMSEYVNASSVTRLIGSAPGTNGYDKGGQLTELVRCRPYSVVLFDEVEKADAAVFNVFLQILDDGRLTDGQGRTVDFTNTIIIMTSNLGAQHLADAAAADASHKDDATEAAAAEQRVLADVQRHFRPELISRLTEMVVFRPLSGEQLRKVARLQLRGMAARLAEKGIGLDVANAALDVVLARSSDQVRAYGARPIKRCLEKDVMTRISKMVVQEEADDDCYVTVEADQGKEELXVHRRQAGKKRTTRRRRRLRRRRRGRRGSGGRRRGISS

SEQ ID NO: 7320 - protein, 417 aa, Oryza sativa
  unsure (1)..(417): unsure at all Xaa locations
XPGLQEFGTRVNEAIVGPDHVAQVVSRWSGIPVTTLDQEEKEKLIHLADRLHERVVGQDEAVKLVAQAVLRSRAGLEQPGQPIGSFLFLGSTGVGKTELAKALAEQLFDSEKMLIRFDMSEFVGSGSVLRLIGAPPSYHGHQDGGQLTEKVRTLPYSVILFDEVEKADPSVFNVFLQLLDDGMLTDGKGRTVDFKNTIIIMTSNLGAEHLTEGVTGERTMEAARDLVMKQVQKYFRPELLNRLSEIVIFEPLSHDNLKEVVKIQMKSVVTSVAHKGVSLLASDDALDVILSESYNPMYGARPVRRWVQKNVMTKLSEMLITGDAGQGSTISIDATDDKKGLNFQVLKEEVVVPPKGQSRSFKATRIAMTMCSRSPPYQRGRKVIISIXEQPAKXLGCPFWVIHIILVNCNMVVSPLA

SEQ ID NO: 7321 - protein, 602 aa, Oryza sativa
  unsure (1)..(602): unsure at all Xaa locations
XLNRRGGVATWDLAGXSKRGAAAFTNLAAPPTLDAFGRDLTAEAANADPVVGREEEIDRVVCILSRKSKNSAVLVGAAGVGKTAIAEGLAQRIARGEVSGVLEGARVVELNVAAMISGTSYRGTFEERMTGVIAEXGGGGRRGRREXXVLGRVRCLGATTHDEYHRYMVRDAAFERRFQKDAALVAAAKLSGRYIPARHFPDKAIDLVDEACATARLLMDRRKKKQAQAAVAPKDENVGPDHIAQVRRTPARATAXDVARRRDTXXALLHRRVIGQDEAVGAVAEAVVRSRSGLGNPNQPSGSFLFLGPTGVSKTELAKALAEQLFGNAKLLVRIDMSEYVNASSVTRLIGSAPGTNGYDKGGQLTELVRCRPYSVVLFDEVEKADAAVFNVFLQILDDGRLTDGQGRTVDFTNTIIIMTSNLGAQHLADAAAADASHKDDATEAAAAEQRVLADVQRHFRPELISRLTEMVVFRPLSGEQLRKVARLQLRGMAARLAEKGIGLDVANAALDVVLARSSDQVRAYGARPIKRCLEKDVMTRISKMVVQEEADDDCYVTVEADQGKEELXVHRRQAGKKRTTRRRRRLRRRRRGRRGSGGRRR

SEQ ID NO: 7322 - protein, 270 aa, Oryza sativa
MEITSKPIELDEVDREIIRLEMEKLSLKNDTDKASKQRLSKLEADLESLKQKQKNLSEHWEYEKSLMTRIRSIKEETDRVNLGTGAAEREYDLNRAAELKYGTLLSLQKQLEEAENKLMEFQQSGKSMLREEVTDVDIAEIVSKWTGIPVSNLQQSEKEKLLLLEDVLHKRVIGQDIAVKSVANAIRRSRAGLSDPNRPIASLMFMGPTGVGKTELGKTLAEFLFNTENALIRIDMSEYMEKHAVSRLVGAPPGYIGYGEGGQLTEAVRR

SEQ ID NO: 7323 - protein, 309 aa, Oryza sativa
  unsure (1)..(309): unsure at all Xaa locations
ESALALFCLDLTMRASGGLIDPVIGRKXDEIERVVQIICRRTKNNPILLGEAGVGKTAIAEGLAHKIANGDVPIFLVGKRILSLDVALLMAGAKERGELEARVTSLIREVRKAGDVILFIDEVHTLIGSGIAGRGSKGAGLDIANLLKPALARGELQCIASTTLDEHRLHFDKDKALARRFQPVLVNEPSQEDAVKILLGLREKYETYHKCKYTLESINAAVYLSARYIADRHLPDKAIDLIDEAGSRARMESFKRKKEEQCSILSKSPDEYWQEIRAVQNMHEVVIEDXQYSICCCKDFFFVDMLIDF

SEQ ID NO: 7324 - protein, 257 aa, Oryza sativa
  unsure (1)..(257): unsure at all Xaa locations
VRLDMSEYMERHAVSKLIGSPPGYMGFGEGGTLTEAVRRKPFTVVLLDEIEKAHPDIFNILLQIFEDGHLTDSQGRRVSFKNTLIVMTSNVGSTSISNGKRSIGFQTQTDTEEKSYAAMKSLVMEELKAFFRPELLNRIDGVVVFHPXLRKLXMLAILNIMLQEVKGRILALGIGLEVSDSMKDLISQHGYDKSYGARPLRRAVTQLVEDVISEAILSGQFKPGDTIMVDTDATGKPCLXXRLNDQTVQLSDPTPTL

SEQ ID NO: 7325 - protein, 330 aa, Oryza sativa
  unsure (1)..(330): unsure at all Xaa locations
MSRATAVSRLARAARAAAAARRHHAGGRDPLRALASLAGDASASAGAEAVPPHAGGEITPGEFTEMAWEGVVGAVDAARMSKQQVVEAEHLMKALLEQKDGLARRIFSKAGIDNTSVLQATDEFISRQPKVVGDTSGPIIGSSFVSILDNARKHKKEYADEFVSVEHILRAFTEDKRFGQQLFRDLKIGENELKEAISAVRGSQRVTDQNPEGKYQALEKYGIDMTELARRGKLDPVIGRDDEVRRCIQILCRRTKNNPVIIGEPGVGKTAIAEGLAQRIVRGDVPEPLQNRKLISLDMGALLAGAKFQGQFEERLKAVLKEITASNGQX

SEQ ID NO: 7326 - protein, 181 aa, Oryza sativa
  unsure (1)..(181): unsure at all Xaa locations
GSPPGYVGYAEGGQLTEAIRGRPYAVVLFDEVEKAHPDVFNMMLQILDDGRLTDSKGRTVDFKNSLIIMTSNVGSGVIEKGGRQLGFAGDGSXXDGGYGVIKNMVEEEMKRYFRPEFLNRLDEMIVFRQLTKLEVKEIAGIMLAEVTGRIGGKGIGLQVTERFKELVVEQAFDPSYGARQT

SEQ ID NO: 7327 - protein, 274 aa, Oryza sativa
MSRATAVSRLARAARAAAAARRHHAGGRDPLRALASSQITPGEFTEMAWEGVVGAVDAARMSKQQVVEAEHLMKALLEQKDGLARRIFSKAGIDNTSVLQATDEFISRQPKVVGDTSGPIIGSSFVSILDNARKHKKEYADEFVSVEHILRAFTEDKRFGQQLFRDLKIGENELKEAISASLRGDSANGNDPEGKYQALEKYGIDMTELARRGKLDPVIGRDDEVRRCIQILCRRTKNNPVIIGEPGVGKTAIAEGLAQRIVRGDVPEPLQNRK

SEQ ID NO: 7328 - protein, 199 aa, Oryza sativa
  unsure (1)..(199): unsure at all Xaa locations
XVGKTAIAEGLAHKIANGDVPIFLVGKRILSLDVALLMAGAKERGELEARVTSLIREVRKAGDVILFIDEVHTLIGSGIAGRGSKGAGLDIANLLKPALARGELQEDAVKILLGLREKYETYHKCKYTLESINAAVYLSARYIADRHLPDKAIDLIDEAGSRARMESFKRKKEEQCSILSKSPDEYWQEIRAVQNMHEV

SEQ ID NO: 7329 - protein, 195 aa, Oryza sativa
LQLLDDGRITDSQGRTVSFTNCVIIMTSNIGSPLILDTLRNTSDSKEAVYEIMKKQVIDMARQSFRPEFLNRIDEYIVFQPLDTTEINRIVEIQLNRVKNRLRQQKIHLQYTPEAVEHLGSLGFDPNYGARPVKRVIQQMVENEIALSVLKGDFKEDDTVLVDVSSVAIAKGLAPQKKLVLQRLENANLELVAND

SEQ ID NO: 7330 - protein, 256 aa, Oryza sativa
  unsure (1)..(256): unsure at all Xaa locations
XLQSQSPISRRRRXRPRTLSVXCAASNGRITQQEFTEMAWQSIVSSPEVAKESKHQIVETEHLMXSLLXEQRNGLARRIFSKVGVDNTRLLDATEKFIQRQPKVXWGEDPGSMLGRDLEALIQRARDFKKEYGDSFVSVEHLVLGFAEDKRFGRQLFKDFQITVQSLKTAIESIRGKQNVIDQDPEGKYEALDKYGKDLTAMARQGKLDPVIGRDDEIRRCIQILSRRTKXNPVLIGEPGXGKTAIAEGLSQRIXX

SEQ ID NO: 7331 - protein, 89 aa, Oryza sativa
  unsure (1)..(89): unsure at all Xaa locations
XGXGFQQVYVDQPSVEDTISILRGLRERYELHHGVRISDSALVAAALLSDRYISGRFLPDKAIDLVDESAAQLKMEITSKPTALDEIDR

SEQ ID NO: 7332 - protein, 175 aa, Oryza sativa
  unsure (1)..(175): unsure at all Xaa locations
XACRSTLRXMTSXIGSKVIEKGGGGLGFDFADDQAESQYNRIRSLVNEELKNYFRPEFLNRLDEIIVFRQLNKGEVQEISEILLRDVFARLVEKEISLQVTDKFKERIVEEGFNPAYGARPLRRAIMRLLEDVLAEEILSGRLKEGSQALVDIGEDNQVVVIPGETRELIAPGVE

SEQ ID NO: 7333 - protein, 132 aa, Oryza sativa
  unsure (1)..(132): unsure at all Xaa locations
EELKAFFRPELLNRIDEVVVFHPLEKTQMLAILNIMLQEVKGRILALGIGLEVSDSMKDLISQHGYDKSYGARPLRRAVTQLVEDVISEAILSGQFKPGDTIMVDTDATGKPCLXXRLNDQTVQLSDPTPTL

SEQ ID NO: 7334 - protein, 110 aa, Oryza sativa
  unsure (1)..(110): unsure at all Xaa locations
XKAISRAIRRALVGLNIPNRPIASYIYHGPSGACYIRVRKXALADYSFGSXWARIGLQMSVFIGRLTXSTLLGSPSGYVVYTEGXALLTYAFRRQPYIVVFXKGIEKAHX

SEQ ID NO: 7335 - protein, 83 aa, Oryza sativa
  unsure (1)..(83): unsure at all Xaa locations
XQHGRLTDGQGRXTVDFRNTVIIMTSNXGAEHLLAGMVGKNSMKVARDLVMQEVRRHFRPEXLNRLDEIVXIFDPCPRDSGSR

SEQ ID NO: 7336 - protein, 85 aa, Triticum aestivum
  unsure (1)..(85): unsure at all Xaa locations
XPRVREDAVKILLGLREKYGAYHKCKFTLEAINAAVYLSARYIPDRQLSDKAIDLIDESCSRARIESFQMKKEDSFSFFLKEPDE

SEQ ID NO: 7337 - protein, 331 aa, Zea mays
  unsure (1)..(331): unsure at all Xaa locations
XQQQGVTRLDVMNFISHGDREDERRPAKSADSNAESEDANAQKETPVAQFTQNLNQMAKDGRIDPLIGREPEVERVVQVLCRRRKNNPLLVGEAGVGKTAIAEGLAYRITRGEVPDILANAQVYSLDMGALLAGTKYRGDFEQRLKTVLKELKERPHAILFIDEIHTLXXRGAASGGTLDASNLLKPALSSGTLKCIGATTFTEYRGIFEKDAALSRRFQKVDVTEPTVEQTVAILRGLKSRFEEHHGVKYSSGALSAAAELSARFITDRHLPDKAIDGIDEAGAAQRILPKSKQKKTIGKSEIEEIISKIARVPAQSVSQDDRSKLQACX

SEQ ID NO: 7338 - protein, 269 aa, Zea mays
  unsure (1)..(269): unsure at all Xaa locations
XKALAAYYFGSEEAMIRLDMSEFMERHTVSKLIGSPPGYVGYTEGGQLTEAVRRRPYTVVLFDEIEKAHPDVFNMMLQILEDGRLTDSKGRTVDFKNTLLIMTSNVGSSVIEKGGRKIGFDLDYDEKDTSYNRIKSLTEELKQYFRPEFLNRLDEMIVFRQLTKLEVKEIADIMLKEVFDRLKAKEINLQVTEKFRDRVVDEGYNPSYGARPLRRAIMRLLEDSLAEKMLAGEVKEGDSAIVDVDSDGKVIVLNGGSGVAEPLEPALST

SEQ ID NO: 7339 - protein, 230 aa, Zea mays
  unsure (1)..(230): unsure at all Xaa locations
XGTPGVGKTELTKALAASYFGSESAMIRLDMSEYMERHAVSKLIGSPPGYMGFGEGGTLTEAVRRTPFTVVLLDEIEKAHPDIFNILLQVFEDGHLTDSQGRRVSFKNTLIVMTSNVGSTSISSGRSIGFSTQRDTEETTYAAMKSLVMEELKAFFRPELLNRLDEVVVFHPLEKTQMMAILNLILQEVKSRLLALGIGLEVSESMKILISQQGYDRSYGARPLRRAVTQ

SEQ ID NO: 7340 - protein, 184 aa, Zea mays
  unsure (1)..(184): unsure at all Xaa locations
LFKDFQITVKTLKSAIESIRGKQNVIDQDPEGKYEALEKYGKDLTAVARQGKLDPVIGRDDEIRRCIQILSRRTKNNPVLIGEPGVGKTAIAEGLAQRIVQGDVPQALTNRRLIALDMGALIAGAKYRGEFVDRLKGVHTEVTDSDGQTVLFIDEIHTVXEAQSTNGAMDAGNLLKPMLWRGEL

SEQ ID NO: 7341 - protein, 250 aa, Zea mays
  unsure (1)..(250): unsure at all Xaa locations
MGFLAFWSVSPVRSAAGQQTLVTWTGLLVAGTKYRGEFEVRLKKLMEEIKQNEDIILFIDXVHTLIGAGAAEGVIDAANILKPAFCNFPKICIGATTLDEYRKHIEKDPALERRFQPVKVPEPTMDETIQILRGLRERYELHHKLRYTDDALIAAAQLSYQYISDRFLPDKAIDLIDEAGSRVRLRHAQLPDEAKELDKELRQISKQKNEAVRGQDFEKMANDEDIHYFVYDNKTDMFKKKKKKKKKKKK

SEQ ID NO: 7342 - protein, 395 aa, Zea mays
  unsure (1)..(395): unsure at all Xaa locations
MAGTLLQSVALGTPFGGRMRTHCWRSHGTRRPASMLAVSLSRPVKMSAFVGLRSVHSFSVTPTVSNSRSAVASYRSSRQTRRSRFVTRAMFERFTEKAIKVIMLAQEEARRLGHNFVGTEQILLGLIGEGTGIAAKVLKSMGINLKDARVEVEKIIGRGNGFVAVEIPFTPRAKRVLELSLEEARQLGHNYIGSEHLLLGLLREGEGVAARVLESLGADPSNIRTQVIRMIGETTEAVGAGVGGGSSGNKMPTLEEYGTNLTKLAEEGKLDPVVGRQPQIERVVQILGRRTKNNPCLIGEPGVGKTAIAEGLAQRISTGDVPETIEGKKVITLDMGLLVAGTKYRGEFEERLKKLMEEIKQSDEIILFIDEVHTLIGAXAAXEGAIDAANILKPX

SEQ ID NO: 7343 - protein, 276 aa, Zea mays
  unsure (1)..(276): unsure at all Xaa locations
XGVGKSELAKALAAYYFGSEEAMIRLDMSEFMERHTVSKLIGSPPGYVGYTEGGQLTEAVRRRPYTVVLFDEIEKAHPDVFNMMLQILEDGRLTDSKGRTVDFKNTLLIMTSNVGSSVIEKGGRKIGFDLDYDELRDREMELKAQITAXLLTRARKXLKQRLNLVXVGPLVTEADIQHIVSSWTGIPVEKVSSDESDRLLKMEETLHTRIIGQDEAVKAISRAIRRARVGLKNPNRPIASFIFSGPTGVGKSELAKALAAYYFGSKEAMIRLDMSE

SEQ ID NO: 7344 - protein, 164 aa, Zea mays
  unsure (1)..(164): unsure at all Xaa locations
XEFPARXXTRPAEVAAGKVILXIDEMHMLLGAGACKGVSMDGANLLKPALARGRIRCVGATTFDEYRKHIERDAAFERLFQKVIVEEPTTQATIAILQGLKQRYEEHHGLKIQDAAIVAAAQLADRYITGRQFPDKAIDLIDEACSTVRLKIDSQKRPVTTLDQ

SEQ ID NO: 7345 - protein, 136 aa, Zea mays
  unsure (1)..(136): unsure at all Xaa locations
XACLQGKLDPVVGRQDQIERVTQILGRRTKNNPCLIGEPGVGKTAIAEGLAQRISNGDVPETIEGKKVITLDMGLLVAGTKYRGEFEERLKKLMEEIKQNEDIILFIDEVHTLIGAGAAEGAIDAANILKPALARX

SEQ ID NO: 7346 - protein, 330 aa, Zea mays
  unsure (1)..(330): unsure at all Xaa locations
MAAAPPLSADVLSFLTSAPAAPTPVVAAAWGAARAGPVRGKAALRTTRGGRGGVLAPLNSARVGRRPRRTPLSVRCNATSRDGRITQQEFTEMAWQAIVSSPEVAKESKHQIVETEHLMKSLLEQRNGLARRIFSKAGVDNTRLLDATEKFIQRQPKVLGEEPGSMLGRDLEALIQRARDFKKEYGDSYVSVEHLVLGFAEDKRFGKQLFKDFQITVKTLKSAIRHEGGKQNVIDQDPEGKYEALDKYGKDLTAMARQGKLDPVIGRDDEIRRCIQILSRRTKNNPVLIGEPGVGKTAIAEGLAQRIVQGDVPQALTNRRVIILPPGLFX

SEQ ID NO: 7347 - protein, 207 aa, Zea mays
  unsure (1)..(207): unsure at all Xaa locations
XQALINEVQSSPTPIVLFVDEIHTLVGAGGQQGTGDAANLLKPALARGQLRTIGATTWAEYKKYIEKDPALTRRFQTVQVQEPDEAKAILMLRSTVSALEKHHQVLLLDEAVSAAVKLSHRYIPARQLPDKAVAILDTACARVAVSQGAQPAALEDCLHRLAALEIEAEIIERESKVGLGDAARSQAVAAQRATLETERDALQACKX

SEQ ID NO: 7348 - protein, 184 aa, Zea mays
  unsure (1)..(184): unsure at all Xaa locations
LQXCIGAINGLRPRGLFFLIMCIGATTLDEYRKHIEKDPALERRFQPVKVPEPTMDETIQILRGLRERYELHHKLRYTDDALIAAAQLSYQYISDRFLPDKAIDLIDEAGSRVRLRHAQLPDEAKELDKELRQISKQKNEAVRGQDFEKVLESVANGLTMRISITLFMTIKLICSRFRSNARAS

SEQ ID NO: 7349 - protein, 165 aa, Zea mays
  unsure (1)..(165): unsure at all Xaa locations
CIGATTLDEYRKHIEKDPALERRFQPVKVPEPTMDETIQILRGLRERYELHHKLRYTDDALIAAAQLSYQYISDRFLPDKAIDLIDEAGSRVRLRHAQLPDEAKELDKELRQISKQKNEAVRGQDFEKVYCCLAQRXQSRSAPTSLATKKKKVDMVNTKHYVVSF

SEQ ID NO: 7350 - protein, 227 aa, Zea mays
  unsure (1)..(227): unsure at all Xaa locations
MNPDNFTHKTNEAIVGAHEIAVEAGHAQLTPLHLAAVLAADKGGILRQAITGASGGDGAAGDSFERVLNNSLKKLPSQSPPPDSVPASTALIKVIRRAQSAQKKRGDSHLAVDQLLLGLLEDSQISDCLKEAGVSAARVRAELEKLRGGEGRRVESASGDTNFQALKTYGXRDLVEQAGKLDPVIGRDEEIRRVVRXLSRRTKNNPVLIGEPGVGKXXVVEGLAQRX

SEQ ID NO: 7351 - protein, 151 aa, Zea mays
  unsure (1)..(151): unsure at all Xaa locations
XAGELRDREMELKAQITALIDKSKELSKAEEESGETGPMVNEEDIQHIVSSWTGIPVEKVSSDESDKLLKMEETLHKRVIGQDEAVVAISRSIRRARVGLKNPNRPIASFIFAGPTGVGKSELAKALAAYYFGSEEAMIRLDMSEFMERHT

SEQ ID NO: 7352 - protein, 131 aa, Zea mays
  unsure (1)..(131): unsure at all Xaa locations
XLLTCISTTTLEEDSXRTVRKDLTLERRYQHEFVGEPTVPDTVSILRGLTEKYEGHHGVRIQDRALVDTAHISGRYIMDRHLPDKAINLVDEACTNARVQLDSLSEEIDILERKRIQLEVELHALDKEKDX

SEQ ID NO: 7353 - protein, 152 aa, Zea mays
  unsure (1)..(152): unsure at all Xaa locations
XHNLISINMSECQEAHTVSTLKGAPPGYVGYGEXGVLTETVRRRPYSVVLLDQIEKAHPDVLELFLQVFDKGWMEDGQGLHIDFRNTIIILTSNVGTQLSSPMCADPEMMPDPEALSTALRQPLLEVFPPALLGRLLVVPYYPLSDAMLAGI

SEQ ID NO: 7354 - protein, 187 aa, Zea mays
  unsure (1)..(187): unsure at all Xaa locations
XWSSPRWRXALELVDPPGCRTRLRHAQVPEEARELEKELRQITKEKNEAVRGQDFEKAGTLRDREIELRAEVSAIQAKGKEMSKAESETGEEGPMVTESDIQHIVSSWTGIPVEKVSTDESDRLLKMEETLHKRIIGQDEAVKAISRAIRRARVGLKNPNRPIASFIFSGPTGVGKSELAKALAAYX

SEQ ID NO: 7355 - protein, 130 aa, Zea mays
  unsure (1)..(130): unsure at all Xaa locations
XFRSGIPGPTHASTHASAHASAHASAHAXXLDEYGTNVTKLAQEGKLHPVVGRQPHSERVVHILGRRTKNRPCLIGEPDVGKTAIAEGLAQRISTGDVPDTVQGKKVITLDMGLLVAGTKYPGEFEERLX

SEQ ID NO: 7356 - protein, 208 aa, Zea mays
  unsure (1)..(208): unsure at all Xaa locations
XPEICFLSLWLFLSLLXQCIASTTLDEHRLHFEKDKALARRFQPVLVNEPSQEDAVKILLGLREKYETYHKCKYTLEGINAAVYLSARYIPDRHLPDKAIDLIDEAGSRARMESFKRKKEEQCSILSKSPDEYWQEIRAVQSTHEVVMQCSNDKDDGVNIEVIGDNKIASPSMPPTSVDDRPILVGSEEIARVTSLWSGIPVQKLTAX

SEQ ID NO: 7357 - protein, 150 aa, Zea mays
EHKRRVMDAARSVFRPEFMNRVDEYIVFKPLEREQINSIVKLQLARVQKRIADRKIKLDVSPGAIEFLGSLGYDPNYGARPVKRVIQQYVENELAKGILRGDFKDEDSIFVDTQVTVPSNGQLPLRKLVFQKVGEQSKPAAEGEKFLPAV

SEQ ID NO: 7358 - protein, 120 aa, Zea mays
  unsure (1)..(120): unsure at all Xaa locations
XXFYSHIERMVRXLCGLFRFFPFLIGEPGXGKTVIAEGLAQRISTRDVPETIKGKKAITLNMGLFGAGTKYRGEFEERLKKLMAEIKQSDEKILFIDEAHTLIGAXTAEGAIKAPNISKX

SEQ ID NO: 7359 - protein, 154 aa, Zea mays
TLDEHRLHFEKDKALARRFQPVLVNEPSQEDAVKILLGLREKYETYHKCKYTLEGINAAVYLSARYIPDRHLPDKAIDLIDEAGSRARMESFKRKKEEQCSILSKSPDEYWQEIRAVQSTHEVVMQCSNDKDDGVNIEVIGDNKIASPSMPPTS

SEQ ID NO: 7360 - protein, 133 aa, Zea mays
PYSEALKRVQGELAKDGREPVGLSSFKVRERSAAGAGKSAIVKYSNKNALAQFCVDLTMRASGGLIDPVIGRKEEIERVVQIICRRTKNNPILLGEAGVGKTAIAEGLALKIANGDVPIFLVVRSILSIQGYR

SEQ ID NO: 7361 - protein, 99 aa, Zea mays
MAESQWGYLLSKYVRGLPRELAKKSALAQFCVDLTMRASGGLIDPVIGRKEEIERVVQIICRRTKNNPILLGEAGVGKTAIAEGLALKIANGDVPIFLV

SEQ ID NO: 7362 - protein, 173 aa, Zea mays
IRLEVMQEVRRHFRPELLNRLDEIVIFDPLSHEQLRKVARLQMKDVAVRLAERGIALAVTDAALDIILSLSYDPVYGARPIRRWIEKRVVTQLSKMLIQEEIDENCTVYIDAAPGKDELVYRVDRSGGLVNAETGMKSDILIQVPNSSTRSDAAQAVKKMRIMEEDEDGMDEE

SEQ ID NO: 7363 - protein, 176 aa, Zea mays
MKVARDLVMQEVRRHFRPELLNRLDEIVIFDPLSHEQLRKVARLQMKDVAVRLAERGIALAVTDAALDIILSLSYDPVYGARPIRRWIEKRVVTQLSKMLIQEEIDENCTVYIDAAPGKDELVYRVDRSGGLVNAETGMKSDILIQVPPSSTRSDAAQAVKKIRIMEEDEAGMDEE

SEQ ID NO: 7364 - protein, 90 aa, Zea mays
  unsure (1)..(90): unsure at all Xaa locations
XRFQRSLEPLGEQGKLDPVVGRQDQIERVTQILGRRTKNNPCLIGEPGVGKTAIAEGLAQRIANWDVPETIEGKKSILYDLFIVWYGLAR

SEQ ID NO: 7365 - protein, 158 aa, Zea mays
KKNVEMMLSLSSSEGKLDPVVGRQDQIERVTQILGRRTKNNPCLIGEPGVGKTAIAEGLAQRIANWDVPETIEGKKSVLWDLFVGSMDEDDDSPASGSGRHKKKLRLIMGLHDGSAKVQTGTSLNTLGSLGYEIDHGWRQRIAVCHSKLGDQPKRSHG

SEQ ID NO: 7366 - protein, 166 aa, Zea mays
PSHLATTKIRSFLLHFEKDKALARRFQPVLVNEPSQEDAVKILLGLREKYETYHKCKYTLEGINAAVYLSARYIPDRYLPDKAIDLIDEAGSRAQMESFKRKKEEQCSILSMSPHVYWQEIRVVQSTHEVVMQFVHGRTVATCKCFIYWWMFIFHCTSHFRRWLTD

SEQ ID NO: 7367 - protein, 101 aa, Zea mays
  unsure (1)..(101): unsure at all Xaa locations
CYHYLLLQKISAFGKLDPVVGRQDQIERVTQILGRRTKNNPCLIGEPGVGKTAIAEGLAQRIANWDVPETIEGKKSIVVQLWFMEDAHHWRXKKKKKKKKX

SEQ ID NO: 7368 - protein, 177 aa, Zea mays
  unsure (1)..(177): unsure at all Xaa locations
MKVARDLVMQEVRRHFRPXELLNRLDEIVIFDPLSHEQLRKVARLQMKDVAVRLAERGIALAVTDAALDIILSLSYDPVYGARPIRRWIEKRVVTQLSKMLIQEEIDENCTVYIDAAPGKHELVYRVDRSGGLVNAETGMKSDILIQVPTSSTRSDAAQAVKKMRIMEEDKFGMDKE

SEQ ID NO: 7369 - protein, 96 aa, Zea mays
  unsure (1)..(96): unsure at all Xaa locations
XREGGXLTEQVRRPYNVILFDEVERAHVAMFNTLLXVLNNDRLMDGQGRTMDFRNTVIIMTTNLGAWHLLAGMVGNNSMKVARDLVMQEXIRRIFX

SEQ ID NO: 7370 - protein, 108 aa, Zea mays
  unsure (1)..(108): unsure at all Xaa locations
XSSEFGSRRIATVELGKLYPVVGGTSXTDRVDQVSGGQPRTNPGWIEEPVVGKPAIAEGLCXGIFTGECPETIEGKKVLPLDMGLLVAGTKYRGEFQKRIKNLVGEKX

SEQ ID NO: 7371 - protein, 79 aa, Zea mays
  unsure (1)..(79): unsure at all Xaa locations
LIALDMGALIAGAKYRGEFEDRLKAVLKEVTDSDGQTVLFIDEIHTVVGAGNYAGYLDTNSLRSPLRKQGDITKNRVGX

SEQ ID NO: 7372 - protein, 119 aa, Zea mays
  unsure (1)..(119): unsure at all Xaa locations
XSSEGGLLTDADGQPXYTLVVLGEIEKAXHPDVFNMMLDSLGDGRLTDRKVRTVDFINTLLIMTSNVRSSVIENGARXIGFHHCSDENDSEFSRIMSLHMDEMKHCLRPEVLNRLDEMX

SEQ ID NO: 7373 - protein, 114 aa, Zea mays
  unsure (1)..(114): unsure at all Xaa locations
XRPRRPEQVRRXRSVIHFDEVEKAHVAMFNTLLXVLNDGRLMDGQDRTVDFRNTMVIMTSNLGAXHLLAGMVGKNSMKVARDLVMXEVVNDLNPSCHHRKERYFVFAFPAKGQL

SEQ ID NO: 7374 - protein, 125 aa, Zea mays
  unsure (1)..(125): unsure at all Xaa locations
XKKKKKNKPSEFIISLQFIYNEILCGVQGRRVSFKNTLIVMTSNVGSTSISKGRXXSIGFLKEDTESGSYFAMKSLVMEELKAFFRPELLNRIDEMVVFRPLEKTQMLAILDIILKEVKGRLLAL

SEQ ID NO: 7375 - protein, 73 aa, Zea mays
DNQKMFNTKLIALDMGALIAGAKYRGEFEDRPKAVLKEVTDSDGQTILFIDEIHKVVGAGNYEGCSDGGSLVN

SEQ ID NO: 7376 - protein, 199 aa, Zea mays
  unsure (1)..(199): unsure at all Xaa locations
VLTIMLQLFDEGRLTDGKGKTIDCKDAIFIMTSNVASDEIAQHALQLRQEALEMSRNRIAENLGDVQISDKITISKNFKENVIRPILKAHFRRDEFLGRINEIVYFLPFCHSELIQLVNKELNFWAKRAKQRHNITLLWDREVADVLVDGYNVHYGARSIKHEVERRVVNQLAAAYEQDLLPGGCTLRITVEDSDKQLX

SEQ ID NO: 7377 - protein, 95 aa, Zea mays
  unsure (1)..(95): unsure at all Xaa locations
XNRAAPVPSKLPSADKATPVLPKSSLSVNKAALVRPKSPAVDKATPLERRFQQVYVDQPSVEDTISILRGLRERYELHHGVRISDSALVAAGVPS

SEQ ID NO: 7378 - protein, 335 aa, Zea mays
  unsure (1)..(335): unsure at all Xaa locations
PEGTPTSELRKSPLGSPVKTDLALGPMDPGATVENDQKENYTEGLTSXXQKAKIAGISDIESFKRLLKVLTQKVSWQSDAASAIAAVVIQCRTGSGKRRNIGTRGDIWLLFVGPDQAGKRKMVNALSELMVNAQPVVVNFGGDSRLSKDGNGLNPGFWGKTSLDRVTEAVRQNPCSVIILEGIDQVDAVVRGKIKRAMETGRLVDSRGREVSLGNVIFVLTTNWLPXRNSGDQSSLLQDEGRMLEVASSNWQLELSIEDKQVKHRADWLCDDARPAKVAKELSGGQGLSLDLNLAVGALDDTDGSRNSSXVPMCNERIPQRAPLSMSAXAAPGSX

SEQ ID NO: 7379 - protein, 64 aa, Zea mays
  unsure (1)..(64): unsure at all Xaa locations
XPEGKYEALDKYGKDLTAMARQGKLDPVIGRDDEIRRXXKTAIAEGLAQRIVQGDVPQALTNRR

SEQ ID NO: 7380 - protein, 104 aa, Zea mays
  unsure (1)..(104): unsure at all Xaa locations
XTGVPKXELTEAQSAYYLHXYEAIMSLLMSQFMERPARLQPIGSPPVYNPRTQVRLLTAAIHTTPYTCSMLDNMEKTHTDHSSTTLNTLEXGRXTDSMGLTRDX

SEQ ID NO: 7381 - protein, 104 aa, Zea mays
  unsure (1)..(104): unsure at all Xaa locations
XSVIPLIVEKAHVAMFNTLLXVLNDGRLMDGQDRTVDFRNTXMVIMTSNLGAXHLLAGMVGKNSMKVARDLVMQEERGHCKRAVSFHCHEDSLNIAGYVNTGGY

SEQ ID NO: 7382 - protein, 792 aa, Novosphingobium aromaticivorans
MPSFAQSLEKTLHTALANASERSHEYATLEHLLLALIDDPDAAQVMQACGVDLGDLGDVVRQYLDQEYQSLKTQEKADPQPTAGFQRVIQRAILHVQSSGKDTVTGANVLVALFSERDSYAVYFLQQQDMSRLDAVSFISHGIGKGGRQVDGRTPKGAEEDVPKQQEEKADAKGQKKETALDQFCVNLNEKALAGKVDPLIGRGPEVDRTIQILCRRSKNNPLYVGDPGVGKTAIAEGLARKIVEGEVPEVLSEAVIYSLDMGSLLAGTRYRGDFEERLKQVVSELEKMPHAILFIDEIHTVIGAGATSGGAMDASNLLKPALSGGTIRCIGSTTYKEFRNHFEKDRALLRRFQKIDVNEPTVEDTIKILKGLRTAFEEHHKVKYTPDAIKTAVELSARYINDRKLPDKAIDVIDEVGAMQMLVPPSKRKKTITAREIEQVIATMARIPPKSVSSDDKKVLEHLERDLKRLVFGQDKAIEVLSSAMKLSRAGLRDPDKPIGSFLFSGPTGVGKTEVARSLAQIMGIPLQRFDMSEYMERHSVSRLIGAPPGYVGFDQGGLLTDAIDQQPHCVLLLDEIEKAHPDLFNILLQVMDNGRLTDHHGKTVDFRNVVLIMTTNAGASDMARQGIGFGDVSKADAGDEAVKKMFTPEFRNRLDAIVPFAYLPPEVVSRVVDKFVLQLELQLADQNVHIQFDADARAWLAKKGYDRLYGARPMARVIQEKVKKPLAEELLFGKLANGGEVHVSLKQEEGQEGALSFELTPAAPKLVNKKKGKKSKAGDTTAEEPNADEA

SEQ ID NO: 7383 - protein, 236 aa, Desulfitobacterium hafniense
EIHTIIGAGAASGGQVDAANLIKPLLSSGKIRVIGSTTYQEFSNIFEKDRALARRFQKIDITEPSVEETVQIINGLKPKYEAHHDVRYTAKAVRAAVELAVKYINDRHLPDKAIDVIDEAGARARLMPVSKRKKTVNVADIESVVARIARIPEKSVSRSDRDTLKNLGDRLKMLVFGQDKAIEALTEAIKMARAGLGHEHKPVGSFLFAGPTGVGKTEVTVQLAKSLGIELLRFDM

SEQ ID NO: 7384 - protein, 240 aa, Desulfitobacterium hafniense
KALYETFRREFINRLDRVVLFNPLDRALMREILHKELGRVLTRRGLRNRDWAVEWEPSAIEFLLDRGFTPDLGARPLRRAIEHYLLAPLARSIVEHRAPQGDQFLFVRSAGDKLEVEFIDPAPAPPVLVPAGDAAPAQGEDDLRDLVYAPSADAGAIARLDARLAALEDTVLGAQWRGEREADYARMAAAGFWESPERHAALDRIERRDRIESALDTAVRLQQRLSRDGGNASFAQSLAQ

SEQ ID NO: 7385 - protein, 758 aa, Escherichia coli
MLNQELELSLNMAFARAREHRHEFMTVEHLLLALLSNPSAREALEACSVDLVALRQELEAFIEQTTPVLPASEEERDTQPTLSFQRVLQRAVFHVQSSGRNEVTGANVLVAIFSEQESQAAYLLRKHEVSRLDVVNFISHGTRKDEPTQSSDPGSQPNSEEQAGGEERLENFTTNLNQLARVGGIDPLIGREKELERAIQVLCRRRKNNPLLVGESGVGKTAIAEGLAWRIVQGDVPEVMADCTIYSLDIGSLLAGTKYRGDFEKRFKALLKQLEQDTNSILFIDEIHTIIGAGAASGGQVDAANLIKPLLSSGKIRVIGSTTYQEFSNIFEKDRALARRFQKIDITEPSIEETVQIINGLKPKYEAHHDVRYTAKAVRAAVELAVKYINDRHLPDKAIDVIDEAGARARLMPVSKRKKTVNVADIESVVARIARIPEKSVSQSDRDTLKNLGDRLKMLVFGQDKAIEALTEAIKMARAGLGHEHKPVGSFLFAGPTGVGKTEVTVQLSKALGIELLRFDMSEYMERHTVSRLIGAPPGYVGFDQGGLLTDAVIKHPHAVLLLDEIEKAHPDVFNILLQVMDNGTLTDNNGRKADFRNVVLVMTTNAGVRETERKSIGLIHQDNSTDAMEEIKKIFTPEFRNRLDNIIWFDHLSTDVIHQVVDKFIVELQVQLDQKGVSLEVSQEARNWLAEKGYDRAMGARPMARVIQDNLKKPLANELLFGSLVDGGQVTVALDKEKNELTYGFQSAQKHKAEAAH

SEQ ID NO: 7386 - protein, 758 aa, Escherichia coli
MLNQELELSLNMAFARAREHRHEFMTVEHLLLALLSNPSAREALEACSVDLVALRQELEAFIEQTTPVLPASEEERDTQPTLSFQRVLQRAVFHVQSSGRNEVTGANVLVAIFSEQESQAAYLLRKHEVSRLDVVNFISHGTRKDEPTQSSDPGSQPNSEEQAGGEERMENFTTNLNQLARVGGIDPLIGREKELERAIQVLCRRRKNNPLLVGESGVGKTAIAEGLAWRIVQGDVPEVMADCTIYSLDIGSLLAGTKYRGDFEKRFKALLKQLEQDTNSILFIDEIHTIIGAGAASGGQVDAANLIKPLLSSGKIRVIGSTTYQEFSNIFEKDRALARRFQKIDITEPSIEETVQIINGLKPKYEGHHDVRYTAKAVRAAVELAVKYINDRHLPDKAIDVIDEAGARARVMPVSKRKKTVNVADIESVVARIARIPEKSVSQSDRDTLKNLGDRLKMLVFGQDKAIEALTEAIKMARAGLGHEHKPVGSFLFAGPTGVGKTEVTVQLSKALGIELLRFDMSEYMERHTVSRVIGAPPGYVGFDQGGLLTDAVIKHPHAVLLLDEIEKAHPDVFNILLQVMDNGTLTDNNGRKADFRNVVLVMTTNAGVRETERKSIGLIHQDNSTDAMEEIKKIFTPEFRNRLDNIIWFDHLSTDVIHQVVDKFIVELQVQLDQKGVSLEVSQEARNWLAEKGYDRAMGARPMARVIQDNLKKPLANELLFGSLVDGGQVTVALDKEKNELTYGFQSAQKHKAEAAH

SEQ ID NO: 7387 - protein, 148 aa, Escherichia coli
  unsure (1)..(148): unsure at all Xaa locations
XRLDRLTNKFQLALADAQSLALGHDNQFIEPLHLXSALLNQEGGSVSPLLTSAGINAGQLRTDINQALNRLPQVEGTGGDVQPSQDLVRVLNLCDKLAQKRGDNFISSELFVLAALESRGTLADILKAAGATTANITQAIEQXRGGES

SEQ ID NO: 7388 - protein, 105 aa, Escherichia coli
FINRIDEVVVFHPLGEQHIASIAQIQLKRLYKRLEERGYEIHISDEALKLLSENGYDPVYGARPLKRAIQQQIENPLAQQILSGELVPGKVIRLEVNEDRIVAVQ

SEQ ID NO: 7389 - protein, 756 aa, Vibrio cholerae
MLNKELESSLNGAFARARDKRHEFMTVEHLLLALLENDAAREALLACQADIDVLRRELDTFIDQTTPLIPKNDETRETQPTLSFQRVLQRAVFHVQSSGRSEVTGANVLVAIFSEQESHAAYLLKKNDISRLDIVNFISHGITKASNHSEDSSSDSFGSSDTSEEVSADERLESFATNLNQLAKQGQIDPLIGRDKELERTIQVLCRRRKNNPLLVGEAGVGKTAIAEGLAWRIVEGNVPEVIQRSVIYSLDIGSLLAGTKYRGDFEKRFKSILKQLEKEKDAILFIDEIHTIIGAGAASGGQVDAANLIKPLLSSGKLRCIGSTTYQEYSNIFEKERALSRRFQKIDIVEPSLDDTTKILMGLKTKYEAHHDVRYTNKALRAAVELSAKYINERHLPDKAIDVIDEAGARARLMPASRRKKTVGVAEIESMVAKMARIPEKSVSSSDKDILKNLDQKMKMLVFGQDAAIDVLTEAIKLTRAGLGAEHKPVGSFLFAGPTGVGKTEVTLQLSKLLGIELLRFDMSEYGERHSVSRLIGAPPGYVGYDQGGLLTDAVIKHPHSVVLLDEIEKAHPDIFNLLLQVMDNGTLTDNNGRKADFRNVILVMTTNAGVAETVKKSIGLIQQDNSHDAMSEIKKVFTPEFRNRLDHIIWFNSLDERVIHQVVDKFIVELQAQLDARGVSLEVSEDARHWLAVKGYDREMGARPMGRVIQEQLKKPLANELLFGSLVDGGTVKVTLSDDRLAFEYFGTREEVVH

SEQ ID NO: 7390 - protein, 741 aa, Helicobacter pylori 26695
MAKFNQDLNEVLNQALNLALDLNHALCTTEHVLLVILEHESGEKIIGTLERDDYDKLKQILKDYLLQYVPLKSDPAKMPARSFVLLRMLKRMYASCFESVGVEELLILMLDHPDCYASKLMDSFGIARLYSNPALLDLDNHGIPNDINDNEEAPKNTPLKKYAKNLSALAQDNALDPVIGREEEILRVIEILGRRKKNNPLLIGEAGVGKTSIAEALALKIAQKEVPEFLQEYEVYSLDLALMVAGAKYRGDFEKRLKKTLKEIQQNGRIILFIDEIHTLLGTGSSNAGSLDAANILKPVLTDGSLKCLGATTFEEYRSVFEKDKAFNRRFSVIKVEEPSKEACYLILKKIAPLYEEHHQVRYDESVFKACVDLTSDYMHDKFLPDKAIELLDEVGSRKKISPKKGKKIGVDDVKETLALKLKIPKMRLSSDKKALLRNLEKSLKNKIFAQAEAISLVSNAIKIQHCGLSAKNKPVGSFLFVGPSGVGKTELAKELALNLNLHFERFDMSEYKEAHSVAKLIGSPSGYVGFEQGGLLVNAIKKHPHCLLLLDEIEKAHSNVYDLLLQVMDNATLSDNLGNQASFKHVILIMTSNVGSKDKDTLGFFSAKNTKYDKAVKELLTPELRSRIDAIVPFNALSLEDFERIVSVELDKLKALALEQDITLKFHKEVVKFIAQKSYQTTLGAREIKKIIHNEIKTKLSDILLLQSFKKPCKIACLLEKNQLVLKEIKRAQKVKENDF

SEQ ID NO: 7391 - protein, 742 aa, Helicobacter pylori J99
MDKFNKDLNEVLSHALDLALDFNHVLCTTEHVLLAILEHGIGIRIFNTLEEDGYHKMEQILKDYLQQYIPLKNDPTKIPDRSPVLARVFKKMYASYLDSVGVEELLIFILEYDDCYASKLLDSFGITRSYFKSALLDFDNPNDINDNDINNEEAPKSTPLKKYTKNLSALAQNNALDPVIGREEEILRVIEILGRRKKNNPLLIGEAGVGKTSIAEALALKIAQKEVPEFLQEYEVYSLDLALMVAGAKYRGDFEKRLKKTLKEIQQNGRIILFIDEIHTLLGAGSSNAGSLDAANILKPVLTDGSLKCLGATTFEEYRSVFEKDKAFNRRFSIVNVEEPSKEACYLILKNIAPLYEEHHQVRYNESVFKACVDLTSYYMHDKFLPDKAIELLDEVGSRKKINPKKGKKISVDDVQETLALKLKIPKMRLNSDKKALLRNLEKSLKNKIFAQTEAINLVSNAIKIQHCGLSAKNKPVGSFLFVGPSGVGKTELAKELALNLNLHFERFDMSEYKEAHSVAKLIGSPSGYVGFEQGGLLVNAIKKHPHCLLLLDEIEKAHPNVYDLLLQVMDNATLSDNLGNKASFKHVILIMTSNVGSKDKDTLGFFSTKNAKYDRAVKELLTPELRSRIDAIVPFNALSLEDFERIVSVELDKLKALALEQGVILKFHKEVVKCIAQKSYQTTLGAREIKKIIHNEIKTQLSDILLLQSFKKPCKIACLLEKNQLVLKEIKRAQKVKENDF

SEQ ID NO: 7392 - protein, 758 aa, Salmonella enterica subsp. enterica serovar Typhi
MLNQELELSLNMAFARAREHRHEFMTVEHLLLALLSNPSAREALEACSVDLVALRQELEAFIEQTTPVLPASEEERDTQPTLSFQRVLQRAVFHVQSSGRSEVTGANVLVAIFSEQESQAAYLLRKHEVSRLDIVNFISHGTRKDEPSQSSDLGNQPAGDEQAGGEERMENFTTNLNQLARVGGIDPLIGREKELERAIQVLCRRRKNNPLLVGESGVGKTAIAEGLAWRIVQGDVPEVMADCTIYSLDIGSLLAGTKYRGDFEKRFKALLKQLEQDTNSILFIDEIHTIIGAGAASGGQVDAANLIKPLLSSGKIRVIGSTTYQEFSNIFEKDRALARRFQKIDITEPSVEETVQIINGLKPKYEAHHDVRYTAKAVRAAVELAVKYINDRHLPDKAIDVIDEVGARARLMPVSKRKKTVNVADIESVVARIARIPEKSVSQSDRDTLKNLGDRLKMLVFGQDNAIEALTEAIKMSRAGLGHEHKPVGSFLFAGPTGVGKTEVTVQLSKALGIELLRFDMSEYMERHTVSRLIGAPPGYVGFDQGGLLTDAVIKHPHAVLLLDEIEKAHPDVFNLLLQVMDNGTLTDNNGRKADFRNVVLVMTTNAGVRETERKSIGLIHQDNSTDAMGEIKKVFTPEFRNRLDNIIWFDHLSGEVIHQVVDKFIVELQAQLDQKGVSLEVSQEARDWLAEKGYDRAMGARPMARVIQDNLKKPLANELLFGSLVDGGQVTVALDKEKNALTYDFQSAQKHKPEAAH

SEQ ID NO: 7393 - protein, 756 aa, Nitrosomonas europaea
MIAQELEVSLHMAFVESRQKRHEFITVEHLLLALLDNPSAAKVLVACTVDIEDLRKSLQDHIARHTPVVEGSEDVDTQPTLGFQRVIQRAILHVQSSGKKEVTGANVLVAIFGEKDSHAVYFLQQRGVTRLDVVNYISHKIGKAAQSSESEKNEENADGEQQDSGSTLENYTVNLNSQAIANRIDPLIGREKEVERVIQTLCRRRKNNPLLVGEAGVGKTAIAEGLARRITENRVPDVLANHQVYALDMGALLAGTKYRGDFEQRLKVVLKQLTDNPKAILFIDEIHTLIGAGAASGGTLDASNLLKPALSSGRLKCIGATTYNEYRGVFEKDHALSRRFQKIDVSEPDIGETVEILRGLKSRYEKHHNVKYTEVALTAAAELSARFINDRHLPDKAIDVIDEAGAAQRILPKSRQRKIIGRQEIEQVIAGIARIPPQNVSSDDRNKLKTLDRDLKAIVFGQDAAIDALTSAIKMARSGLGNTCKPIGSFLFSGPTGVGKTEVARQLAYTLGIPLHRFDMSEYMERHAVSRLIGAPPGYVGFDQGGLLTETIIKQPHAVLLFDEIEKAHPDIFNVMLQIMDYGTLTDNSGRKADFRNVIIVMTTNAGADVLTRTSIGFTEHTKSGDEMVEIKRLFTPEFRNRLDAIISFTSLTEDIILRVVDKFLIELETQLQEKKVDVTFTDNLRKYLARHGFDPLMGARPMARLIQDIIRRALADELLFGHLANGGKVTVDIDEDGKARLTFEDKENIASPAIS

SEQ ID NO: 7394 - protein, 272 aa, Pisum sativum
FVRQLNTYGFRKVDPDRWEFANEGFLAGQRILLRTIKRRRNVAQSPSMQRESGGACIELGEFGLEGEIERLRRDRSVLVAEIVKLRQQQNNSRDQISAMEARLLITEKKHQQMMAFLARALSNQSFIQQLANNKELKGVEMKRKRRLPASSSLENLQNDSVTMMTVPIESVVDYSSREQQEGLTAIESEIETLLSAYDNESRSEIKDPSANESNLSDWEELLNQKLVGGNPEDEVLIGDFSQIDAPVEDLVEKNDDWTVDLQNLVDEMDFEP

SEQ ID NO: 7395 - protein, 539 aa, Schizosaccharomyces pombe
MPSSNGSSDFVRKLFNMLEEPEYRHILRWSDSGDSFIVLDTNEFTKTILPRHFKHSNFASFVRQLNKYDFHKVRHEEGAPSIYGEGAWEFRHDDFQLHHKDLLDNIKRKAPSKRNLANENTAPVIENLKQQVDSILDFQKLLDRNLSGLATSYQTILLKMFELKRGIESRDLLMSSIISYLCDLEGSTQRQANPGAMFVPSHPLQELLNAYQALAKGQVATTSPQQIPNQIQQASAATTASSKMTVDTNLGTAQPSLYNTPSSDYELANQEKPADSMASAASLNTPLSSNDHSLNPHAHGSYPMYEKFQPIQHPNPGSFTTHLDSNASMAKSFSQISNDSLAKASSVATSMSQMGAAVPTTGLWKRQPRILLVEDDELSRRMTIKFLTSFDCQVDVAVDGIGAVNKANAGGFDLILMDFILPNLDGLSVTCLIRQYDHNTPILAITSNISMNDAVTYFNHGVTDLLVKPFTKLTLLQLLKKQLLNLLQADNSINMSDVPSTKEAKDDKAPVTFYLENDAPMYPQQMLQDPIQADLQHPH

SEQ ID NO: 7396 - protein, 833 aa, Saccharomyces cerevisiae; identical to SEQ ID NO: 423

SEQ ID NO: 7397 - protein, 833 aa, Saccharomyces cerevisiae
MNNAANTGTTNESNVSDAPRIEPLPSLNDDDIEKILQPNDIFTTDRTDASTTSSTAIEDIINPSLDPQSAASPVPSSSFFHDSRKPSTSTHLVRRGTPLGIYQTNLYGHNSRENTNPNSTLLSSKLLAHPPVPYGQNPDLLQHAVYRAQPSSGTTNAQPRQTTRRYQSHKSRPAFVNKLWSMLNDDSNTKLIQWAEDGKSFIVTNREEFVHQILPKYFKHSNFASFVRQLNMYGWHKVQDVKSGSIQSSSDDKWQFENENFIRGREDLLEKIIRQKGSSNNHNSPSGNGNPANGSNIPLDNAAGSNNSNNNISSSNSFFNNGHLLQGKTLRLMNEANLGDKNDVTAILGELEQIKYNQIAISKDLLRINKDNELLWQENMMARERHRTQQQALEKMFRFLTSIVPHLDPKMIMDGLGDPKVNNEKLNSANNIGLNRDNTGTIDELKSNDSFINDDRNSFTNATTNARNNMSPNNDDNSIDTASTNTTNRKKNIDENIKNNNDIINDIIFNTNLANNLSNYNSNNNAGSPIRPYKQRYLLKNRANSSTSSENPSLTPFDIESNNDRKISEIPFDDEEEEETDFRPFTSRDPNNQTSENTFDPNRFTMLSDDDLKKDSHTNDNKHNESDLFWDNVHRNIDEQDARLQNLENMVHILSPGYPNKSFNNKTSSTNTNSNMESAVNVNSPGFNLQDYLTGESNSPNSVHSVPSNGSGSTPLPMPNDNDTEHASTSVNQGENGSGLTPFLTVDDHTLNDNNTSEGSTRVSPDIKFSATENTKVSDNLPSFNDHSYSTQADTAPENAKKRFVEEIPEPAIVEIQDPTEYNDHRLPKRAKK

SEQ ID NO: 7398 - protein, 622 aa, Saccharomyces cerevisiae
MSFSTINSNVNKTTGDSNNNTTENSSTADLLGMDLLQSGPRLMNTMQPNNSSDMLHINNKTNNVQQPAGNTNISSANAGAKAPANEFVRKLFRILENNEYPDIVTWTENGKSFVVLDTGKFTTHILPNHFKHSNFASFVRQLNKYDFHKVKRSPEERQRCKYGEQSWEFQHPEFRVHYGKGLDNIKRKIPAQRKVLLDESQKALLHFNSEGTNPNNPSGSLLNESTTELLLSNTVSKDAFGNLRRRVDKLQKELDMSKMESYATKVELQKLNSKYNTVIESLITFKTINENLLNNFNTLCSTLANNGIEVPIFGDNGNRNPTGNTNPATTTAIQSNNNTNNASPATSTVSLQLPNLPDQNSLTPNAQNNTVTLRKGFHVLLVEDDAVSIQLCSKFLRKYGCTVQVVSDGLSAISTLEKYRYDLVLMDIVMPNLDGATATSIVRSFDNETPIIAMTGNIMNQDLITYLQHGMNDILAKPFTRDDLHSILIRYLKDRIPLCEQQLPPRNSSPQTHSNTNTANSNPNTINEQSLAMLPQDNPSTTTPVTPGASISSAQHVQQGQQEQQHQIFHAQQQQQHHNAIANARSDVAIPNLEHEINTVPHSSMGSTPQLPQSTLQENQLS

SEQ ID NO: 7399 - protein, 237 aa, Neurospora crassa
MATATESAPRNHLADKPENSMGGRNLSIITPTIQMSAPPGDPMDITSSNSNSSSNSNSSSINNNNATMAAPSNSDSLPPPKSPVEDTLNAQAAPNGRPQLSSANDQLSPDNIIMPAPAAAAPAVHQPKIVQTAFIHKLYNMLEDKSIQHLISWSPTSESFVMQPSQEFSKASSQYFKHTNISSFVRQLNMYGFHKGKESPDVAGYQQSLTWSKSERCLPPWSSRRYHLGVQAWQRQL

SEQ ID NO: 7400 - protein, 636 aa, Podospora anserina
MLEDPSYNSVVRWSPEGDSFVVLEKFTKTILPKHFKHSNFASFVRQLNKYDFHKVRHNEESGEAPYGRDAWEFKHPEFRADRKDQLDNIRRKAPAPRKPPPTEDAFPASQQIVVLSESLNATNVQIQTLQEQYLELDRTNRLLVAEVLSLQKMLRAQSQASNELISHLNNMEDRRRNSRHSAQSSHSSHSGTNYHQGTLGLLPDGTDEPAPELRRAREILNGVSPDSQADRELERLSMAYHQNGSPAESAGSSVMFTHAGPQTSMNVVHDPFSDPRHLVYPVGQTQGIDPFHADHIHNIPYSRPLSNPNVMTEAPSQISPPPGKEQNGSLWRGKKPQILLVEDDKTCARIGSKFLTNMDCSVETARDGLEAVEKINTDADRFDLVFMDIIMPNLDGVSATAMIRMVTPQIPIIAMTSNIRQEDIQTYFQFAKPFTRDGMVRILKKHLTRMLKDPQSAGVLNDPNDPTSAGNGGGGQQTAGGPGPPTGGYANANMAASMQAAINQAAQVQVKYEQTPIPSPSTTASWHSPGTTMQQVQHQQVQQQQQHASPRLDQGGYMNAVGSGQGVGGMVLTPGGSQRGPGPGQQQQQQYAGYMQAGPGPVTRLPEMGGMGGGAGDDRPEKRQRLYGPGQGGYVG

SEQ ID NO: 7401 - protein, 295 aa, Encephalitozoon cuniculi
MMSMRLATGSEFVVKLFQILEEPENYPYISWMPDGRSFVISDQQGFSEFVLEKHFRHKNWSSFVRQLNKYDFYKVRRDGERTGCIEAMWEYRNKHFQRGKHELLSKIRRKKAPSEGCGAGGTNPKQIESGIVYQSHVLDTVRSISKYLQTVVEDINEIKKYIYHERMRIALKTSVLFVREGVPGSEWVYGALKIPNYSLTVVEESADVGSIMRWRYDVVVLYANSPRCITAVSRIRDEDEEVPIVLVVDEGFKSEYANILGIRATEALLMPFDPSELVDAINRHGSQRSPEGVHG

SEQ ID NO: 7402 - protein, 358 aa, Saccharomyces cerevisiae [sequence omitted]

SEQ ID NO: 7403 - protein, 340 aa, Mus musculus [sequence omitted]

SEQ ID NO: 7404 - protein, 340 aa, Mus musculus
MGEMEQLRQEAEQLKKQIADARKACADITLAELVSGLEVVGRVQMRTRRTLRGHLAKIYAMHWATDSKLLVSASQDGKLIVWDTYTTNKVHAIPLRSSWVMTCAYAPSGNFVACGGLDNMCSIYNLKSREGNVKVSRELSAHTGYLSCCRFLDDNNIVTSSGDTTCALWDIETGQQKTVFVGHTGDCMSLAVSPDYKLFISGACDASAKLWDVREGTCRQTFTGHESDINAICFFPNGEAICTGSDDASCRLFDLRADQELTAYSQESIICGITSVAFSLSGRLLFAGYDDFNCNVWDSLKCERVGILSGHDNRVSCLGVTADGMAVATGSWDSFLKIWN

SEQ ID NO: 7405 - protein, 296 aa, Mus musculus
MRTRRTLRGHLAKIYAMHWATDSKLLVSASQDGKLIVWDTYTTNKVHAIPLRSSWVMTCAYAPSGNFVACGGLDNMCSIYNLKSREGNVKVSRELSAHTGYLSCCRFLDDNNIVTSSGDTTCALWDIETGQQKTVFVGHTGDCMSLAVSPDYKLFISGACDASAKLWDVREGTCRQTFTGHESDINAICFFPNGEAICTGSDDASCRLFDLRADQELTAYSQESIICGITSVAFSLSGRLLFAGYDDFNCNVWDSLKCERVGILSGHDNRVSCLGVTADGMAVATGSWDSFLKIWN

SEQ ID NO: 7406 - protein, 340 aa, Mus musculus
MSELEQLRQEAEQLRNQIRDARKACGDSTLTQITAGLDPVGRIQMRTRRTLRGHLAKIYAMHWGTDSRLLVSASQDGKLIIWDSYTTNKVHAIPLRSSWVMTCAYAPSGNFVACGGLDNICSIYSLKTREGNVRVSRELPGHTGYLSCCRFLDDNQIITSSGDTTCALWDIETGQQTVGFAGHSGDVMSLSLAPDGRTFVSGACDASIKLWDVRDSMCRQTFIGHESDINAVAFFPNGYAFTTGSDDATCRLFDLRADQELLMYSHDNIICGITSVAFSRSGRLLLAGYDDFNCNIWDAMKGDRAGVLAGHDNRVSCLGVTDDGMAVATGSWDSFLKIWN

SEQ ID NO: 7407 - protein, 340 aa, Mus musculus
MSELEQLRQEAEQLRNQIRDARKACGDSTLTQITAGLDPVGRIQMRTRRTLRGHLAKIYAMHWGTDSRLLVSASQDGKLIIWDSYTTNKVHAIPLRSSWVMTCAYGPSGNFVACGGLDNICSIYSLKTREGNVRVSRELPGHTGYLSCCRFLDDNQIITSSGDTTCALWDIETGQQTVGFAGHSGDVMSLSLAPDGRTFVSGACDASIKLWDVRDSMCRQTFIGHESDINAVAFFPNGYAFTTGSDDSTCRLFDLRADQELLMYSHDNIICGITSVAFSRSGRLLLAGYDDFNCNIWDAMKGDRAGVLAGHDNRVSCLGVTDDGMAVATGSWDSFLKIWN

SEQ ID NO: 7408 - protein, 340 aa, Mus musculus
MSELEQLRQEAEQLRNQIQDARKACNDATLVQITSNMDSVGRIQMRTRRTLRGHLAKIYAMHWGYDSRLLVSASQDGKLIIWDSYTTNKMHAIPLRSSWVMTCAYAPSGNYVACGGLDNICSIYNLKTREGNVRVSRELPGHTGYLSCCRFLDDGQIITSSGDTTCALWDIETGQQTTTFTGHSGDVMSLSLSPDLKTFVSGACDASSKLWDIRDGMCRQSFTGHISDINAVSFFPSGYAFATGSDDATCRLFDLRADQELLLYSHDNIICGITSVAFSKSGRLLLAGYDDFNCSVWDALKGGRSGVLAGHDNRVSCLGVTDDGMAVATGSWDSFLRIWN

SEQ ID NO: 7409 - protein, 340 aa, Mus musculus
MSELEQLRQEAEQLRNQIQDARKACNDATLVQITSNMDSVGRIQMRTRRTLRGHLAKIYAMHWGYDSRLLVSASQDGKLIIWDSYTTNKMHAIPLRSSWVMTCAYAPSGNYVACGGLDNICSIYNLKTREGDVRVSRELAGHTGYLSCCRFLDDGQIITSSGDTTCALWDIETGQQTTTFTGHSGDVMSLSLSPDLKTFVSGACDASSKLWDIRDGMCRQSFTGHISDINAVSFFPSGYAFATGSDDATCRLFDLRADQELLLYSHDNIICGITSVAFSKSGRLLLAGYDDFNCSVWDALKGGRSGVLAGHDNRVSCLGVTDDGMAVATGSWDSFLRIWN

SEQ ID NO: 7410 - protein, 340 aa, Mus musculus
MSELEQLRQEAEQLRNQIQDARKACNDATLVQITSNMDSVGRIQMRTRRTLRGHLAKIYAMHWGYDSRLLVSASQDGKLIIWDSYTTNKMHAIPLRSSWVMTCAYAPSGNYVACGGLDNICSIYNLKTREGNVRVSRELPGHTGYLSCCRFLDDGQIITSSGDTTCALWDIETGQQTTTFTGHSGDVMSLSLSPDLKTFVSGACDASSKLWDIRDGMCRQSFTGHISDINAVSFFPSVYAFATGSDDATCRLFDLRADQELLLYSHDNIICGITSVAFSKSGRLLLAGYDDFNCSVWDALKGGRSGVLAGHDNRVSCLGVTDDGMAVATGSWDSFLRIWN

SEQ ID NO: 7411 - protein, 395 aa, Mus musculus
MCDQTFLVNVFGSCDKCFKQRALRPVFKKSQQLNYCSTCAEIMATDGLHENETLASLKSEAESLKGKLEEERAKLHDVELHQVAERVEALGQFVMKTRRTLKGHGNKVLCMDWCKDKRRIVSSSQDGKVIVWDSFTTNKEHAVTMPCTWVMACAYAPSGCAIACGGLDNKCSVYPLTFDKNENMAAKKKSVAMHTNYLSACSFTNSDMQILTASGDGTCALWDVESGQLLQSFHGHGADVLCLDLAPSETGNTFVSGGCDKKAMVWDMRSGQCVQAFETHESDVNSVRYYPSGDAFASGSDDATCRLYDLRADREVAIYSKESIIFGASSVDFSLSGRLLFAGYNDYTINVWDVLKGSRVSILFGHENRVSTLRVSPDGTAFCSGSWDHTLRVWA

SEQ ID NO: 7412 - protein, 221 aa, Mus musculus
MCSIYNLKSREGNVKVSRELSAHTGYLSCCRFLDDNNIVTSSGDTTCALWDIETGQQKTVFVGHTGDCMSLAVSPDYKLFISGACDASAKLWDVREGTCRQTFTGHESDINAICFFPNGEAICTGSDDASCRLFDLRADQELTAYSQESIICGITSVAFSLSGRLLFAGYDDFNCNVWDSLKCERVGILSGHDNRVSCLGVTADGMAVATGSWDSFLKIWN

SEQ ID NO: 7413 - protein, 204 aa, Mus musculus
SQDGKVIVWDSFTTNKEHAVTMPCTWVMACAYAPSGCAIACGGLDNKCSVYPLTFDKNENMAAKKKSVAMHTNYLSACSFTNSDMQILTASGDGTCALWDVESGQLLQSFHGHGADVLCLDLAPSETGNTFVSGGCDKKAMVWDMRSGQCVQAFETHESDVNSVRYYPSGDAFASGSDDATCRLYDLRADREVAIYSKESIIFG

SEQ ID NO: 7414 - protein, 340 aa, Rattus norvegicus
MSELDQLRQEAEQLKNQIRDARKACADATLSQITNNIDPVGRIQMRTRRTLRGHLAKIYAMHWGTDSRLLVSASQDGKLIIWDSYTTNKVHAIPLRSSWVMTCAYAPSGNYVACGGLDNICSIYNLKTREGNVRVSRELAGHTGYLSCCRFLDDNQIVTSSGDTTCALWDIETGQQTTTFTGHTGDVMSLSLAPDTRLFVSGACDASAKLWDVREGMCRQTFTGHESDINAICFFPNGNAFATGSDDATCRLFDLRADQELMTYSHDNIICGITSVSFSKSGRLLLAGYDDFNCNVWDALKADRAGDLAGHDNRVSCLGVTDDGMAVATGSWDSFLKIWN

SEQ ID NO: 7415 - protein, 340 aa, Rattus norvegicus
MSELDQLRQEAEQLKNQIRDARKACADATLSQITNNIDPVGRIQMRTRRTLRGHLAKIYAMHWGTDSRLLVSASQDGKLIIWDSYTTNKVHAIPLRSSWVMTCAYAPSGNYVACGGLDNICSIYNLKTREGNVRVSRELAGHTGYLSCCRFLDDNQIVTSSGDTTCALWDIETGQQTTTFTGHTGDVMSLSLAPDTRLFVSGACDASVKLWDVREGMCRQTFTGHESDINAICFFPNGNAFATGSDDATCRLFDLRADQELMTYSHDNIICGITSVPFSKSGRLLLGGYDDFNCNVWDALNADRAGVLAGHDNRVSCLGVTDDGMAVATGSWDSFLKIWN

SEQ ID NO: 7416 - protein, 340 aa, Rattus norvegicus
MGEMEQLKQEAEQLKKQIADARKACADITLAELVSGLEVVGRVQMRTRRTLRGHLAKIYAMHWATDSKLLVSASQDGKLIVWDTYTTNKVHAIPLRSSWVMTCAYAPSGNFVACGGLDNMCSIYSLKSREGNVKVSRELSAHTGYLSCCRFLDDNNIVTSSGDTTCALWDIETGQQKTVFVGHTGDCMSLAVSPDYKLFISGACDASAKLWDVREGTCRQTFTGHESDINAICFFPNGEAICTGSDDASCRLFDLRADQELTAYSHESIICGITSVAFSLSGRLLFAGYDDFNCNVWDSLKCERVGVLSGHDNRVSCLGVTADGMAVATGSWDSFLKIWN

SEQ ID NO: 7417 - protein, 340 aa, Rattus norvegicus
MSELEQLRQEAEQLRNQIRDARKACGDSTLTQITDGLDPVGRIQMRTRRTLRGHLAKIYDMHWGTDSRLLVSAAQDGKLIIWDSYTTNKVHVIPLRSSWVKTCAYAPSGNFVACGGLDNNCSIYSLKTREGNVRVSKKLPGHTGYLSCCRFLDDNQIITSSGDTTCALWDIETGQQTVDFAGHSGDVMSLSLAPDGRTFVSGACDASIKLWDVRESMCRQTFIGHESDINAVVFFPNGYAFTTGSDDATCRLFDLRADQELLMYSHDNIICGITSVAFSRSGRLLLAGYDDFNCNIWDAMKGDRAGVLAGHDNRVSCLGVTDDGMAVATGSWDSFLKIWN

SEQ ID NO: 7418 - protein, 353 aa, Rattus norvegicus
MATDGLHENETLASLKSEAESLKGKLEEERAKLHDVELHQVAERVEALGQFVMKTRRTLKGHGNKVLCMDWCKDKRRIVSSSQDGKVIVWDSFTTNKEHAVTMPCTWVMACAYAPSGCAIACGGLDNKCSVYPLTFDKNENMAAKKKSVAMHTNYLSACSFTNSDMQILTASGDGTCALWDVESGQLLQSFHGHGADVLCLDLAPSETGNTFVSGGCDKKAMVWDMRSGQCVQAFETHESDVNSVRYYPSGDAFASGSDDATCRLYDLRADREVAIYSKESIIFGASSVDFSLSGRLLFAGYNDYTINVWDVLKGSRVSILFGHENRVSTLRVSPDGTAFCSGSWDHTLRVWA

SEQ ID NO: 7419 - protein, 225 aa, Rattus norvegicus
TDSRLLVSASQDGKLIIWDSYTTNKVHAIPLRSSWVMTCAYAPSGNFVACGGLDNICSIYSLKTREGNVRVSRELPGHTGYLSCCRFLDDNQIITSSGDTTCALWDIETGQQTVGFAGHSGDVMSLSLAPDGRTFVSGACDASIKLWDVRDSMCRQTFIGHESDINAVAFFPNGYAFTTGSDDATCRLFDLRADQELLMYSHDNIICGITSVAFSRSGRLLLAGY

SEQ ID NO: 7420 - protein, 359 aa, Magnaporthe grisea
MDSQRSNEVSPEAMQARIQQARREAETLKDRIKRKKDELADTTLRTVAQQAHEPIPKNQLMKAKRTLKGHLAKIYAMHWSTDRRHLVSASQDGKLIIWDAYTTNKVHAIPLRSSWVMTCAYAPSGNYVACGGLDNICSIYNLNQNRDGPTRVARELSGHAGYLSCCRFINDRSILTSSGDMTCMKWDIETGTKVIEFADHLGDVMSISLDPTNQNTFISGACDSFAKLWDIRAGKAVQTFAGHESDINAIQFFPDGHSFVTGSDDATCRLFDIRADRELNVYGSESILCGITSVATSVSGRLLFAGYDDFECKVWDITRGDKVGSLVGHENRVSCLGVSNDGMSLCTGSWDSLLKIWAY

SEQ ID NO: 7421 - protein, 352 aa, Emericella nidulans
MADMSGEQMQAKITAARREAEGLKDKIRRRKDDLADTTLRDVAQNQTDALPRIGMKPRRTLKGHLAKIYAMHWSTDRRHLVSASQDGKLIIWDAYTTNKVHAIPLRSSWVMTCAYAPSGNYVACGGLDNICSIYNLSSREGPTRVARELSGHSGYLSCCRFINDRRIITSSGDMTCMLWDIESGSKVTEFADHFGDVMSISINPTNQNIFVSGACDAFAKLWDIRTGKAVQTFAGHESDINAIQFFPDGNAFGTGSDDTTCRLFDIRADRSLNTYQSDQILCGITSVGFSVSGRLLFAGYDDFECKVWDVLRGDKVGSLSGHENRVSCLGVSNDGISLCTGSWDSLLKVWAW

SEQ ID NO: 7422 - protein, 352 aa, Cryptococcus neoformans var. grubii
MQDIQDKIAAARREADGLKDKLRAARDQTADTSLRAMATDTPPLPRITLKARRTLKGHLAKIYALHWAADTRHIVSASQDGKLIVWDAYTTNKVHAIPLRSSWVMTAAYAPSGNLVACGGLDNVCSIYSLRGAGPGAPGAPGGQVKVARELSAHSGYLSCCRFINDRQIVTSSGDMTCMLWDIEQGTRTMEFNDHTGDVMCISLAPNANLFVSGACDATAKVWDIRTGKAVQTFTGHESDINAVQFFPNGDAFATGSDDASCKLFDLRADRELNSYAHDNILCGITSVAFSISGRVLFAGYDDYNCNVWDTLKGERIGVLAGHENRVSCMGVSGDGVALCTGSWDSLLKVWS

SEQ ID NO: 7423 - protein, 340 aa, Anopheles gambiae str. PEST
MNELEALRQEAETLKNAIRDARKAACDTSLVQATNNLEPIGRIQMRTRRTLRGHLAKIYAMHWGSDSRNLVSASQDGKLIVWDSHTTNKVHAIPLRSSWVMTCAYAPSGNFVACGGLDNICSIYNLKTREGNVRVSRELPGHTGYLSCCRFLDDNQIVTSSGDMSCGLWDIETGQQCTSFLGHTGDVMALSLSPQCRVFVSGACDASAKLWDIREGQCKQTFPGHESDINAVTFFPNGHAFATGSDDATCRLFDIRADQELAMYSHDNIICGITSVAFSKSGRLLLAGYDDFNCNVWDTLKAERAGILAGHDNRVSCLGVTENGMAVATGSWDSFLRVWN

SEQ ID NO: 7424 - protein, 340 aa, Anopheles gambiae str. PEST
MNELEALRQEAETLKNAIRDARKAACDTSLVQATNNLEPIGRIQMRTRRTLRGHLAKIYAMHWGSDSRNLVSASQDGKLIVWDSHTTNKVHAIPLRSSWVMTCAYAPSGNFVACGGLDNICSIYNLKTREGNVRVSRELPGHTGYLSCCRFLDDNQIVTSSGDMSCGLWDIETGQQCTSFLGHTGDVMALSLSPQCRVFVSGACDASAKLWDIREGQCKQTFPGHESDINAVTFFPNGHAFATGSDDATCRLFDIRADQELAMYSHDNIICGITSVAFSKSGRLLLAGYDDFNCNVWDTMKAERAGILAGHDNRVSCLGVTENGMAVATGSWDSFLRVWN

SEQ ID NO: 7425 - protein, 346 aa, Anopheles gambiae str. PEST
STTGDSMNEIEALRQEAETLKNAIRDARKAVCDTSILQATAQLEAVGRIQLRTRRTLRGHLAKIYAMHWGNDSRYLVSASQDGKLIVWDSHTTNKVHAIPLRSSWVMTCAYAPSGNYVACGGLDNICSIYNLKTREGNVRIARELGGHTGYLSCCRFLDDNQIVTSSGDMSCALWDIETGQQTTSFQGHTGDVMALSLAPQGKTFVSGACDAKAKLWDIREGQCKQTFPGHESDINAVAFFPNGFAFATGSDDATCRLFDIRADQELAMYSHDNIICGITSVAFSKSGRLLLAGYDDFNCNVWDTMKAERAGILAGHDNRVSCLGVTENGMAVATGSWDSFLRVWN

SEQ ID NO: 7426 - protein, 361 aa, Anopheles gambiae str. PEST
NIETVPCMMAEVLTSLQHSDKVSALIKEAECLKSKLEEERQKLNDVTLSSLAERLEMISYLNIKPRRVLKGHQAKVLCSNWSPDKRHIVSSSQDGKLIIWDAFTTNKEHAVTMPTTWIMGCSYAPSGNLVACGGLDNKVTVYPITLEEDISSRKKTVGTHTSYMSCCIFPNSDQQILTGSGDSTCALWDVESGQLLQSFHGHTGDVMSIDLAPNETGNTFVSGSCDKMAFIWDMRSGHVVQSFEGHQSDINSVKFHPSGDAISTGSDDSTCRLFDMRADKEVAVFCKDSIIFGVNCVDFSVSGRLLFAGYNDYTVNVWDTLKAQRVCLLYGHENKVSCLQVSPDGTALSTGSWDYTLRIWA

SEQ ID NO: 7427 - protein, 351 aa, Anopheles gambiae str. PEST
FCSIMAPKDDPEVAALKKEITDMIAKFQEEQKKVADCKLFDKCADLGDVPKVRITTKKFLKGHINKVNSVHFAGDSRHCVTGSLDGKLIIWDTWTGNKVQVIPLRSAWVMSVAYADSGNFVACGGMDNMCTVYDLNNRDAQGNAKIVRELMGYEGFLSSCRFLDDTHILTGSGDMKICVWDLQVGKKTSEFDAHAGDVVSISMSPDKNTYVTGSVDRTCKLWDVRENTPKQTFFGHEADVNSVCYHPSGFGFATGSEDKTARLFDFRSDQQIGHYEPPNQSSGFTSCALSLSGRYILCGSDDNNIHIWDTMKGSHNGTLSGHENRITSICMAPNGMALASCSWDQHVRIWV

SEQ ID NO: 7428 - protein, 301 aa, Giardia lamblia ATCC 50803
MVVEPPTLIECFKGSSKPVRTCSFEAESRQLSSAGDDRTIMIWNLTPPIRAFKFVGHNDTVVGSAYCPTQSLLATASFDKSVRLWTPNIHGNSIFRKVHTARIRDVSFSIDGRTIVTCSDDKSIKLFDTTNVQFRVCLSGHTNWVYSARLSPDGRLIASVSDDLSLRIWDTRTLSCVQAITNDNGLSLNPRVIRWSPDGTTVATGCTQDVQLWDVRSSTLLQHYSCHTNQVTCLDFHPNGKYMISTGSDGTARILDLVQGRSLYTVRGHEGGVNCISFCPDGSVFATGGDDGRVMLFELGV

SEQ ID NO: 7429 - protein, 971 aa, Streptomyces lincolnensis
MPRGEIPLDPDGGPLFEFAARLRKLREQAGSPTYRDLARDAHYSIASLSSAAAGRQLPSLAVTLAYVRVCGGDEREWKLIWQRTADACTSACTGQGTSAETGPEDRRSGGAKPPYVGLAAFGEADAGVFFGREKLTGTLVEHLKEKRLLVLFGASGSGKSSVLRAGVLPAFPGVSSLVFTPAPHPLEECAVRLAARAGADPGQVRDGLTAEPPTFHRLVRRILAREQEAGSTADELLVVVDQFEEVFTVCRDPRERERFLAALLHAAQAPDSRTRVAIAVRSDFYTHCTRLPGLVDVLPHAHHPVGPMTVEELRAAIVKPAARSRLTVESALLTSLTADAHGRPGALPLLSHALLETWSRRRGNALTLAGYRAAGGFEGALAQTAEAFHHALGDSGRQAARRLFLRLVALGEGTEDTKRRVPRQELDDGPDTEFVLEQATRARLLTVDGDHVEIAHEALIRCWPRLGDWLEEDRDQERLRRALTEATTLWESLDHDPDILYRGVRLAAAKDLPRQALTTRERAFLDAGESAARQTQRREGRRLRRLRRLVGALVVLLVCAVAAAGFAVQAQSTITRQRNEAVILRAADEAVRLSPSNPSLAVPIALAAYRQAPQSRTRDALLSTLSIASTDPRPTGYTPAVTADGRTLAMADQSEIVLWDLSDPRQLRRLGAIDTREFALNGIEFTPHGDTLVGVGSDHVLRLWDVRDPRRPTLLCKRPTGHTEAVYSLALRHDGRLAATSGYDDVLHLWDITDPARPRRLDSLVGHTANVKPVAFSPDGRTLASGSDDRTIRVWDVTDPRHATPVAVLKGHRHFVDALAYSPDGRTLLSGSDDHTAKLWDISDLPRHRRLSDLVRHADIVAGVAFASHGRTAVTVGVDGGVNVWDVTDPARPAPLAHLTNPRGTVKEVRHLAAHGLFLTVTAHRSVQIWHTELDRALTDVCDRFHGTLTRAQWSRHFPRVDYSPPCPHRT

SEQ ID NO: 7430 - protein, 489 aa, Bradyrhizobium japonicum USDA 110
MGALLPRGQASRPRTRHGRSPQNDRRQEARDVTGRHLAMVQRPGKMARWVLCCECLRRPMDLTLRLATALLTASLLLPLRPAQAQLAGHGGPVRAIAVSSDGKTVLSGSFDTAAIRWSLATESAEQVLRFHSGAVNAAAFLGDGRMATAGADGQIAIWTAGGLQPDQVLEGHTGPIVGLVVSPDTSKLASASWDHTVRISSLSDGGTRVLQGHSQSVNGVAFAPDGKSLVSVGYDLTVRIWPLAGGSPEIVVMPAPLNAVAISPDGEIVTGAADGKLRMMTADGKENGEVMAGARPIVALAISQDGALIATGAIDGTVAIVDRKARSVMRTLAGLGAPVWSVAFLPDGATLLTGGADGKIRRWNALTGAAIGSNVLGTPADPLAAYVGDHGAEMFRACVACHTLSENEVQRAGPTLAGLFGRKIASLPGYRFTDALKAMDIVWTPETVSKLFEIGPNAYTPGTKMPEQRIGSAEDRRALTDFLARATSK

SEQ ID NO: 7431 - protein, 436 aa, Kluyveromyces lactis
MEVDSAEYAIRPQELIVHDYHYPNMNSAGTVEDKIRTAKTECKQLYDQINRIKGKIQDTQLMNLSHGVNSLHELNLQPVRTLKGHNNKISDVKWSQDSASVLSSSQDGFIIIWDPFTGLKKSAIPLLSQWVLSSAISPSGNLVASAGLDNHCSVYRVSRDNRIQQNVISIFKGHTCYISATEFLDERTILTASGDMTCAMWDIPKSKRVTEFIDHLGDVLTMDLPPANTGRYGHNFITGGSDGYAYLWDVRQPNSAQSFFISDSDVSAIKFFNNGESFMAGSDDGSARLFDLRSDCQISTYSFSDGLLQQHQLQQQHHPHPHSHAYSRIQKNRYGSSSSSTSSYPIVKTPQSLNFKESCIEDQGVISIDFSSSGRLMYACYADYGCAVWDIIKGEMIGKVDGHRNRINAVKTSPDGMAVVSSSWDMTLKVWTPVHQ

SEQ ID NO: 7432 - protein, 359 aa, Sporothrix schenckii
MDSQRQSDVSPEAMQARIQQARREAETLKDRIKRKKDELADTTLRAVAQQAHEPISRNQMMKPKRTLKGHLAKIYAMHWSTDRRHLVSASQDGKLIIWDAYTTNKVHAIPLRSSWVMTCAYAPSGNYVACGGLDNICSIYNLNQNRDGPTRVARELSGHAGYLSCCRFINDRSILTSSGDMTCMKWDIETGTRVVEFADHLGDVMSISLNPTNQNTFISGACDAFAKLWDIRAGKAVQTFAGHESDINAIQFFPDGHSFVTGSDDATCRLFDIRADRELNVYGSESILCGITSVATSVSGRLLFAGYDDFECKVWDVTRGEKVGSLVGHENRVSCLGVSNDGISLCTGSWDSSLKIWAY

SEQ ID NO: 7433 - protein, 318 aa, Chlamydomonas reinhardtii
MAETLTLRATLKGHTNWVTAIATPLDPSSNTLLSASRDKSVLVWELERSESNYGYARKALRGHSHFVQDVVISSDGQFCLTGSWDGTLRLWDLNTGTTTRRFVGHTKDVLSVAFSVDNRQIVSGSRDKTIKLWNTLGECKYTIGEPEGHTEWVSCVRFSPMTTNPIIVSGGWDKMVKVWNLTNCKLKNNLVGHHGYVNTVTVSPDGSLCASGGKDGIAMLWDLAEGKRLYSLDAGDVIHCLCFSPNRYWLCAATQSSIKIWDLESKSIVDDLRPEFNITSKKAQVPYCVSLAWSADGSTLYSGYTDGQIRVWAVGHSL

SEQ ID NO: 7434 - protein, 356 aa, Takifugu rubripes
MIWNLASKARAFRFVGHQDIITGVHFSPSGNLVATSSKDRTVRLWKPSIKGESKVIKAHTAAVRSVAFSHDGQRLATASDDKSVKVWSVPRHCFLYSLNQHTNWVCCARFSPDARLIASCGDDRTVRLWDTSSKHCINCFTDYGGSATSVDFNPSGTCIASSGSDSSLRIWDLRTNKLIQHYQGSNFMITGSSDSTVKILDLLEGRLMYTLHGHKGPVFTVAFSRGGDLFASGGADAQVLMWRTNFDTKPYLSVLQQHSHRATVDPPPHTGAGFRGSPEEQQQEDLSSYPPCLDTTLQHIVRQLDILTQTVSVLEERLTLTEDKLKECLQHQSQIIKEIGQPGPRRRTANEGHLSG

SEQ ID NO: 7435 - protein, 377 aa, Physcomitrella patens
MSVADSVRERYEVSKAEVQSLREQLHEKRASLLDTDGGPFIPADFVVVISFVFMVCVRTLQGHTGKIYSLDWAYRETSRIVSASQDGRLIVWNAISSQKTYSLKLACAWVKAAAISPGGNTVACGGLDNVCSIFNLSSVPDKEGNLPVSGTLAGHTGYLSSCKYMPTQEKHIVTSSGDHTCRFWDVETQCCIAVFGGDILTGHTGDVMSVSVSSSSPHVFISGSCDKSAKLWDVRTPARAQRTFYGHEGDVNTVNFLSEGRHFGTGSDDGSCRLFDIGTGHELQQYWDKQALARGPVNVTSVAFSRSGRLLFAGYSNGNCYVWDTLLAKVVANLGGGRDDGHTNRVSCLGLAADGDALCTGSYDATLKVWSCAGKKS

SEQ ID NO: 7436 - protein, 721 aa, Myxococcus xanthus
MLGVGSATGSCAGRRGLCRGHAPGDESGMRLRSWWWVLVLLTVSCAGRRSSSEDLGGRDARSELFRARGDAAIETKQWALAAGYFASARHTEDSPTARWGQVWAEKRASSLEWAKQFEGSVLALAFSPDGRLLASGGYDAVVRVWDVAAGAQVAELKGHEAELHAVAFSPDGRWLAAAGRPGALWLWDWKQGRRVALLSGHTDVVRGLAFSPDGEWLASGGLDRTVRVWRIRDGAEVLRFTHDDIVIAVAFSPDGGRLVSSSMDRTARVWELTARRELHRLTGHGDKVESCAFSADGERVMTASADRAIRFWDARTGALLDVQRNTGALSAVAIDAGFQQLVQAGWEGRVQRVDVRGGGEVLERLDAHRTFVMAVALSPDGRTFASGGMDGVLKVWSRPEVPPDVLLRELPAWPEVLTSVGPDAFVSGGEDGLRSWSVSAGGELHSRLEAPDAVGAVAVSADRRLLAVGTLKGEVRVRDVRSGNQLMVIPAARESIRALAFSPDGALLAAGVAQDVVLWAVPSATQVARLTGHTGKAWALAFDATGQRLASGAADHTVRIWDVARGTVIRVLEAGDRVRAVTFLASGELLTAGMRQPIRLWSPDDGRVLTSMDSLTVGVLSLAMAPQGAFVASGGVGGEMKVWRLPDGALMGEVPGLQGFVSAVTFSSDGAWLAAAASDRTFHLLGFDAFALPPPVEPDLTRILRRHGLAWDDLRGAFTLH

SEQ ID NO: 7437 - protein, 377 aa, Arabidopsis thaliana
MSVSELKERHAVATETVNNLRDQLRQRRLQLLDTDVARYSAAQGRTRVSFGATDLVCCRTLQGHTGKVYSLDWTPERNRIVSASQDGRLIVWNALTSQKTHAIKLPCAWVMTCAFSPNGQSVACGGLDSVCSIFSLSSTADKDGTVPVSRMLTGHRGYVSCCQYVPNEDAHLITSSGDQTCILWDVTTGLKTSVFGGEFQSGHTADVLSVSISGSNPNWFISGSCDSTARLWDTRAASRAVRTFHGHEGDVNTVKFFPDGYRFGTGSDDGTCRLYDIRTGHQLQVYQPHGDGENGPVTSIAFSVSGRLLFAGYASNNTCYVWDTLLGEVVLDLGLQQDSHRNRISCLGLSADGSALCTGSWDSNLKIWAFGGHRRVI

SEQ ID NO: 7438 - protein, 327 aa, Brassica napus
MAEGLVLKGTMRAHTDMVTAIATPIDNSDTIVSASRDKSIIVWKLTKDDKSYGVRQRRLTGHSHFVEDVVLSSDGQFALSGSWDGELRLWDLAAGVSTRRFVGHTKDVLSVAFSLDNRQIVSASRDRTIKLWNTLGECKYTISEGGEGHRDWVSCVRFSPNTLQPTIVSASCDKTVKVWNLSNCKLRSTLAGHTGYVSTVAVSPDGSLCASGGKDGVVLLWDLAEGKKLYSLEANSVIHALCFTPNRYWLCAATEQGIKIWDLESKTVVEDLKVDLKAEAEKSDGSGTAATKRKVIYCTSLNWSADGSTLFSGYTDGVIRVWGIGRY

SEQ ID NO: 7439 - protein, 583 aa, Penicillium marneffei
MYNAHRGMVPAPNNRLTELLEQLRQEFESQSRSTGEFEHQLTGQIQEMEMIRQKVYQLEQAQIKIKAEYENEIRVLRHELESRGVQTVPSHVGGPTHAGPSQAPPALGHGTNNLFGGIMANQGGSGPGLAPPPPQEQQPPQHGLQQPAPAAQQGPPQPPQSSYGGYQPSAGVNGYGPPPPPTASPGPGKGRGRAPPGPATPQQTHQLNYPAPGASPQIPRPTPTGQLVRERPGNTLANWNPDDLPASQKREGPDWYAVFNPEVQRVLDVELVHHLVHDSVVCCVRFSRDGKYVATGCNRSAQIFDVATGQNVATLQDESVDKDGDLYIRSVCFSPDGKYLATGAEDKQIRVWDIATRSIKHVFTGHEQDIYSLDFAGNGRYIASGSGDKTVRLWDVLEGKLVYTLSIEDGVTTVAMSPDGHYVAAGSLDKSVRVWDTTTGYLVERLENPDGHKDSVYSVAFAPNGRDLVSGSLDKTIKMWELTAPRGMLPGTGVKGGKCVRTFEGHKDFVLSVCLTPDGHWVMSGSKDRGVQFWDPNTGSAQMMLQGHKNSVISVAPSPTNNLFATGSGDMRARIWRYVEFPE

SEQ ID NO: 7440 - protein, 377 aa, Glycine max
MSVTELKERHLAATETVNSLRERLKERRLSLLDTDIAGYARSQGRSPVTFGPTDLVCCRTLQGHAGKVYSLDWTSEKNRIVSASQDGRLIVWNALTSQKTHAIKLPCAWVMTCAFSPTGQSVACGGLDSVCSIFNLNSPTDRDGNLPVSRMLSGHKGYVSSCQYVPDEDTHLITGSGDQTCVLWDITTGLKTSVFGGEFQSGHTADVLSISINGSNSRMFVSGSCDATARLWDTRVASRAVRTFHGHEGDVNAVKFFPDGNRFGTGSDDGTCRLFDIRTGHQLQVYYQQHSDNEIAPVTSIAFSASGRLLFAGYTNGDCYVWDTLLAKVVLNIGSLQDSHEDRISCLGLSADGSALCTGSWDTNLKIWAFGGHRRTT

SEQ ID NO: 7441 - protein, 377 aa, Glycine max
MSVTELKERHSAATDTVNNLRHRLKQKRLSLLDTDISGYARSQGRTPVTFGPTDLVCCRTLQGHTGKVYSLDWTSEKSQIVSASQDGRLIVWNALTRQKIHAIKLPCAWVMTCAFSPTGQSVACGGLDSVCSLFNLNSPTDRDGNLAVSRMLSGHKGYVSSCQYVPDEDTHLITGSGDQTCVLWDITTGLRTSVFGGEFQSGHTADVLSISINGSNSRMFVSGSCDSTARLWDTRVASRAVRTFHGHEGDVNAVKFFPDGNRFGTGSDDGTCRLFDIRTGHQLQVYYQQHSDNEIPPVTSIAFSASGRLLFAGYTNGDCYVWDTLLAKVVLNIGSLQDSHEDRISCLGLSADGSALCTGSWDTNLKIWAFGGHRRTT

SEQ ID NO: 7442 - protein, 379 aa, Glycine max
  unsure (1)..(379): unsure at all Xaa locations
MFVTDLKGRHCXSSTDNVNNLRHRLKQKRLSLLDTDVSGYARSPGRTPVTFGPTDLVCCRTLQGHTGKVYSLDWTSEKSQIVSASQDGRLIVWNALTRQKIHAIKLPCAWVMTCAFSPTGQSVACGGLDSVCSIFNLNSPTDKDGNLPVSRMLSGHKGYVSSCQYVPDEDTHLITGSGDQTCVLWDITTGLKTSIFGGEFQSGHTADVLSISINGSNSRMFVSGSCDATARVWDTRVASASXVRTFHGQDGQCKHFMVLREVLIQSTGLDDGTCRLFDIRTGHQLQVYYQQHSDNDITPVTSIAFDASGRLLFAGYTNGDCYVWDTLLAKVVLNIGSLQDSHEDRISCLGLSADGSALCTGSWDTNLKIWAFGGHRRTT

SEQ ID NO: 7443 - protein, 295 aa, Glycine max
  unsure (1)..(295): unsure at all Xaa locations
XFGSRRLIVWNALTRQKIHAIKLPCAWVMTCAFSPTGQSVACGGLDSVCSIFNLNSPTDKDGNLPVSRMLSGHKGYVSSCQYVPDEDTHLITGSGDQTCVLWDITTGLKTSIFGGEFQSGHTADVLSISINGSNSRMFVSGSCDATARLWDTRVASRAVRTFHGHEGDVNAVKFFPDGNRFGTGSDDGTCRLFDIRTGHQLQVYYQQHSDNDITPVTSIAFFASGRLLFAGYTNGDCYVWDTLLAKVVLNIGSLQDSHEDRISCLGLSADGSALCTGSWDTNLKIWAFGGHRRTT

SEQ ID NO: 7444 - protein, 172 aa, Glycine max
SSQLRRPPPTNMFVSGSCDTTVRLWDIRIASRAVRTYHGHEDDVNSVKFFPDGHRFGTGSDDGTCRLFDMRTGHQLQVYSREPDRNSNELPTVTSIAFSISGRLLFAGYSNGDCYVWDTLLAEVVLNLGNLQNSHDGRISCLGMSSDGSALCTGSWDKNLKIWAFSGHRKIV

SEQ ID NO: 7445 - protein, 204 aa, Glycine max
  unsure (1)..(204): unsure at all Xaa locations
MSVTELKERHSAATDTVNNLRHRLKQKRLSLLDTDVSGYARSQGRTPVTFGPTDLVCCRTLQGHTGKVYSLDWTSEKSQIVSASQDGRLIVWNALTRQKIHAIKLPCAWVMTCAFSPTGQSVACGGLDSVCSIFNLNSPTDKDGNLPVSPMLSGHKGYVSSCQYVPDEDTHLITGSGDQTCVXWDITTGLKTSIFGGEFQSGHT

SEQ ID NO: 7446 - protein, 183 aa, Glycine max
  unsure (1)..(183): unsure at all Xaa locations
MSVTELKERHSAATDTVNNLRHRLKQKRLSLLDTDISGYARSQGRTPVTFGPTDLVCCRTLQGHTGKVYSLDWTSEKSQIVSASQDGRLIVWNALTRQKIHAIKLPCAWVMTCAFSPTGQSVACGGLDSVCSIFNLNSPTDKDGNLPVSRMLSGHKGYVSSWQYVPDEDTHLITGSGDQTCVX

SEQ ID NO: 7447 - protein, 144 aa, Glycine max
  unsure (1)..(144): unsure at all Xaa locations
XHASRRAVRTFHGHEGDVNAVKFFPDGNRFGTGSDDGTCRLFDIRTGHQLQVYYQQHSDNEIPPVTSIAFSASGRLLFAGYTNGDCYVWDTLLAKVVLNIGSLQDSHEDRISCLGLSADGSALCTGSWDTNLKIWAFGGHRRTT

SEQ ID NO: 7448 - protein, 155 aa, Glycine max
MSVTELKERHLAATETVNSLRERLKERRLSLLDTDIAGYARSQGRSPVTFGPTDLVCCRTLQGHAGKVYSLDWTSEKNRIVSASQDGRLIVWNALTSQKTHAIKLPCAWVMTCAFSPTGQSVACGGLDSVCSLFYLNSPTDRENNKRADVGVSLT

SEQ ID NO: 7449 - protein, 129 aa, Glycine max
MSVTELKERHSAATDTVNNLRHRLKQKRLSLLDTDVSGYARSQGRTPVTFGPTDLVCCRTLQGHTGKVYSLDWTSEKSQIVSASQDGRLIVWNALTRQKIHAIKLPCAWVMTCAFSPTGQSVACGGLDS

SEQ ID NO: 7450 - protein, 77 aa, Glycine max
  unsure (1)..(77): unsure at all Xaa locations
MSVTELKERHLAATETINSLRERLKERRLSLLDTDIAGYARSQGRAPVTFGPTDLVWCRALQGHTGKVYSMDWTSEX

SEQ ID NO: 7451 - protein, 325 aa, Medicago sativa
MAEGLVLRGTMRAHTDVVTAIATPIDNSDMIVTASRDKSIILWHLTKEDKTYGVPRRRLTGHSHFVQDVVLSSDGQFALSGSWDGELRLWDLNAGTSARRFVGHTKDVLSVAFSIDNRQIVSASRDRTIKLWNTLGECKYTIQDGDAHSDWVSCVRFSPSTPQPTIVSASWDRTVKVWNLTNCKLRNTLAGHSGYVNTVAVSPDGSLCASGGKDGVILLWDLAEGKRLYSLDAGSIIHALCFSPNRYWLCAATESSIKIWDLESKSIVEDLKVDLKTEADAAIGGDTTTKKKVIYCTSLNWSADGSTLFSGYTDGVVRVWGIGRY

SEQ ID NO: 7452 - protein, 377 aa, Pisum sativum
MSVAELKERHIAATETVNNLRERLKQRRLSLLDTDIAGYARSQGRAPVTFGPTDILCCRTLQGHTGKVYSLDWTSEKNRIVSASQDGRLIVWNALTSQKTHAIKLPCAWVMTCAFSPTGQSVACGGLDSVCSIFNLNSPTDRDGNLNVSRMLSGHKGYVSSCQYVPGEDTHLITGSGDQTCVLWDITTGLRTSVFGGEFQSGHTADVLSISINGSNSKLFVSGSCDATARLWDTRVASRAVRTFHGHEGDVNSVKFFPDGNRFGTGSEDGTCRLFDIRTGHQLQVYNQQHQDNEMAHVTSIAFSISGRLLIAGYTNGDCYVWDTLLAKVVLNLGSLQNSHEGRITCLGMSADGSALCTGSWDTNLKIWAFGGHRKVI

SEQ ID NO: 7453 - protein, 377 aa, Pisum sativum
MSVADVKERHIAATETVNNLRERLKQRRLSLLDTDIAGYARSQGRAPVTLGPTDILCCRTLQGHTGKVYSLDWTSEKNRIVSASQDGRLIVWNALTSQKTHAIKLPCAWVMTCAFSPTGQSVACGGLDSVCSIFNLNSPTDRDGNLNVSRMLSGHKGYVSSCQYVPGEDTHLITGSGDQTCVLWDITTGLRTSVFGGEFQSGHTADVLSISINGSNSKLFVSGSCDATARLWDTRVASRAVRTFHGHEGDVNPVKFFPDGNRFGTGSEDGTCRLFDIRTGHQLQVYNQQHQDNEMAHVTSIAFSISGRLLIAGYTNGDCYVWDTLLAKVVLNLGSLQNSHEGRITCLGMSADGSALCTGSWDTNLKIWAFGGHRKVI

SEQ ID NO: 7454 - protein, 377 aa, Pisum sativum
MSVADVKERHIAATETVNNLRERLSRDRLSLLDTDIAGYARSQGRAPVTFGPTDILCCRTLQGHTGKVYSLDWTSEKNRIVSASQDGRLIVWNALTSQKTHAIKLPCAWVMTCAFSPTGQSVACGGLDSVCSIFNLNSPLDRDGNLNVSRMLSGHKGYVSSCQYVPGEDTHLITGSGDQTCVLWDITTGLRTSVFLGEFQSGHTADVLSISINGSNSKLFVSGSCDATARLWDTRVASRAVRTFHGHEGDVNSVKFFPDGNRFGTGSEDGTCRLFDIRTGHQLQVYNQQHQDNEMAHVTSIAFSISGRLLIAGYTNGDCYVWDTLLAKVVLNLGSLQNSHEGRITCLGMSADGSALCTGSWDTNLKIWAFGGHRKVI

SEQ ID NO: 7455 - protein, 326 aa, Lycopersicon esculentum
MSQESLVLRGTMKAHTDWVTAIATPIDNSDMIVTSSRDKSIIVWSLTKDGSQYGVPRRRLTGHGHFVEDVVLSSDGMFALSGSWDGELRLWDLQAGTTARRFVGHTKDVLSVAFSVDNRQIVSASRDKTIKLWNTLGECKYTIQEQDSHSDWVSCVRFSPNNLQPTIVSGSWDRTVKIWNLTNCKLRSTLAGHSGYVNTVAVSPDGSLCASGGKDGVILLWDLAEGKKLYSLDAGSIIHTFCFSPNRYWLCAATESSIKIWDLESKSIVVDLKVDLKQESEMFGTAATDSKTKVIYCTSLSWSADGSTLFSGYTDGLIRVWGIGRY

SEQ ID NO: 7456 - protein, 326 aa, Lycopersicon esculentum
MAQESLVLRGTMKAHTDWVTAIATPIDNSDMIVTSSRDKSIIVWSLTKDGAQYGVPRRRLTGHGHFVQDVVLSSDGMFALSGSWDGELRLWDLQAGTTARRFVGHTKDVLSVAFSVDNRQIVSASRDKSIKLWNTLGECKYTIQDGHSHSDWVSCVRFSPNTLQPTIVSGSWDRTVKIWNLTNCKLRSTLAGHSGYVNTVAVSPDGSLCASGGKDGVILLWDLAEGKKLYSLDAGSIIHTLCFSPNRYWLCAATESSIKIWDLESKSIVVDLKVDLKHESEMANESGTAPKTKVIYCTSLSWSADGSTLFSGYTDGLIRVWGIGRY

SEQ ID NO: 7457 - protein, 377 aa, Nicotiana plumbaginifolia
  unsure (1)..(377): unsure at all Xaa locations
MSVTELKERHMAATQTVNDLREKLKQKRLQLLDTDVSGYARSQGKTPVTFGPTDLVCCRILQGHTGKVYSLDWTPEKNRIVSASQDGRLIVWNALTSQKTHAIKLPCAWVMTCAFSPSGHSVACGGLDSVCSIFNLNSPIDKDGNHPVSRMLSGHKGYVSSCQYVPDEDTHLITSSGDQTCVLWDITTGLRTSVFGGEFQFGHTADVQSVSISSSNPRLFVSGSCDTTARLWDTRVASRAQRTFYCHEGDVNTVKFFPDGNRFGTGSEDGTCRLFDIRTGHQLQVYYQPHGDGDIPHVTSMAFSISGRLLFVRYSNGDCYVWDTLLAKVVLNLGAVQNSHEGXISCLGLSADGXXLCTGSWDTNLKIWAFGGHRSVI

SEQ ID NO: 7458 - protein, 377 aa, Nicotiana tabacum
MSVTELKERHMAATQTVNDLREKLKQKRLQLLDTDVSGYARSQGKTPVTFGPTDLVCCRILQGHTGKVYSLDWTPEKNRIVSASQDGRLIVWNALTSQKTHAIKLPCAWVMTCAFSPSGQSVACGGLDSVCSIFNLNSPIDKDGNHPVSRMLSGHKGYVSSCQYVPDEDTHLITSSGDQTCVLWDITTGLRTSVFGGEFQSGHTADVQSVSISSSNPRLFVSGSCDTTARLWDTRVASRAQRTFYGHEGDVNTVKFFPDGNRFGTGSEDGTCRLFDIRTEHQLQVYYQPHGDGDIPHVTSMAFSISGRLLFVGYSNGDCYVWDTLLAKVVLNLGGVQNSHEGRISCLGLSADGSALCTGSWDTNLKIWAFGGHRSVI

SEQ ID NO: 7459 - protein, 377 aa, Nicotiana tabacum
MSVKELKERHMAATQTVNDLREKLKQKRLQLLDTDVSGYARSQGKTPVIFGPTDLVCCRILQGHTGKVYSLDWTPEKNRIVSASQDGRLIVWNALTSQKTHAIKLPCAWVMTCAFSPSGQSVACGGLDSVCSIFNLNSPIDKDGNHPVSRMLSGHKGYVSSCQYVPDEDTHVITSSGDQTCVLWDITTGLRTSVFGGEFQSGHTADVQSVSISSSNPRLFVSGSCDSTARLWDTRVASRAQRTFYGHEGDVNTVKFFPDGNRFGTGSDDGTCRLFDIRTGHQLQVYYQPHGDGDIPHVTSMAFSISGRLLFVGYSNGDCYVWDTLLAKVVLNLGAVQNSHEGRISCLGLSADGSALCTGSWDTNLKIWAFGGHRSVI

SEQ ID NO: 7460 - protein, 377 aa, Nicotiana tabacum
MSVTELKERHMAATQTVNDLREKLKQKRLQLLDTDVSGYARSQGKTPVTFGPTDLVCCRILQGHTGKVYSLDWTPEKNRIVSASQDGRLIVWNALTSQKTHAIKLPCAWVMTCAFSPSGQSVACGGLDSVCSIFNLNSPIDKDGNHPVSRMLSGHKGYVSSCQYVPDEDTHLITSSGDQTCVLWDITTGLRTSVFGGEFQSGHTADVQSVSISSSNPRLFVSGSCDTTAGLWDTRVASRAQRTFYGHEGDVNTVKFSPDGNRFGTGSEDGTCRLFDIRTGHQLQVYYQPHGDGDIPHVTSMAFSISGRLLFVGYSNGDCYVWDTLLAKVVLNLGGVQNSHEGRISCLGLSADGSALCTGSWDTNLKIWAFGGHRSVI

SEQ ID NO: 7461 - protein, 375 aa, Nicotiana tabacum
MSVTELKERHMAATQTVSDLREKLKQKRLQLLDTDVSGYARSQGKTPVTFGPTDLVCCRILQGHTGKVYSLDWTPEKNRIVSASQDGRLIVWNALTSQKTHAIKLPCAWVMTCAFSPSGQSVACGGLDSVCSIYNLNSPIDKDGNHPVSRMLSGHKGYVSSCQYVPDEDTHLITSSGDQTCVLWDITTGLRTSVFGGEFQSGHTADVQSVSISSSNPRLFVSGSCDTTARLWDNRVASRAQRTFYGHEGDVNTVKFFPDGNRFGTGSEDGTCRLFDIRTGHQLQVYYQPHGDGDIPHVTSMAFSISGRLLFVGYSNGDCYVWDTLLAKVVLNLGGVQNSHEGRISCLGLSADGSALCTGSWDTNLKIWAFGGTEV

SEQ ID NO: 7462 - protein, 240 aa, Nicotiana tabacum
VACGGLDSVCSIFNLNSPIDKDGNHPVSRMLSGHKGYVSSCQYVPDEDTHLITSSGDQTCVLWDITTGLRTSVFGGEFQSGHTADVQSVSISSSNPRLFVSGSCDTTARLWDNRVASRAQRTFYGHEGDVNTVKFFPDGNRFGTGSEDGTCRLFDIRTGHQLQVYYQPHGDGDIPHVTSMAFSISGRLLFVGYSNGDCYVWDTLLAKVVLNLGGVQNSHEGRISCLGLSADGSAICTGTW

SEQ ID NO: 7463 - protein, 377 aa, Solanum tuberosum
MSVAELKERHMAATQTVNDLREKLKQKRLQLLDTDVSGYAKTQGKTPVTFGPTDLVCCRILQGHTGKVYSLDWTPEKNRIVSASQDGRLIVWNALTSQKTHAIKLPCAWVMTCAFSPSGQSVACGGLDSACSIFNLNSPIDKDGIHPVSRMLSGHKGYVSSCQYVPDEDTHLITSSGDQTCVLWDITTGLRTSVFGGEFQSGHTADVSSVSISSSNPKLFVSGSCDTTARLWDTRVASRAQRTFHGHESDVTTVKFFPDGNRFGTGSDDGSCRLFDIRTGHQLQVYNQPHGDGDIPHVTSIAFSISGRLLFVGYSNGDCYVWDTLLAKVVLNLGSVQNSHEGRISCLGLSADGSALCTGSWDTNLKIWAFGGHRSVI

SEQ ID NO: 7464 - protein, 377 aa, Solanum tuberosum
MSVAELKERHMAATQTVNDLREKLKQKRLQLLDTDVSGYAKRQGKSPVTFGPTDLVCCRILQGHTGKVYSLDWTPEKNRIVSASQDGRLIVWNALTSQKTHAIKLPCAWVMTCAFSPSGQSVACGGLDSACSIFNLNSPIDKDGIHPVSRMLSGHKGYVSSCQYVPDEDTHLITSSGDQTCVLWDITTGLRTSVFGGEFQSGHTADVLSVSISSSNPKLFVSGSCDTTARLWDTRVASRAQRTFHGHESDVNTVKFFPDGNRFGTGSDDGSCRLFDIRTGHQLQVYNQPHGDGDIPHVTSMAFSISGRLLFVGYSNGDCYVWDTLLAKVVLNLGSVQNSHEGRISCLGLSADGSALCTGSWDTNLKIWAFGGHRSVV

SEQ ID NO: 7465 - protein, 340 aa, Sitobion avenae
MNELDSLRQEAETLKNAIRDARKAACDTSLSQATTSMEPVGRIQMRTRRTLRGHLAKIYAMHWGSDSRNLVSASQDGKLIVWDSYTTNKVHAIPLRSSWVMTCAYAPSGSFVACGGLDNICSIYSLKTREGNVRVSRELPGHTGYLSCCRFLDDNQIVTSSGDMSCALWDIETGQQCSSFIGHTGDVMSLSMSPDMRTFVSGACDASAKLWDVRDGTCKQTFPGHESDINAVTFFPNGYAFATGSDDATCRLFDIRSDQELAMYSHDNIICGITSVSFSKSGRLLLAGYDDFNCNVWDSMKAERAGILAGHDNRVSCLGVTEDGMAVATGSWDSFLRIWN

SEQ ID NO: 7466 - protein, 347 aa, Dictyostelium discoideum
MSSDISEKIQQARRDAESMKEQIRANRDVMNDTTLKTFTRDLPGLPKMEGKIKVRRNLKGHLAKIYAMHWAEDNVHLVSASQDGKLLVWDGLTTNKVHAIPLRSSWVMTCAYSPTANFVACGGLDNICSIYNLRSREQPIRVCRELNSHTGYLSCCRFLNDRQIVTSSGDMTCILWDVENGTKITEFSDHNGDVMSVSVSPDKNYFISGACDATAKLWDLRSGKCVQTFTGHEADINAVQYFPNGLSFGTGSDDASCRLFDIRADRELMQYTHDNILCGITSVGFSFSGRFLFAGYDDFTCNVWDTLKGERVLSLTGHGNRVSCLGVPTDGMALCTGSWDSLLKIWA

SEQ ID NO: 7467 - protein, 380 aa, Avena fatua
MASVAELKERHAAATASVNSLRERLRQRRQTLLDTDVEKYSKAQGRTAVSFNQTDLVCCRTLQGHSGKVYSLDWTPEKNWIVSASQDGRLIVWNALTSQKTHAIKLHCPWVITCAFAPNGQSVACGGLNSACSIFNLNSQVDRNGNMPVSKLLTGPKGYVLSCQYVPDQETRMITGSGDPTCVLWDVTTGQRISIFGGEFPSGHTADVLSLSINSLNTNMFVSGSCDTTVRLWDLRIASRAVRTYHGHEGDINSVKFFPDGHRFGTGSDDGTCRLFDMRIRHQLQVYSREPDRNDNELPSVTSIAFSISGRLLFAGYSNGDCYAWDTLLAEVVLNLGTLQNSHEGRISCLGLSSDGSALCTGSWDKNLKIWAFSGHRKIV

SEQ ID NO: 7468 - protein, 380 aa, Oryza sativa
MASVAELKEKHAAATASVNSLRERLRQRRQMLLDTDVERYSRTQGRTPVSFNPTDLVCCRTLQGHSGKVYSLDWTPEKNWIVSASQDGRLIVWNALTSQKTHAIKLHCPWVMTCAFAPNGQSVACGGLDSACSIFNLNSQADRDGNIPVSRILTGHKGYVSSCQYVPDQETRLITSSGDQTCVLWDVTTGQRISIFGGEFPSGHTADVLSLSINSSNSNMFVSGSCDATVRLWDIRIASRAVRTYHGHEGDINSVKFFPDGQRFGTGSDDGTCRLFDVRTGHQLQVYSREPDRNDNELPTVTSIAFSISGRLLFAGYSNGDCYVWDTLLAEVVLNLGNLQNSHEGRISCLGLSSDGSALCTGSWDKNLKIWAFSGHRKIV

SEQ ID NO: 7469 - protein, 380 aa, Oryza sativa
MASVAELKEKHAAATASVNSLRERLRQRRQMLLDTDVERYSRTQGRTPVSFNPTDLVCCRTLQGHSGKVYSLDWTPEKNWIVSASQDGRLIVWNALTSQKTHAIKLHCPWVMTCAFAPNGQSVACGGLDSACSIFNLNSQADRDGNIPVSRILTGHKGYVSSCQYVPDQETRLITSSGDQTCVLWDVTTGQRISIFGGEFPSGHTADVLSLSINSSNSNMFVSGSCDATVRLWDIRIASRAVRPYHGHEGDINSVKFFPDGQRFGTGSDDGTCRLFDVRTGHQLQVYSREPDRNDNELPTVTSIAFSISGRLLFAGYSNGDCYVWDTLLAEVVLNLGNLQNSHEGRISCLGLSSDGSALCTGSWDKNLKIWAFSGHRKIV

SEQ ID NO: 7470 - protein, 353 aa, Tamias striatus
MATDGLHENETLASLKSEAESLKGKLEEERAKLHDVELHQVAERVEALGQFVMKTRRTLKGHGNKVLCMDWCKDKRRIVSSSQDGKVIVWDSFTTNKEHAVTMPCTWVMACAYAPSGCAIACGGLDNKCSVYPLTFDKNENMAAKKKSVAMHTNYLSACSFTNSDMQILTASGDGTCALWDVESGQLLQSFHGHGADVLCLDLAPSETGNTFVSGGCDKKAMVWDMRSGQCVQAFETHESDINSVRYYPSGDAFASGSDDATCRLYDLRADREVAIYSKESIIFGASSVDFSLSGRLLFAGYNDYTINVWDVLKGSRVSILFGHENRVSTLRVSPDGTAFCSGSWDHTLRVWA

SEQ ID NO: 7471 - protein, 380 aa, Triticum aestivum
MASVAELKEKHAAATASVNSLRERLRQRRQTLLDTDVEKYSKAQGRTAVSFNPTDLVCCRTLQGHSGKVYSLDWTPEKNWIVSASQDGRLIVWNALTSQKTHAIKLHCPWVMECAFAPNGQSVACGGLDSACSIFNLSSQADRDGNMPVSRVLTGHKGYASSCQYVPDQETRLITGSGDQTCVLWDVTTGQRISIFGSEFPSGHTADVLSLSINSLNANMFISGSCDTTVRLWDLRITSRAVRTYHGHEGDINSVKFFPDGQRFGTGSDDGTCRLFDMRTGHQLQVYNREPDRNDNELPIVTSVAFSISGRLLFAGYSNGDCYVWDTLLAEMVLNLGTLQNSHEGRISCLGLSSDGSALCTGSWDKNLKIWAFSGHRKIV

SEQ ID NO: 7472 - protein, 123 aa, Triticum aestivum
MASVAELKEKHAAATASVNSLRERLRQRRQTLLDTDVEKYSKAQGRTAVSFNPTDLVCCRPLQGHSGKVYSLDWTPEKNWIVSASQDGRLIVWNALTSQKTHAIKLHCPWVMTCASAPNGQSV

SEQ ID NO: 7473 - protein, 118 aa, Triticum aestivum
  unsure (1)..(118): unsure at all Xaa locations
XYARGQSEVPARLLAEMVLNLGTLPNAREGRXKLPWAVIRSVCIVYSKLRLLFEDSNGDCYVWDTLLAEVVLNLGTLQNFHEGRISCLGLSSDGSALCTGSWDKNLKIWAFSGHRKIV

SEQ ID NO: 7474 - protein, 347 aa, Pneumocystis carinii
MTIKDLQDKISAACKEAEYLKEKIKKKKDELADTNLRSMAQTLDVIERLSIRVRYTLKGHLAKIYAMHWSTDQKHLVSASQDGKLIVWDAYTTRKTHAIPLRSSWVMTCAYAPSGNFVSCGGLDNVCTIYDISSKDGHAKIARELMAHTGYLSCCRFLSDEQILTSSGDMSCILWDINTGSKIQEFLDHLGDVMSLSIHPTNPNLFVSGACDAFAKIWDIRIGKSVQTFAGHESDINAVQYFPNGNAFATGSDDASCRLFDVRADRELNQYSAANIMCGITSISFSNSGRLLFAGYDDFNCNVWDVLRGNRVGILQGHDNRVSCVGVSKDGRSLATGSWDSLLKIWA

SEQ ID NO: 7475 - protein, 344 aa, Phytophthora infestans
MGDAAELKKKCESLKETIEKTREAKSDGGFQSANASSGAKAILAPPKCRRLLKGHFGKIYAMQWGGDSSSLVSASQDGKLIVWNAQTTNKIQAIPLRSSWVMTCAFEQKQRNMVACGGLDNLCSIFHLSQAQVMRATKELAAHDGYLSCCRFVDEANIVTSSGDSNCILWDVESGEVKTTFREHSGDVMSVSINPHNPSMFISGSCDSTAKVWDIRTGKTTHTFQGHESDINSVDFFPSGNALGTGSDDSSCRLFDLRAYGELNNFSNDKILCGITSVSFSKSGRFLFAGYDDYNCYCWDVLSTSGAHIYQLAGHENRVSCLGVNPAGQALCTGSWDTLLKIWA

SEQ ID NO: 7476 - protein, 317 aa, Schizosaccharomyces pombe
MILDGILVQFLKMDSGSRVNVNIQGTRVLKNKLGKIPDIDISTDGKYLLSASTNDVLLVWDLHTSNKVAFFEAPSVWIMTCAFSPSTKSIAAGGLNNFCVVYDTSVPDADPVELVGHAGFVSCCKYVDDGHLLTGSGDKTCMFWDIEQAKAISVLKGHEMDIVSLDFLPSNPNLFVTGGCDKLAKLWDLRAAYCCATFPGNTSDINSISFFPSNADFVTGAEDGIARCFDIRASAEIFQYSSPSSSPINSVLFSKSGKLLFIAKDKTCEVWDSISSKTITSLTGHENRISSLALTSDGTMLATGSWDECVRLWSSSG

SEQ ID NO: 7477 - protein, 305 aa, Schizosaccharomyces pombe
MDSGSRVNVNIQGTRVLKNKLGKIPDIDISTDGKYLLSASTNDVLLVWDLHTSNKVAFFEAPSVWIMTCAFSPSTKSIAAGGLNNFCVVYDTSVPDADPVELVGHAGFVSCCKYVDDGHLLTGSGDKTCMFWDIEQAKAISVLKGHEMDIVSLDFLPSNPNLFVTGGCDKLAKLWDLRAAYCCATFPGNTSDINSISFFPSNADFVTGAEDGIARCFDIRASAEIFQYSSPSSSPINSVLFSKSGKLLFIAKDKTCEVWDSISSKTITSLTGHENRISSLALTSDGTMLATGSWDECVRLWSSSG

SEQ ID NO: 7478 - protein, 423 aa, Saccharomyces cerevisiae
MAAHQMDSITYSNNVTQQYIQPQSLQDISAVEDEIQNKIEAARQESKQLHAQINKAKHKIQDASLFQMANKVTSLTKNKINLKPNIVLKGHNNKISDFRWSRDSKRILSASQDGFMLIWDSASGLKQNAIPLDSQWVLSCAISPSSTLVASAGLNNNCTIYRVSKENRVAQNVASIFKGHTCYISDIEFTDNAHILTASGDMTCALWDIPKAKRVREYSDHLGDVLALAIPEEPNSENSSNTFASCGSDGYTYIWDSRSPSAVQSFYVNDSDINALRFFKDGMSIVAGSDNGAINMYDLRSDCSIATFSLFRGYEERTPTPTYMAANMEYNTAQSPQTLKSTSSSYLDNQGVVSLDFSASGRLMYSCYTDIGCVVWDVLKGEIVGKLEGHGGRVTGVRSSPDGLAVCTGSWDSTMKIWSPGYQ

SEQ ID NO: 7479 - protein, 423 aa, Saccharomyces cerevisiae
MAAHQMDSITYSNNVTQQYIQPQSLQDISAVEEEIQNKIEAARQESKQLHAQINKAKHKIQDASLFQMANKVTSLTKNKINLKPNIVLKGHNNKISDFRWSRDSKRILSASQDGFMLIWDSASGLKQNAIPLDSQWVLSCAISPSSTLVASAGLNNNCTIYRVSKENRVAQNVASIFKGHTCYISDIEFTDNAHILTASGDMTCALWDIPKAKRVREYSDHLGDVLALAIPEEPNLENSSNTFASCGSDGYTYIWDSRSPSAVQSFYVNDSDINALRFFKDGMSIVAGSDNGAINMYDLRSDCSIATFSLFRGYEERTPTPTYMAANMEYNTAQSPQTLKSTSSSYLDNQGVVSLDFSASGRLMYSCYTDIGCVVWDVLKGEIVGKLEGHGGRVTGVRSSPDGLAVCTGSWDSTMKIWSPGYQ

SEQ ID NO: 7480 - protein, 647 aa, Yarrowia lipolytica
MSFPQQVIAPGQRLNELLEAIKQEFDSVTNEASVYRLHKDEFDVKVNQQTSDLGQIRQSVYELEMAHRKMKERYEEEIMRLKSELEARGGPAANPAHSQQQQQQQQQQQQQQQQNQQAQDQQARAAQQQAAQQQALAQQQAAQQQALAQQQAQAQQQAQAQAHHMGGVPPSQGQPPSLLRPSSNVFSGIMSGQPGTSSLAPPQGQPGQPQPGQPQPGQPQPYSGYVGANGYTSSPHNGPPVISAMASPNSKKRQVSTPVPGKASPQVAPQEMQQQQQQQGPPQQQQPPQQQQQSPEEMGNYLGDMDIERVPPELKKQKADWFVVYNQRAPRLLDVDIVQSLDHNSVVCCVRFSADGKYIATGCNRSAQIFDVQTGQLICRLQDDSVDREGDLYIRSVCFSPDGKYLATGAEDKQIRVWDIKSQSIRHVFTGHEQDIYSLDFSRNGRHIASGSGDRTVRMWDIESGQCTLTLSIEDGVTTVAISPDGKFVAAGSLDKSVRIWDTSTGFLVERLEAPDGHKDSVYSVAFTPNGMDLVSGSLDKTIKLWELQAPRGIQANQRGGVCVKTLCGHKDFVLSVASTLDGQWILSGSKDRGVQFWDPRTGQVQLMLQGHRNSVISVAPSPMGGLFATGSGDCKARIWRYFPVNR

SEQ ID NO: 7481 - protein, 359 aa, Cryphonectria parasitica
MDSQRPNDVSPEAMQARIQQARREAEGLKDRIKRKKDELADTSLRDVAHRSHEAIPRNQLMKTKRTLKGHLAKIYAMHWSTDRRHLVSASQDGKLIIWDAYTTNKVHAIPLRSSWVMTCAYAPSGNYVACGGLDNICSIYNLNQNRDGPTRVARELSGHAGYLSCCRFINDRSILTSSGDMTCMKWDIETGTKQIEFADHLGDVMSISLNPTNQNTFISGACDAFAKLWDIRAGKAVQTFAGHESDINAIQFFPDGHSFVTGSDDATCRLFDIRADRELNVYGSESILCGITSVATSVSGRLLFAGYDDFECKVWDVTRGEKVGSLVGHENRVSCLGVSNDGISLCTGSWDSLLKIWAY

SEQ ID NO: 7482 - protein, 358 aa, Neurospora crassa
MDSRSSDVSPEAMQARIQQARREAENLKDRIRLKKEGLADTSLYEVAQQAHEPLPKNNMMKTKKTLKGHLAKIYAMHWSTDRRHLVSASQDGKLIIWDAYTTNKVHAIPLRSSWVMTCAYAPSGNFVACGGLDNICSIYNLNSNRDGPTRVYRELSGHAGYLSCCRFINDRSILTSSGDMTCMKWDIETGTKVVEFADHLGDVMSISLNPTNQNTFVSGACDSFAKLWDIRAGKAVQTFAGHESDINAIQFFPDGHSFVTGSDDATCRLFDIRADRELNCYRSESILCGITSVATSVSGRLLFAGYDDFECKVWDLTRAEKVGSLVGHENRVSCLGVSNDGISLCTGSWDSLLKVWAY

SEQ ID NO: 7483 - protein, 349 aa, Ustilago maydis
MSAPAADLQERIAAARREADGLKEKIRAKKDQMADTSLRAMANDIEPLPRIVMKPRRTLKGHLAKIYAMHWASDKRHLVSASQDGKLIVWDAYTTNKVHAIPLRSSWVMTCAYAPSGNSVACGGLDNICSIYSLRGRDPHNIKVGRELSAHTGYLSCCRFLNDQQILTSSGDMSCILWDIDSGTRISEFNDHTGDVMSISLSSNPNVFVSGACDAVAKVWDIRSGKAVQTFAGHESDINAVQFFPNGDAFATGSDDASCRLFDLRADRELNTYTHDNILCGITSVGFSVSGRILFAGYDDYTCNVWDTLKGERVGVLAAHENRVSCLGVSADGMALCTGSWDSRLLIWA

SEQ ID NO: 7484 - protein, 359 aa, Fusarium oxysporum
MNSQGNSDVSPEAMQSRIQQARREAETLKDRIKRKKDDLADTTLRAVAQQAHEPIPKNQLMKAKRTLKGHLAKIYAMHWSTDRRHLVSASQDGKLIIWDAYTTNKVHAIPLRSSWVMTCAYAPSGNFVACGGLDNICSIYNLNQQRDGPTRVARELSGHAGYLSCCRFINDRSILTSSGDMTCMKWDIETGQKVTEFADHLGDVMSISLNPTNQNTFISGACDAFAKLWDIRAGKAVQTFAGHESDINAIQFFPDGHSFVTGSDDATCRLFDIRADRELNLYGSESILCGITSVATSVSGRLLFAGYDDFECKVWDITRGEKVGSLVGHENRVSCLGVSNDGTSLCTGSWDSLLKIWAY

SEQ ID NO: 7485 - protein, 316 aa, Crithidia fasciculata
MNYGGSLKATAGEVTSLACPQQAGSYIKVVSTSRDGTAISWKANPDRHSAEDNYGIPDHRMEGHSGFVSCVSLAHATDYALTASWDHAIRMWDLRTGQSQRKFLKHTKDVLAVAFSPDDRLIVSAGRDNVIRVWNVAGECMHEFLRDGHEDWVSSICFSPSLDLPIVVSGSWDNTIKVWNVNEGKCVHTLRGHKNYVSTVTVSPDGSLCASGGKDGSALLWDLSNGEQQFSIPVESPINQIAFSPNRFWMCVATEKSLSVYDLETKEVIADLSVGSSKPSECISVAWSADGNTLYSGHKDNQFRAWDFKNLISDAE

SEQ ID NO: 7486 - protein, 312 aa, Leishmania mexicana amazonensis
MNYEGHLKGHRGWVTSLACPQQAGSYIKVVSTSRDGTAISWKANPDRHSVDSDYGLPSHRLEGHTGFVSCVSLAHATDYALTASWDRSIRMWDLRNGQCQRKFLKHTKDVLAVAFSPDDRLIVSAGRDNVIRVWNVAGECMHEFLRDSHEDWVSSICFSPSLEHPIVVSGSWDNTIKVWNVNGGKCERTLKGHSNYVSTVTVSPDGSLCASGGKDGAALLWDLSTGEQLFKINVESPINQIAFSPNRFWMCVATERSLSVYDLESKAVIAELTPDGAKPSECISIAWSADGNTLYSGHKDNLIRVWSISDAE

SEQ ID NO: 7487 - protein, 312 aa, Leishmania braziliensis
MNYEGHLKGHRGWVTSLACPQQAGSYIKVVSTSRDGTAISWKANPDRHSVDSDYGLPSHRLEGHTGFVSCVSLAHATDYALTASWDRSIRMWDLRNGQCQRKFLKHTKDVLAVASSPDDRLIVSAGRDNVIRVWNVAGECMHEFLRDSHEDWVSSICFSPSLEHPIVVSGSWDNTIKVWNVNGGKCERTLKGHSNYVSTVTVSPDGSLCASGGKDGAALLWDLSTGEQLFKINVESPINQIAFSPNRFWMCVATERSLSVYDLESKAVIAELTPDGAKPSECISIAWSADGNTLYSGHKDNLIRVWSISDAE

SEQ ID NO: 7488 - protein, 312 aa, Leishmania donovani
MNYEGHLRGHRGWVTSLACPEQAESYIKVVSTSRDGTAIAWKANADRHSVDSDYGLPSHRLEGHTGFVSCVSLAHATDYALTASWDRSIRMWDLRNGQSQRKFLKHTKDVLAVAFSPDDRLIVSAGRDNVVRVWNVAGDCMHEFLRDGHKDWVSSICFSPSLEHPIVVSGSWDNTIKVWNVNGGKCERTLKGHSNYVSTVTVSPDGSLCASGGKDGVALLWDLSTGEQLFKINVESPINQIAFSPNRFWMCVATEKSLSVYDLESKTVIAELTPDGAKPSECISIAWSADGNTLYSGHKDNLIRVWSISDAE

SEQ ID NO: 7489 - protein, 276 aa, Leishmania donovani
MNYEGHLKGHRGWVTSLACPQQAGSYIKVVSTSRDGTAISWKANPDRHSVDSDYGLPSHRLEGHTGFVSCVSLAHATDYALTASWDRSIRMWDLRNGQCQRKFLKHTKDVLAVAFSPDDRLIVSAGRDNVIRVWNVAGECMHEFLRDGHEDWVSSICFSPSLEHPIVVSGSWDNTIKVWNVNGGKCERTLKGHSNYVSTVTVSPDGSLCASGGKDGAALLWDLSTGEQLFKINVESPINQIAFSPNRFWMCVATERSLSVYDLESKAEFQHTGGRY

SEQ ID NO: 7490 - protein, 312 aa, Leishmania major
MNYEGHLKGHRGWVTSLACPQQAGSYIKVVSTSRDGTVISWKANPDRHSVDSDYGLPNHRLEGHTGFVSCVSLAHATDYALTASWDRSIRMWDLRNGQCQRKFLKHTKDVLAVAFSPDDRLIVSAGRDNVIRVWNVAGECMHEFLRDGHEDWVSSICFSPSLEHPIVVSGSWDNTIKVWNVNGGKCERTLKGHSNYVSTVTVSPDGSLCASGGKDGAALLWDLSTGEQLFKINVESPINQIGFSPNRFWMCVATERSLSVYDLESKAVIAELTPDGAKPSECISIAWSADGNTLYSGHKDNLIRVWSISDAE

SEQ ID NO: 7491 - protein, 312 aa, Leishmania major
MNYEGHLKGHRGWVTSLACPQQAGSYIKVVLTSRDGTAISWKANPDRHSVDSDYGLPSHRLEGHTGFVSCVSLAHATDYALTASWDRSIRMWDLRNGQCQRKFLKHTKDVLAVAFSPDDRLIVSAGRDNVIRVWNVAGECMHEFLRDSHEDWVSSICFSPSLEHPIVVSGSWDNTIKVWNVNGGKCERTLKGHSNYVSTVTVSPDGSLCASGGKDGAALLWDLSTGEQLFKINVESPINQIAFSPNRFWMCVATERSLSVYDLESKAVIAELTPDGAKPSECISIAWSADGNTLYSGHKDNLIRVWSISDAE

SEQ ID NO: 7492 - protein, 312 aa, Leishmania infantum
MNYEGHLKGHRGWVTSLACPQQAGSYIKVVSTSRDGTAISWKANPDRHSVDSDYGLPSHRLEGHTGFVSCVSLAHATDYALTASWDRSIRMWDLRNGQCQRKFLKHTKDVLAVAFSPDDRLIVSAGRDNVIRVWNVAGECMHEFLRDGHEDWVSSICFSPSLEHPIVVSGSWDNTIKVWNVNGGKCERTLKGHSNYVSTVTVSPDGSLCASGGKDGAALLWDLSTGEQLFKINVESPINQIAFSPNRFWMCVATERSLSVYDLESKAVIAELTPDGAKPSECISIAWSADGNTLYSGHKDNLIRVWSISDAE

SEQ ID NO: 7493 - protein, 312 aa, Leishmania panamensis
MNYEGHLKGHRGWVTSLACPQQAGSYIKVVSTSRDGTAISWKSNPDRHSVDSDYGLPNHRLEGHTGFVSCVSLAHATDYALTASWDRSIRMWDLRNGQSQRKFLKHTKDVLAVAFSPDDRLIVSAGRDNVIRVWNVAGECMHEFLRDGHEDWVSSICFSPSLEHPIVVSGSWDNTIKVWNVNEGKCERTLKGHSNYVSTVTVSPDGSLCASGGKDGAALLWDLSTGEQLFRINVESAINQIAFSPNRFWMCVAAEKSLSVYDLESKAVIAELTPDGTKPSECISIAWSADGNRLYSGHKDNLIRVWSISDAE

SEQ ID NO: 7494 - protein, 317 aa, Trypanosoma vivax
MAVVYEGHSRGHRGWVTSLVCPQCEQTGINVVSASRDKTLISWSDNPNRHAEENDYCIPERRLEGHSAFVSDVALSNNGSFAVSASWDRSMRLWNLQNGQCQYKFLGHTRDVLSVAFSPDNRQIVSGSRDRTLRVWNVKGECMHTLNGAHSDWVSCVRFSPATDKPLIVSGGWDNLVKVWDPAGGVSRVVSELKGHTNYVTSVTVSPDGSLCASSDCDGVARLWDLAKGDSLFEMSAGAPINQICFSPNRYWMCAATDECIRIFDLENKDVIVELTPEAHGSKPPQCQSIAWSADGSTLYSGHADNVIRIWTVSLKA

SEQ ID NO: 7495 - protein, 602 aa, Plasmodium vivax
MKNASLDAEEGTGGNESGNGSGGGNQIDTVGEHEREAKMLKKSLCLSKNMFVGNDILTPFNYSLLAYATNINDRIAKIEQDEDKAIKDLKEISTLAIAGGNTTKSHEEMYKENELKLRKQNLRENVIKKLTSIKVNINMKELDEYSSVKKLYLKKIEKDDSQRGKERKKKKKKSSIISSIVNDDTVTHDDIGHDLNYMNESLITNQMGEAGKNNNEKNSILPFINQPRNEVHSGPIIKKSDDSVLSSDALKNIKTLDIYKKIKKPKWHFPYKLYRVILGHSGWVNCVDVDISNEWFATGANDRLIKIWDLATCKLKLTLTGHINSIRDIKISKKNPYLFSCGEDNRVKCWDLEYNKVIRDYHGHLSGVYCLSLHPSLDILMSGGRDAVVRVWDIRTKSSIFVLSGHTGTVMSLCSQSVEPQVVSGSQDKMIRLWDLNNGKCRIALTHHKKSIRSLSIHPFEYSFCSCGTDNVKVWCGADAEFDRNITGFNSIINCSLIKQDSYFSDSSILILGSNNGQLHFYDWSSGYKFDTLSNKVVPGTVECENSTLAMAFDKSESRLITTHGDKSIKVAQKKGEIWRENEDATPENFPIKWNPYESFKF

SEQ ID NO: 7496 - protein, 556 aa, Encephalitozoon cuniculi
MSENIRESISAKTLSKDQMETSYVSLKTWIEDSLDLFKNDLLPLLYPLFIHIYFDLIQQNKTDEAKEFFEKYRGDHYNKSEEIKQFESIYTVQHIHENNFAYTFKNSKYHLSMGRYAFDLLINFLEERNLTYILKILNQHLDIKVYVGPKSEERPQGIETSVVDAEIDLTTFLVSRECEDAILGDEQYRYDHLETYVLQLRKQREMKPKDSVYKPNASQIHAEIEKLKDLCKRVAVNKNNLPSICCYTIHNTYEGLTAAEISNDLKLMACGFKDSYVEVYSLTNESLKKLKSSSELAKSDIKTLNEEKFEEVGSSYKLVGHSGPVYGLKFFSSNKFLVSSSQDCTVCLWSLDLLCLLAVYKAHAFPVWCVDVAPNDYFFASGAGDRQAIVWSVMTSKPERLIISSLSDVTAVKFHPNSSYLFTGSSDHRVRMHDISTASVVRIFCGHTDTVTCMDVSHCGKFLASGSKDRTVLLWDIQSSKLLGKYVGHENTVFSVSFCFYGSVLASCGADNSVRLWDRTDHKGGCLGTYYTKNTPLLCVKFGYRNIISCTGPFIS

SEQ ID NO: 7497 - protein, 371 aa, Geodia cydonium
MAEENGSLSPESEAGSEEESLLKLKKDARDLRENLRLRRSRNVGPEAFATLQKEEDVPITSPVINLKVRKTLKGHRGRILHFDWSPDKYHVVTAGQDGQLFIWNGMTAQKEMVIQSSKWVCACSFSPSTTLLACAGTSCDCQVFQLDVGRVSTDSQLPRLTVPKKTLSAHQKYITNCLFFGSDQQILTAGADKRCAMWDMEYHEPVKTFEGHTSDILGLALNPKDPFTVFATASCDRSACIWDSRSGQCVMRFEGHEGDVNSVRFFPTGEAIGTACNDGTIRLFDLRADQEIKFYTKTGIIFGCSALDFSKSGRILFGGYNDYAIRVWDVIKGTHMAMWLNHTDRVSNVALSPDGTALGSSSWDGTLKIWA

SEQ ID NO: 7498 - protein, 340 aa, Caenorhabditis elegans
MSELDQLRQEAEQLKSQIREARKSANDTTLATVASNLEPIGRIQMRTRRTLRGHLAKIYAMHWASDSRNLVSASQDGKLIVWDSYTTNKVHAIPLRSSWVMTCAYAPSGSFVACGGLDNICSIYSLKTREGNVRVSRELPGHTGYLSCCRFLDDNQIVTSSGDMTCALWDIETGQQCTAFTGHTGDVMSLSLSPDFRTFISGACDASAKLWDIRDGMCKQTFPGHESDINAVAFFPSGNRFATGSDDATCRLFDIRADQELAMYSHDNIICGITSVAFSKSGRLLFAGYDDFNCNVWDSMRQERAGVLAGHDNRVSCLGVTEDGMAVCTGSWDSFLKIWN

SEQ ID NO: 7499 - protein, 340 aa, Caenorhabditis elegans
MSELDQLRQEAEQLKSQIREARKSANDTTLATVASNLEPIGRIQMRTRRTLRGHLAKIYAMHWASDSRNLVSASQDGKLIVWDSYTTNKVHAIPLRSSWVMTCAYAPSGSFVACGGLDNICSIYSLKTREGNVRVSRELPGHTGYLSCCRFLDDNQIVTSSGDMTCALWDIETGQQCTAFTGHTGDVMSLSLSPDFRTFISGACDASAKLWDIRDGMCKQTFPGHESDINAVAFFPSGNAFATGSDDATCRLFDIRADQELAMYSHDNIICGITSVAFSKSGRLLFAGYDDFNCNVWDSMRQERAGVLAGHDNRVSCLGVTEDGMAVCTGSWDSFLKIWN

SEQ ID NO: 7500 - protein, 356 aa, Caenorhabditis elegans
MPENSQPTTTEKGSEYLEQLANEAEELRKKLDQERHKLNDIPIQQAAERLDVMGALGVKQRRILKGHVGKVLCMDWSLDKRHIVSSSQDGKVIVWDGFTTNKEHALTMPTTWVMACAFSPSSQMIACGGLDNKCSVVPLSFEDDIIQKKRQVATHTSYMSCCTFLRSDNLILTGSGDSTCAIWDVESGQLIQNFHGHTGDVFAIDVPKCDTGNTFISAGADKHSLVWDIRSGQCVQSFEGHEADINTVRFHPNGDAFATGSDDATCRLFDLRADRQVCVYEKESILFPVNGVDFSLSGRILFAGYGDYRVGVWDSLKCARHSVLYGHENRISCLRTSPDGTAVCSASWDCTIRIWA

SEQ ID NO: 7501 - protein, 480 aa, Brugia malayi
MEQIAVPGSEQGTLSESLTTPQHFEAPETPQQKALLNLVFRSMKRTHDLFYHDYGTLPELNSEADSLWRAVKLKSEYGSVMEEVSEAKRKKEEELLKLPINSSVVGSSGNAFSEKDSSDLTTSSRSDDNTMRAVLPARAPVMIKPKWHAPWKLYRVISGHTGWVRCVDVEPGNEWFATGGADRIVKVCNNFAPGKLRLSLTGHVSAVRCCKVSRRHPFLFTGGEDKQVITYRDFQVKCWDLEYNKVIRHYHGHLSAVQDLTIHPTIDILITCARDATARVWDMRTKAQVHCLSGHTNTVATVISQEVDPQVITGSHDSTIRLWDLAAGRSICTLTHHKKSIRALTLHPSLFMFASGSADNIKEWKCPEGIFIQNLSGHNAIINSLACNEDGVLISGGDNGSLNFWDWKSGFCFQREQTKAQPGSIDSEAGIFAVTYDQSGSRLITAEADKTIKMYKEDENATEDTHPILWRPEILRRKAY

SEQ ID NO: 7502 - protein, 341 aa, Lymnaea stagnalis
MSNDLEALRQETEQLKNQIREARKAAGDTTLAQACSGVEAVGRIQMRTRRTLRGHLAKIYAMHWASDSRNLVSASQDGKLIVWDGYTTNKVHAIPLRSSWVMTCAYAPSGNFVACGGLDNICSIYSLKTREGNVRVSRELPGHTGYLSCCRFIDDNSIVTSSGDMSCALWDIETGQQTTSFTGHTGDVMSLSTSPDFRTFVSGACDASAKLWDVRDGMCKQTFSGHESDINAITYFPNGHAFATGSDDATCRLFDIRADQEIGMYSHDNIICGITSVAFSKSGRLLLGRYDDFNCNVWDVLKQETHGVLAGHDNRVSCLGVTEDGSAVATGSWDSFLKIWN

SEQ ID NO: 7503 - protein, 341 aa, Loligo forbesi
MTSELEALRQETEQLKNQIREARKAAADTTLAMATANVEPVGRIQMRTRRTLRGHLAKIYAMHWASDSRNLVSASQDGKLIVWDGYTTNKVHAIPLRSSWVMTCAYAPSGNYVACGGLDNICSIYSLKTREGNVRVSRELPGHTGYLSCCRFIDDNQIVTSSGDMTCALWNIETGNQITSFGGHTGDVMSLSLAPDMRTFVSGACDASAKLFDIRDGICKQTFTGHESDINAITYFPNGFAFATGSDDATCRLFDIRADQEIGMYSHDNIICGITSVAFSKSGRLLLGGYDDFNCNVWDVLKQERAGVLAGHDNRVSCLGVTEDGMAVATGSWDSFLKIWN

SEQ ID NO: 7504 - protein, 340 aa, Homarus americanus
MNDLDSLRQEAERLKNTIRDARKNALDTTLVQATAGMDPIGRIQMRTRRTLRGHLAKIYAMHWGSDSRNLVSASQDGKLIVWDSYTTNKVHAIPLRSSWVMTCAYAPSGSYVACGGLDNICSIYSLKTREGNVRVSRELPGHTGYLSCCRFVDDNQIVTSSGDMTCALWDIETGQQCTQFTGHTGDVMSLSLSPNMRTFTSGACDASAKLWDIRDGMCRQTFPGHESDINAVTFFPNGHAFATGSDDATCRLFDIRADQELAMYSHDNIICGITSVAFSKSGKLLLAGYDDFNCNVWDSMRTERAGVLAGHDNRVSCLGVTEDGMAVATGSWDSFLKIWN

SEQ ID NO: 7505 - protein, 186 aa, Homarus americanus
  unsure (1)..(186): unsure at all Xaa locations
XGKLMVWDAMTTNKLFAIPLRSSWVMTCAYSPTGNYVACGGVDNICSVYSLRAKEDPIKVTRELNAHTGYLSCCRFINESEIITSSGDMSLILWDIETVQQCTQFADHTGDVMSLALSPENRATFVSGACDATAKVWDKRAKGKSQQTFTGHDSDINAVTYFPDGNAFATGSDDASGRLFDLPADQ

SEQ ID NO: 7506 - protein, 340 aa, Drosophila melanogaster
MNELDSLRQEAESLKNAIRDARKAACDTSLLQAATSLEPIGRIQMRTRRTLRGHLAKIYAMHWGNDSRNLVSASQDGKLIVWDSHTTNKVHAIPLRSSWVMTCAYAPSGSYVACGGLDNMCSIYNLKTREGNVRVSRELPGHGGYLSCCRFLDDNQIVTSSGDMSCGLWDIETGLQVTSFLGHTGDVMALSLAPQCKTFVSGACDASAKLWDIREGVCKQTFPGHESDINAVTFFPNGQAFATGSDDATCRLFDIRADQELAMYSHDNIICGITSVAFSKSGRLLLAGYDDFNCNVWDTMKAERSGILAGHDNRVSCLGVTENGMAVATGSWDSFLRVWN

SEQ ID NO: 7507 - protein, 358 aa, Drosophila melanogaster
MSEAAVPASNANANATEKMASLVREAENLKTKLEEERQKLNDVNLSNIAERLEQIAYVNIKPRKVLKGHQAKVLCTDWSPDKRHIISSSQDGRLIIWDAFTTNKEHAVTMPTTWIMACAYAPSGNFVACGGLDNKVTVYPITSDEEMAAKKRTVGTHTSYMSCCIYPNSDQQILTGSGDSTCALWDVESGQLLQSFHGHSGDVMAIDLAPNETGNTFVSGSCDRMAFIWDMRSGHVVQSFEGHQSDVNSVKFHPCGDAIATGSDDSSCRLYDMRADREVAVFAKESIIFGVNSVDFSVSGRLLFAGYNDYTVNLWDTLKSERVCLLYGHENKVSCVQVSPDGTALSTGSWDYTIRVWA

SEQ ID NO: 7508 - protein, 346 aa, Drosophila melanogaster
MPKIDPETQKLYDEINGMIQKFKDDQKSKADCTLADKCGDMGDVPKIRFSSKKILKGHINKVNSVHFAGDSRHCVTGSLDGKLIIWDTWTANKVQIIPLRSAWVMTVAFSPSGNFVACGGMDNQCTVYDVNNRDASGVAKMVKELMGYEGFLSSCRFLDDGHLITGSGDMKICHWDLEKGVKTMDFNGHAGDIAGLSLSPDMKTYITGSVDKTAKLWDVREEGHKQMFFGHDMDVSSVCYHPSGFGFASASEDQTARMYDLRADQQIAQYEPPQKNTGFTSCALSTSGRYLMCGGIEGNVHSWDTMKQRHTGTLSGHENRITCISLCPNGMCLASTSWDQQVRLWL

SEQ ID NO: 7509 - protein, 346 aa, Drosophila melanogaster [sequence omitted]

SEQ ID NO: 7510 - protein, 346 aa, Drosophila melanogaster
MPKIDPETQKLYDEINGMIQKFKDDQKSKADCTLADKCGDMGDVPKIRFSSKKILKGHINKVNSVHFAGDSRHCVTGSLDGKLIIWDTWTANKVQIIPLRSAWVMTVAFSPSGNFEACGGMDNQCTVYDVNNRDAPGVAKMVKELMGYEGFLSSCRFLDDGHLITGSGDMKICHWDLEKGVKTMDFNGHAGDIAGLSLSPDMKTYITGSVDKTAKLWDVREEGHKQMFFGHDMDVSSVCYHPSGFGFASCSEDQTARMYDLRADQQIAQYEPPQKNTGFTSCALSTSGRYLMCGGIEGNVHSWDTMKQRHTGTLSGHENRITCISLCPNGMCLASTSWDQQVRLWL

SEQ ID NO: 7511 - protein, 615 aa, Plasmodium yoelii yoelii
MRKFFGLEKSKAKDDDKINEVEKNEEKEHEDEKSEEKEHEDETEYGGEEDLKKHICLSKNMFMGNDILTPFNYNLLAYDQNINNRIIINDEDDDYENSNKIKDLKAISALAIPDEENTKSYESRYKENELKARRSNLRENVLKKLTSIKMNINIREMDEYSSVKNLYIKKMETSDIQKGNEKNMKKKKKKKSSIINSIINDDPITHEDISLNMNDMNVNPLSNYKSENGNIMDDKNSSILPFNNNQHKNEIFNEPIIKKSDESILSSNALSNIKTLDIYKKIKKPKWHYPYKLYRVILGHSGWVNCVDVDISNEWFATGANDRLIKIWDLATCKLKLTLTGHINSVRDIKISKRNPYLFSCGEDNRVKCWDLEYNKVIRDYHGHLSGVYCLSLHPSLDILMSGGRDAVVRVWDIRTKNSIFVLSGHTGTIMSLSSQSVEPQVISGSQDKMIRLWDLNNGKCRIALTHHKKSIRSLSIHPFEYSFCSCAPDNVKVWCGADAEFDRNITGFNSIINCSLIKQDSYFSDSSILILGSNNGQLHFYDWSSGYKYDTLSNKVVPGTVDCENSTLAMAFDKSESRLITTHGDKSIKIWKENEDATPENFPIKWNPYDNFKF

SEQ ID NO: 7512 - protein, 499 aa, Plasmodium yoelii yoelii
MSILCTISGQTPEEPVVSKTGYIFEKRLIEKHIKNYGICPISGEILTLEDLYPIKNEKYVKPRPITATSIPGLLSIFQTEWDSMISEMFNLRTHVNDVRNQLSHSLYQYDAATRVIAKLLKEKNNYQEEINNLRNQILQLKNGNDILNDLEIGINEDLLNEMQNIAKELLMNRKKRKVENVNSPNEWKKITATNEFNIHSSIIPGVTCLTIDVNKLKYNYDDDHKNHNFFSGGKDGNIYYVSLNNNKIISKLQGHLKKVNSIISHPSNSICISGSNDKTIRIWKGDPDTNEYVTSHIITKHKDKINSLSLHPLENYFISSSNDSIWILHDMETGKTIKTCKSSPSPFKNLSIHPDGMMFGIGSEDSNIYIYDIKSQEYKASLTGHTKSIESISFSENGYYLASISKDNTLKLWDLRKATTFQTIELENTPKHITFDYSGKYLSLSVGNDIQIFNFETKNQASLITTLSSHTDIVTQTCFGSRTSYLLSSSMDKTVKLWS

SEQ ID NO: 7513 - protein, 346 aa, Calliphora vicina
MPKVDPETQKLYDEINGLIKKFQDDHKAKADCTMQEKCGDMSDIPKIRLSSKKILKGHINKVNSVHFAGDSRHCVTGSLDGKLIIWDTWTANKVQVIPLRSAWVMTVAFSPSGNFVACGGMDNQCTVYDVNNRDASGVAKMTRELLGYEGFLSSCRFLDDTHLITGSGDMKICHWDLEKGVKTMDFNGHAGDIAGLSLSPDMNTYITGSVDKTAKLWDVREETHKQMFFGHEMDVNSVCYHPSGNGFASASEDQTARLYDIRADQQIALYEPPQKNTGFTSCALSTSGRYLLCSGIEGNIHSFDTMKVCHNGMLQGHENRITCISLSPNGMCLASTSWDQQVRLWL

SEQ ID NO: 7514 - protein, 285 aa, Halocynthia roretzi
AKIYAMHWGTDSRNLVSASQDGKLIVWDSYTTNKVHAIPLRSSWVMTCAYAPSGSFVACGGLDNICSIYSLKTREGNVKVSRELPGHTGYLSCCRFLDDSRIVTSSGDMSCALWIIETGQQTTAYIGHTGDVMSLSVSEDKNTFISGACDASAKLWDIRDGMCCQTFIGHESDINAVSFFPNNMAFGTGSDDATCRLFDIRADQELIVYQHDNIICGITSVSFSKSGRLLLAGYDDFNCNVWDSMKGDRAGVLAGHDNRVSCLGITSDGMAVATGSWDSFLKVWN

SEQ ID NO: 7515 - protein, 340 aa, Danio rerio
MSELDQLRQEAEQLKNQIRDARKACADATLSQITANIDPVGRIQMRTRRTLRGHLAKIYAMHWGTDSRLLVSASQDGKLIIWDSYTTNKVHAIPLRSSWVMTCAYAPSGNYVACGGLDNICSIYSLKTREGNVRVSRELAGHTGYLSCCRFLDDNQIVTSSGDTTCALWDIETGQQTTTFAGHTGDVMSLSLAPDTRLFVSGACDASAKLWDIREGMCRQTFTGHESDINAICFFPNGNAFATGSDDATCRLFDLRADQELMVYSHDNIICGITSVAFSKSGRLLLAGYDDFNCNVWDTLKADRAGVLAGHDNRVSCLGVTDDGMAVATGSWDSFLKIWN

SEQ ID NO: 7516 - protein, 340 aa, Oryzias latipes
MSELDQLRQEAEQLKNQIRDARKACADATLSQITANIDPVGRIQMRTRRTLRGHLAKIYAMHWGTDSRLLVSASQDGKLIIWDSYTTNKVHAIPLRSSWVMTCAYAPSGNYVACGGLDNICSIYNLKTREGNVRVSRELAGHTGYLSCCRFLDDNQIVTSSGDTSCALWDIETGQQTTTFAGHTGDVMSLSLAPDTRLFVSGACDASAKLWDIREGMCRQTFTGHESDINAICFFPNGNAFATGSDDATCRLFDLRADQELMIYSHDNIICGITSVAFSKSGRLLLAGYDDFNCNVWDTLKADRAGVLAGHDNRVSCLGVTDDGMAVATGSWDSFLKIWN

SEQ ID NO: 7517 - protein, 342 aa, Oryzias latipes
MAAEKAEMDALKKECDALRTQIEAARKAANDGSMSAAAGGVASVGRVQLKLRKNLKGHLAKIYAMHWSADSRSMVSASQDGKLLVWDTFTGNKLVAVPLKSAWVMSVDFAPSGNLVASGGLDNICTVYNIKAASPKTLRELDAHTGYLSCCRFLSDSEILTASGDTTCCLWDLETGKQKIIFTNHIGDCMSLALSPDMNYFISGACDSLAKLWDVREGACKQTFSGHTSDINAIAFFPSGNAVITGSDDCSCKMYDLRADQEVLDYTDSSLNAGVTSLALSNSGRLIFAGYDDFNCHIWDSLKGEKVGVLSGHDNRVSCTGVPEDGMGVCTGSWDSFLKLWN

SEQ ID NO: 7518 - protein, 340 aa, Ambystoma tigrinum
MSELEQLRQEAEQLKNQIRDARKVCADATLAQITANIDPVGRIQMRTRRTLRGHLAKIYAMHWGTDSRLLVSASQDGKLIIWDSYTTNKVHAIPLRSSWVMTCAYAPSGNYVACGGLDNICSIYNLKTREGNVRVSRELAGHTGYLSCCRFIDDNQIITSSGDTTCALWDIETGQQTTTFAGHTGDVMSLSLAPDSRCFVSGACDASAKLWDVREGMCRQTFTGHESDINAICFFPNGNAFATGSDDATCRLFDLRADQELMVYSHDNIICGITSVAFSKSGRLLLAGYDDFNCNVWDTLKADRAGVLAGHDNRVSCLGVTDDGMAVATGSWDSFLKIWN

SEQ ID NO: 7519 - protein, 340 aa, Ambystoma tigrinum
MGGMEQLRQEAEQLKKQIAEARKVCADTTLAQITAGMEVVGRIQMRTRRTLRGHLAKIYAMHWSNDSRLLVSASQDGKLIVWDTYSTNKVHAIPLRSSWVMTCSYAPSGNFVACGGLDNMCSIYNLKTREGNVKVSRELAAHTGYLSCCRFLDDNQIVTSSGDTTCALWDIETGTQKTVFMGHTGDCMSLAVSPDFRIFVSGACDATAKLWDIREGTCRQTFTGHESDINAICFFPNGEAVCTGSDDATCRLFDLRADQELTVYSHESIICGITSVAFSRSGRLLLAGYDDFNCNMWDSMKGERVGVLSGHDNRVSCLGVTTDGMAAATGSWDSFLKIWN

SEQ ID NO: 7520 - protein, 353 aa, Ambystoma tigrinum
MATEGLHENETLTSLKNEADSLKGKLEEERAKLHDVELHQVADRVESLGQFVMKTRRTLKGHGNKVLCMDWCKDKRRIVSSSQDGKVIVWDAFTTNKEHAVTMPCTWVMACAYAPSGCAIACGGLDNKCSVYPLTFDKNENMASKKKSVAMHTNYLSACSFTNSDMQILTASGDGTCALWDVESGQLLQSFHGHGADVLCLDLAPSETGNTFVSGGCDKKAMVWDMRSGQCIQSFETHESDINSVRYYPSGDAFASGSDDATCRLFDLRADREVAIYTKESIIFGASSVDFSLSGRLLFAGYNDYTINVWDVLKGTRVSILFGHENRVSTLRVSPDGTAFCSGSWDHTLRIWA

SEQ ID NO: 7521 - protein, 340 aa, Xenopus laevis
MSELDQLRQEAEQLKNQIRDARKACADATLAQITANIDPVGRIQMRTRRTLRGHLAKIYAMHWGTDSRLLVSASQDGKLIIWDSYTTNKVHAIPLRSSWVMTCAYAPSGNYVACGGLDNICPIYNLKTREGNVRVSRELAGHTGYLSCCRFLDDNQIITSSGDTTCALWDIETGQQTTTFTGHTGDVMSLSLAPDSRCFVSGACDASAKLWDVREGMCRQTFTGHESDINAICFFPNGNAFATGSDDATCRLFDLRADQELMVYSHDNIICGITSVAFSKSGRLLLAGYDDFNCNVWDTLKADRAGVLAGHDNRVSCLGVTDDGMAVATGSWDSFLKIWN

SEQ ID NO: 7522 - protein, 410 aa, Gallus gallus
MVLSQRQRDELNRAIADYLRSNGYEEAYSVFKKEAELDVNEELDKKYAGLLEKKWTSVIRLQKKVMELESKLNEAKEEFTSGGPLGQKRDPKEWIPRPPEKYALSGHRSPVTRVIFHPVFSVMVSASEDATIKVWDYETGDFERTLKGHTDSVQDISFDHTGKLLASCSADMTIKLWDFQGFECIRTMHGHDHNVSSVAIMPNGDHIVSASRDKTIKMWEVQTGYCVKTFTGHREWVRMVRPNQDGTLIASCSNDQTVRVWVVATKECKAELREHEHVVECISWAPESSYSTISEATGSETKKSGKPGPFLLSGSRDKTIKMWDISTGMCLMTLVGHDNWVRGVLFHSGGKFILSCADDKTLRVWDFKNKRCMKTLNAHEHFVTSLDFHKTAPYVVTGSVDQTVKVWECR

SEQ ID NO: 7523 - protein, 309 aa, Macaca fascicularis
MITNNIDPVGRIQMRTRRTLRGHLAKIYAMHWGTDSRLLVSASQDGKLIIWDSYTANKVHAIPLRSSWVMTCAYAPSGNYVACGGLDNICSIYNLKTREGNVRVSRELAGHTGYLSCCRFLDDNQIVTSSGDTTCALWDIETGQQTTTFTGHTGDVMSLSLAPDTRLFVSGACDASAKLWDVREGMCRQTFTGHESDINAICFFPNGNAFATGSDDATCRLFDLRADQELMTYSHDNIICGITSVSFSKSGRLLLAGYDDFNCNVWDALKADRAGVLAGHDNRVSCLGVTDDGMAVATGSWDSFLKIWN

SEQ ID NO: 7524 - protein, 296 aa, Macaca fascicularis
MRTRRTLRGHLAKIYAMHWGTDSRLLVSASQDGKLIIWDSYTTNKVHAIPLRSSWVMTCAYAPSGNYVACGGLDNICSIYNLKTREGNVRVSRELAGHTGYLSCCRFLDDNQIVTSSGDTTCALWDIETGQQTTTFTGHTGDVMSLSLAPDTRLFVSGACDASAKLWDVREGMCRQTFTGHESDINAICFFPNGNAFATGSDDATCRLFDLRADQELMTYSHDNIICGITSVSFSKSGRLLLAGYDDFNCNVWDALKADRAGVLAGHDNRVSCLGVTDDGMAVATGSWDSFLKIWN

SEQ ID NO: 7525 - protein, 276 aa, Macaca fascicularis
MITNNIDPVGRIQMRTRRTLRGHLAKIYAMHWGTDSRLLVSASQDGKLIIWDSYTTNKVHAIPLRSSWVMTCAYAPSGNYVACGGLDNICSIYNLKTREGNVRVSRELAGHTGYLSCCRFLDDNQIVTSSGDTTCALWDIETGQQTTTFTGHTGDVMSLSLAPDTRLFVSGACDASAKLWDVREGMCRQTFTGHESDINAICFFPNGNAFATGSDDATCRLFDLRADQELMTYSHDNIICGITSVSFSKSGRLLLAGYDDFNCNVWDALKADTRKK

SEQ ID NO: 7526 - protein, 340 aa, Homo sapiens [sequence omitted]

SEQ ID NO: 7527 - protein, 340 aa, Homo sapiens [sequence omitted]

SEQ ID NO: 7528 - protein, 340 aa, Homo sapiens
  unsure (1)..(340): unsure at all Xaa locations
MSELEQLRQEAEQLRNQIRDARKACGDSTLTQITAGLDPVGRIQMRTRRTLRGHLAKIYAMHWGTDSRLLVSASQDGKLIIWDSYTTNKVHAIPLRSSWVMTCAYAXSGNFVACGGLDNICSIYSLKTREGNVRVSRELPGHTGYLSCCRFLDDNQIITSSGDTTCALWDIETGQQTVGFAGHSGDVMSLSLAPNGRTFVSGACDASIKLWDVRDSMCRQTFIGHESDINAVAFFPNGYAFTTGSDDATCRLFDLRADQELLMYSHDNIICGITSVAFSRSGRLLLAGYDDFNCNIWDAMKGDRAGVLAGHDNRVSCLGVTDDGMAVATGSWDSFLKIWN

SEQ ID NO: 7529 - protein, 340 aa, Homo sapiens
MSELEQLRQEAEQLRNQIQDARKACNDATLVQITSNMDSVGRIQMRTRRTLRGHLAKIYAMHWGYDSRLLVSASQDGKLIIWDSYTTNKMHAIPLRSSWVMTCAYAPSGNYVACGGLDNICSIYNLKTREGNVRVSRELPGHTGYLSCCRFLDDSQIVTSSGDTTCALWDIETAQQTTTFTGHSGDVMSLSLSPDMRTFVSGACDASSKLWDIRDGMCRQSFTGHVSDINAVSFFPNGYAFATGSDDATCRLFDLRADQELLLYSHDNIICGITSVAFSKSGRLLLAGYDDFNCNVWDTLKGDRAGVLAGHDNRVSCLGVTDDGMAVATGSWDSFLRIWN

SEQ ID NO: 7530 - protein, 353 aa, Homo sapiens
MATEGLHENETLASLKSEAESLKGKLEEERAKLHDVELHQVAERVEALGQFVMKTRRTLKGHGNKVLCMDWCKDKRRIVSSSQDGKVIVWDSFTTNKEHAVTMPCTWVMACAYAPSGCAIACGGLDNKCSVYPLTFDKNENMAAKKKSVAMHTNYLSACSFTNSDMQILTASGDGTCALWDVESGQLLQSFHGHGADVLCLDLAPSETGNTFVSGGCDKKAMVWDMRSGQCVQAFETHESDINSVRYYPSGDAFASGSDDATCRLYDLRADREVAIYSKESIIFGASSVDFSLSGRLLFAGYNDYTINVWDVLKGSRVSILFGHENRVSTLRVSPDGTAFCSGSWDHTLRVWA

SEQ ID NO: 7531 - protein, 395 aa, Homo sapiens
MCDQTFLVNVFGSCDKCFKQRALRPVFKKSQQLSYCSTCAEIMATEGLHENETLASLKSEAESLKGKLEEERAKLHDVELHQVAERVEALGQFVMKTRRTLKGHGNKVLCMDWCKDKRRIVSSSQDGKVIVWDSFTTNKEHAVTMPCTWVMACAYAPSGCAIACGGLDNKCSVYPLTFDKNENMAAKKKSVAMHTNYLSACSFTNSDMQILTASGDGTCALWDVESGQLLQSFHGHGADVLCLDLAPSETGNTFVSGGCDKKAMVWDMRSGQCVQAFETHESDINSVRYYPSGDAFASGSDDATCRLYDLRADREVAIYSKESIIFGASSVDFSLSGRLLFAGYNDYTINVWDVLKGSRVSILFGHENRVSTLRVSPDGTAFCSGSWDHTLRVWA

SEQ ID NO: 7532 - protein, 247 aa, Homo sapiens
PLRSSWVMTCAYAPSGNYVACGGLDNICSIYNLKTREGNVRVSRELAGHTGYLSCCRFLDDNQIVTSSGDTTCALWDIETGQQTTTFTGHTGDVMSLSLAPDTRLFVSGACDASAKLWDVREGMCRQTFTGHESDINAICFFPNGNAFATGSDDATCRLFDLRADQELMTYSHDNIICGITSVSFSKSGRLLLAGYDDFNCNVWDALKADRAGVLAGHDNRVSCLGVTDDGMAVATGSWDSFLKIWN

SEQ ID NO: 7533 - protein, 297 aa, Homo sapiens
MGEMEQLRQEAEQLKKQIADARKACADVTLAELVSGLEVVGRVQMRTRRTLRGHLAKIYAMHWATDSKLLVSASQDGKLIVWDSYTTNKVHAIPLRSSWVMTCAYAPSGNFVACGGLDNMCSIYNLKSREGNVKVSRELSAHTGYLSCCRFLDDNNIVTSSGDTTCALWDIETGQQKTVFVGHTGDCMSLAVSPDFNLFISGACDASAKLWDVREGTCRQTFTGHESDINAICFFSLSGRLLFAGYDDFNCNVWDSMKSERVGILSGHDNRVSCLGVTADGMAVATGSWDSFLKIWN

SEQ ID NO: 7534 - protein, 207 aa, Homo sapiens
RVSRELAGHTGYLSCCRFLDDNQIVTSSGDTTCALWDIETGQQTTTFTGHTGDVMSLSLAPDTRLFVSGACDASAKLWDVREGMCRQTFTGHESDINAICFFPNGNAFATGSDDATCRLFDLRADQELMTYSHDNIICGITSVSFSKSGRLLLAGYDDFNCNVWDALKADRAGVLAGHDNRVSCLGVTDDGMAVATGSWDSFLKIWN

SEQ ID NO: 7535 - protein, 283 aa, Homo sapiens
MATEGLHENETLASLKSEAESLKGKLEEERAKLHDVELHQVAERVEALGQFVMKTRRTLKGHGNKVLCMDWCKDKRRIVSSSQDGKVIVWDSFTTNKILTASGDGTCALWDVESGQLLQSFHGHGADVLCLDLAPSETGNTFVSGGCDKKAMVWDMRSGQCVQAFETHESDINSVRYYPSGDAFASGSDDATCRLYDLRADREVAIYSKESIIFGASSVDFSLSGRLLFAGYNDYTINVWDVLKGSRVSILFGHENRVSTLRVSPDGTAFCSGSWDHTLRVWA

SEQ ID NO: 7536 - protein, 340 aa, Canis familiaris
MGEMEQLRQEAEQLKKQIADARKACADTTLAELVSGLEVVGRVQMRTRRTLRGHLAKIYAMHWATDSKLLVSASQDGKLIVWDTYTTNKVHAIPLRSSWVMTCAYAPSGNFVACGGLDNMCSIYSLKSREGNVKVSRELSAHTGYLSCCRFLDDNNIVTSSGDTTCALWDIETGQQKTVFVGHTGDCMSLAVSPDFKLFISGACDASAKLWDVREGTCRQTFTGHESDINAICFFPNGEAICTGSDDASCRLFDLRADQELTAYSDESIICGITSVAFSLSGRLLFAGYDDFNCNIWDSMKGERVGILSGHDNRVSCLGVTADGMAVATGSWDSFLKVWN

SEQ ID NO: 7537 - protein, 410 aa, Sus scrofa
MVLSQRQRDELNRAIADYLRSNGYEEAYSVFKKEAELDMNEELDKKYAGLLEKKWTSVIRLQKKVMELESKLNEAKEEFTSGGPLGQKRDPKEWIPRPPEKYALSGHRSPVTRVIFHPVFSVMVSASEDATIKVWDYETGDFERTLKGHTDSVQDISFDHSGKLLASCSADMTIKLWDFQGFECIRTMHGHDHNVSSVAIMPNGDHIVSAARDKTIKMWEVQTGYCVKTFTGHREWVRMVRPNQDGTLIASCSNDQTVRVWVVATKECKAELREHEHVVECISWAPESSYSSISEATGSETKKSGKPGPFLLSGSRDKTIKMWDVSTGMCLMTLVGHDNWVRGVLFHSGGKFILSCADDKTLRVWDYKNKRCMKTLNAHEHFVTSLDFHKTAPYVVTGSVDQTVKVWECR

SEQ ID NO: 7538 - protein, 1073 aa, Cytophaga hutchinsonii
MKQRTFVLLFFILTLSSYAQTLKLETVIQKGHSASVKAVAVSPDGKILATGSRDKSVKLWDQQSGMEIRSLIGHDHTVNGLAFSPDGKLLATSSADGTARVWDILTGKEIFTSPKNSKYITDVAFNPDGKSFAYAGYPDSASIYAIPSGKLIKRLEVNADQGSGYGISLKYSNDGKWLAIGEDNKTANVYRTSDWHLAYTFKPAEGWCGGCGTYVEFSRDNKSLFKIAHNDKLSQYDLQTGSLIKTFGEPVDYLRGITLTKDGQHVIAASDSMLYNYTITSKTVVAYKLYLSETVNDIALSLDEKEILVASDNMTAWALEAASGKVIRTYQGALQEQDKGGLNYNADNYWEYNIARYLRLKNELLLTKDDNNFITGKTGVNAIQWNISTGAPNKLYEGHTKAVISMDQSADGSILATADGAGEVFLWNTKTGALINRIKPHTEPIFDVSLSRDGKYVATGSWDASIEVYDVQTGEVSSDMYLKENSCYSISFTPNGLYLLCGRLDKSLELREPDSKKVVLSFIGHTDVVSSIAFGADPNKALTASWDGTARIWDVTTGMMLQKFKGARGMLHSAIYSTDSKKIITGGDDRIIRIWDIQSGQVLKTLNGHQSEITSLSLSKDGKMLVSYSTDGVVKFWNLESGLEFYEHVHISSREWMARTPQGYFSATEQARADIHFVKGMDVYAPDQFFEYYRPDLIQQIFLNRGSSPTGMQNVENSLQLSPPPLIKLACIPNADGLQATLNIKVMDEGGGLSEIRLAHNGKNMAVALDPKKVVEGKGNSYIYSVPVSLVRGTNQFSGIAVSKGKIESAASLVSVVSDKAPSAAVCHVFAIGIDTYKNPAYTLNYAREDAEAFAESVKRNGANLYQKVIVHGLYDAAATRQNVLDTLKSLEAHIALNDVFIFYYAGHGSMVDQNFYFIPTECTSMYQATANNALSAETIQAGFKNIKALKQIIIMDACQSGGSVEVLAMRGANEEKAFAQLSRGAGIHVMASAGSEQNAKEILELKHGLFTYVLLEALNGKADGAPKDGKITIYELKSYLDDQVPELNSKYSGKIQFPYTFSRGSDFPIVLE

SEQ ID NO: 7539 - protein, 340 aa, Bos taurus
  unsure (1)..(340): unsure at all Xaa locations
XSELDQLRQEAEQLKNQIRDARKACADATLSQITNNIDPVGRIQMRTRRTLRGHLAKIYAMHWGTDSRLLLSASQDGKLIIWDSYTTNKVHAIPLRSSWVMTCAYAPSGNYVACGGLDNICSIYNLKTREGNVRVSRELAGHTGYLSCCRFLDDNQIVTSSGDTTCALWDIETGQQTTTFTGHTGDVMSLSLAPDTRLFVSGACDASAKLWDVREGMCRQTFTGHESDINAICFFPNGNAFATGSDDATCRLFDLRADQELMTYSHDNIICGITSVSFSKSGRLLLAGYDDFNCNVWDALKADRAGVLAGHDNRVSCLGVTDDGMAVATGSWDSFLKIWN

SEQ ID NO: 7540 - protein, 340 aa, Bos taurus
MSELDQLRQEAEQLKNQIRDARKACADATLSQITNNIDPVGRIQMRTRRTLRGHLAKIYAMHWGTDSRLLLSASQDGKLIIWDSYTTNKVHAIPLRSSWVMTCAYAPSGNYVACGGLDNICSIYNLKTREGNVRVSRELAGHTGYLSCCRFLDDNQIVTSSGDTTCALWDIETGQQTTTFTGHTGDVMSLSLAPDTRLFVSGACDASAKLWDVREGMCRQTFTGHESDINAICFFPNGNAFATGSDDATCRLFDLRADQELMTYSHDNIICGITSVSFSKSGRLLLAGYDDFNCNVWDALKADRAGVLAGHDNRVSCLGVTDDGMAVATGSWDSFLKIWN

SEQ ID NO: 7541 - protein, 326 aa, Bos taurus
RNQIRDARKACGDSTLTQITAGLDPVGRIQMRTRRTLRGHLAKIYAMHWGTDSRLLVSASQDGKLIIWDSYTTNKVHAIPLRSSWVMTCAYAPSGNFVACGGLDNICSIYSLKTREGNVRVSRELPGHTGYLSCCRFLDDNQIITSSGDTTCALWDIETGQQTVGFAGHSGDVMSLSLAPDGRTFVSGACDASIKLWDVRDSMCRQTFIGHESDINAVAFFPNGYAFTTGSDDATCRLFDLRADQELLMYSHDNIICGITSVAFSRSGRLLLAGYDDFNCNIWDAMKGDRAGVLAGHDNRVSCLGVTDDGMAVATGSWDSFLKIWN

SEQ ID NO: 7542 - protein, 215 aa, Bos taurus
TCAYAPSGNFVACGGLDNICSIYSLKTREGNVRVSRELPGHTGYLSCCRFLDDNQIITSSGDTTCALWDIETGQQTVGFAGHSGDVMSLSLAPDGRTFVSGACDASIKLWDVRDSMCRQTFIGHESDINAVAFFPNGYAFTTGSDDATCRLFDLRADQELLMYSHDNIICGITSVAFSRSGRLVLAGYDDFNCNIWDAMKGDRAGVLAGHDNRVS

SEQ ID NO: 7543 - protein, 526 aa, Arabidopsis thaliana
MGHGGEGMSLEFTPTWVVAGVCTVIVAISLAVERLLHYFGTVLKKKKQKPLYEALQKVKEELMLLGFISLLLTVFQGLISKFCVKENVLMHMLPCSLDSRREAGASEHKNVTAKEHFQTFLPIVGTTRRLLAEHAAVQVGYCSEKGKVPLLSLEALHHLHIFIFVLAISHVTFCVLTVIFGSTRIHQWKKWEDSIADEKFDPETALRKRRVTHVHNHAFIKEHFLGIGKDSVILGWTQSFLKQFYDSVTKSDYVTLRLGFIMTHCKGNPKLNFHKYMMRALEDDFKQVVGISWYLWIFVVIFLLLNVNGWHTYFWIAFIPFALLLAVGTKLEHVIAQLAHEVAEKHVAIEGDLVVKPSDEHFWFSKPQIVLYLIHFILFQNAFEIAFFFWIWVTYGFDSCIMGQVRYIVPRLVIGVFIQVLCSYSTLPLYAIVSQMGSSFKKAIFEENVQVGLVGWAQKVKQKRDLKAAASNGDEGSSQAGPGPDSGSGSAPAAGPGAGFAGIQLSRVTRNNAGDTNNEITPDHNN

SEQ ID NO: 7544 - protein, 496 aa, Arabidopsis thaliana
MAGGGTTLEYTPTWVVALVCSVIVSISFAVERLIHRAGKHFKNNDQKQLFGALQKIKEELMLVGFISLLLSVGQSKIAKICISKELSEKFLPCTKPAGAEKSLKDSSHFQFSFTGRHLLAGDAPAGDYCSLKGKVPIMSLSALHELHIFIFVLAVAHIIFCLLTIVFGTMKIKQWKKWEDKVLEKDFDTDQSIKKFTHVQEHEFIRSRFLGVGKADASLGWVQSFMKQFLASVNESDYITMRLGFVTTHCKTNPKFNFHKYLMRALNSDFKKVVGISWYLWVFVVLFLLLNIVAWHVYFWLAFIPLILLLAVGTKLEHIITDLAHEVAEKHIAVEGDLVVRPSDDLFWFQSPRLVLFLIHFILFQNSFEIAYFFFILFQFGWDSCIMDHVKFVIPRLVIGVIIQLLCSYSTLPLYALVTQMGSSFKGAIFNEQTQEHLVGWAKMAKRGVKKGATQVGTSHDATSPRPSIQLNSLLGKGSSQQNQNPKEKSEIAHHD

SEQ ID NO: 7545 - protein, 478 aa, Arabidopsis thaliana
MAEARSGSLEYTPTWVVAFICFIIVLLSLLAERGLHHLGKCLKRRQQDALFEALQKLKEELMLLGFISLMLTVSQAAIRHICVPPALVNNMFPCKKPLEEHHAPKSSHSIINNARHLLSTGESPDHCAAKGQVPLVSVEALHQLHIFIFVLAVFHVIFCASTMVLGGARIQQWKHWEDWFKKRPSQKGTTRRGHHAHAHELFSANHEFFEMHAGGFWRRSVVISWVRSFFKQFYGSVTKSEYIALRQAFIMSHCRTNPSFDFHKYMLRTLEIDFKKVVSISWYLWLFVVVFLLLNVGGWNTYFWLSFLPLILLLMVGAKLEYIISSLALDVSEKRSRAEEAVITPSDELFWFHRPGIVLQLIHFILFQNSFEIAFFFWILFTYGIHSCIMEKLGYLIPRLVMGVLVQVLCSYSTLPLYALVTQMGSKFKKGIFDNVVQSTLEGWLEDTRNRGESTSEAHRIEMQPTTPESYNVQSENP

SEQ ID NO: 7546 - protein, 429 aa, Arabidopsis thaliana
MAEARSGSLEYTPTWVVAFICFIIVLLSLLAERGLHHLGKCLKRRQQDALFEALQKLKEELMLLGFISLMLTVSQAAIRHICVPPALGQVPLVSVEALHQLHIFIFVLAVFHVIFCASTMVLGGARIQQWKHWEDWFKKRPSQKGERDSTILFSANHEFFEMHAGGFWRRSVVISWVRSFFKQFYGSVTKSEYIALRQAFIMSHCRTNPSFDFHKYMLRTLEIDFKKVVSISWYLWLFVVVFLLLNVGGWNTYFWLSFLPLILLLMVGAKLEYIISSLALDVSEKRSRAEEAVITPSDELFWFHRPGIVLQLIHFILFQNSFEIAFFFWILFTYGIHSCIMEKLGYLIPRLVMGVLVQVLCSYSTLPLYALVTQMGSKFKKGIFDNVVQSTLEGWLEDTRNRGESTSEAHRIEMQPTTPESYNVQSENP

SEQ ID NO: 7547 - protein, 555 aa, Oryza sativa (indica cultivar-group)
MAGGGGGRALPETPTWAVAVVCAVIVLVSVAMEHGLHKLGHWFHKREKKAMGEALEKIKAELMLLGFISLLLTVAQTPISKICIPESAANIMLPCKAGQDIVKGLKGKKDHRRRLLWYTGEEESHRRSLAGAAGEDYCAQSGKVALMSSGGMHQLHIFIFVLAVFHVTYCVITMALGRLKMKKWKKWELETNSLEYQFANDPSRFRFTHQTSFVKRHLGLSSTPGLRWIVAFFRQFFGSVTKVDYLTMRQGFINAHLSQNSKFDFHKYIKRSLEDDFKVVVGISLPLWFVAILVLFLDIQGFGTLIWISFVPLVILMLVGTKLEMVIMEMAQEIQDRATVIKGAPVVEPSNKYFWFNRPDWVLFFIHLILFQNAFQMAHFVWTLATPGLKKCFHENMGLSIMKVVVGIFIQFLCSYSTFPLYALVTQMGSNMKKTIFEEQTMKALMNWRKTAREKKKLRDADEFLAQMSGDTTPSRGSSPVHLLHKQRVRSEDPPSAPASPGFAGEARDMYPVPVAPVVRPHGFNRTDPDKRRAASSSAIQVDIADSDFSFSVQR

SEQ ID NO: 7548 - protein, 554 aa, Oryza sativa (indica cultivar-group)
MAGGGGGRALPETPTWAVAVVCAVIVLVSVAMEHGLHKLGHWFHKREKKAMGEALGKIKAELMLLGFISLLLTVAQTPISKICIPESAANIMLPCKAGQDIVKGLKGKKDHRRRLLWYTGEEESHRRSLAGAAGEDYCAQSGKVALMSSGGMHQLHIFIFVLAVFHVTYCVITMGLGRLKMKKWKKWESQTNSLEYQFAIDPSRFRFTHQTSFVKRHLGSFSSTPGLRWIVAFFRQFFGSVTKVDYLTMRQGFINAHLSQNSKFDFHKYIKRSLEDDFKVVVGISLPLWFVGILVLFLDIHGLGTLIWISFVPLIIVLLVGTKLEMVIMQMAQEIQDRATVIQGAPVVEPSNKYFWFNRPDWVLFFIHLTLFHNAFQMAHFVWTMATPGLKKCFHENIWLSIVEVIVGISLQVLCSYITFPLYALVTQMGSNMKKTIFEEQTMKALMNWRKKAMEKKKVRDADAFLAQMSVDFATPASSRSASPVHLLQDHRARLDDPPSPITVASPPAPEEDIYPVPAAAAFCQLLDDPPDRRWMASLSADIPDFDFSFSAQR

SEQ ID NO: 7549 - protein, 502 aa, Oryza sativa (japonica cultivar-group)
MARAEAAAALEFTPTWIVAAICSLIVLISLAAERCLHYLGKTLKRKNQKALFEALLKVKEELMLLGFISLLLTVSQGILQKTCVPPKWTNYLLPCRKMEDQSKQRGPSEAHFVAAGVLGHLGRRLLADGGTGADHCQNKGKVPLLSLEALHQLHIFIFVLAITHVIFSALTMLLGGAKIHQWKHWENDIQKDVAQNAPKKVTHVHQFEFIRERFKGIGKDSIILSWLHSFVKQFSGSVTKSDYITMRLGFIQTHCRANPKFDFHRYMVRALEADFKKVVGISWYLWIFVMIFLLLNVNGWHTYFWISFVPLLLLLAVGTKLEHVITQLAHEVAEKHSAIEGDLVVNPSDEHFWFGRPKVILYLIHFILFQNAFEIAFFFWILTTYGFNSCIMDHVPFILTRLIIGAIVQILCSYSTLPIYAIVTQMGSFFKKEIFDEHVQQGLVGWAQKAKKRKGLKESNGAMAGAGSTNGSSQPSSILQMVRRAAASEEGSSNGGDMRTNQ

SEQ ID NO: 7550 - protein, 217 aa, Linum usitatissimum
RIRARYPIIAAHLAPGSESRFDFQKYVNRSLEDDFKVVVGISPILWFFAVLFLLSNTHGWVAYLWLPFIPLIIILVVGTKLQVIITQLGLSIQDRGDVVKGAPVVQPGDDLFWFGRPRLVLFLIHFCLFQNAFQLAFFIWSVYEFGIKTCFHEKTEDIVRASGLVPNRDTSATQTTELSKGKLMMADTCLPTEDLVGMVVTAAHSGKRFFVDSIRYD

SEQ ID NO: 7551 - protein, 498 aa, Oryza sativa
  unsure (1)..(498): unsure at all Xaa locations
GGGEAPAITLEHTPTWIVSAVCFVIVIISLLFERLLHRLGKRLKKSRKKPLYEGLLKVKEELMLLGFISLLLNVFQGLTQKICVKASVMDHLQPCKLDXQRRQDGQDHRALGRRRRXRRLLAGGGAXXSDYCEKKGLVPILSVEAIHQLHIFIFVLAVSHVVLSAVTVLLGIAQTRKWQHWENKIQASDENGMMKERPQMIKHVQEFPFIKNHFKGHGKRWKTFGWLRSFLKQFYGSVTEEDYVTMRLGFIMKHCRGNPKFNFYKYMIRALEDDFKKVVGISWYLWAMLIIFLLLNVQGWYVYIWISAVPFVMLLVVGTKLEHIITELAHQVAEKHTAIEGELVVSPSDELFWFHRPKIVLLLIHIVLFQNAFEIAFFFWLLVTYGFQSCIMGNKGYVIARLVISVISQLKSGYSXLPLFASNLKMGTSFKKVIFDENVVEGLANWAQNARRRNARAARTQNNDSNVGDSPVDESNVGEVQMTSPPTKSVQQGTARLI

SEQ ID NO: 7552 - protein, 437 aa, Oryza sativa
  unsure (1)..(437): unsure at all Xaa locations
RRRRRMEESSITHTPTWVVAVVCFAIVSVSLAAERLLHHLGKFLKHKDQKALYSALERLKEELMLLGFISFVLSLSEGFIVGICVSENAMHLMLPCKKETYQLSEGVKLCKKKGEVPLXLSVEALHQLHIFIFILGLVHVVFCATTILLGGAKIRKWKLWETEIQQEMQQKCVYXLHLGVLHXNQQGEFVSERTKGLWMKLAVVSWIIAFFKQFHDSVSKSDYKALRSAFGLKHFPSHPSFNFYKYLIRALEHDFKRVVGISWYMWLFVILFLLLNINGWHTYFWLAFLPLFLLLVVGAKLEHIITRLAQEAAAVASLSHGTERTPYVKPSKEHFWFGRPEIVLNLIHFILFQNSFEIGFFIWVLVTFGFDSCIMEKKVYAISRLVIGVLIQMICSYVTLPLYAIVTHVGSRNKGERDGSIALLGLALYIARRRRRL

SEQ ID NO: 7553 - protein, 445 aa, Oryza sativa
  unsure (1)..(445): unsure at all Xaa locations
XALTPXTWVVAGVCFIIVAISLAAERLLHRLGKVLKFNGQEALFSALQRVKEELMLLGFISFLLSVFQKFINHICIPESAAHLMLPCITRETSETTEDASKLCKRKGEVPMLSEEALHQLHIFIFVLGIVHVVFCVTTLLLGGAKMKKWEKWEKEIXTRKNQGATKEGQXWMKFIVVRCAISFLKQFYGFLLVRPDYQVLRSAFVQRHYPKXPDFDFHKYMGRALEHDFKEVVGXISWVLWLFVIVFLLLNINGWHTYFWLSFLPLILLLIVGTKLELISTRLAQEAADCPDEATGNPWTKPCKEHFWFSKPRIVXHLIHFILFQNSFEMGFFFWVLATYGFDSCIMENKIYALPRLAIGIIVQVLCSYSTLPLYAIVTHMGGDIKLQAFGETVHVSVHSWATDGSSAAAAAAGPGGDRGDDVGRRAGTRRRHRRRRKAHGRRYX

SEQ ID NO: 7554 - protein, 251 aa, Triticum aestivum
MRLGFIMTHCRGNLKFDFHKYMLRVLESDFKKVVGISWYLWVFVVIFLLLNVNGWHTYFWIAFIPLILLLAVGTKLEHVIAQLAQDVAEKHSAVEGDLIVKPSDDHFWFGRPRIVLFLIHFILFQNAFEIAFFFWILTTYGFNSCIMGQVGFIVPRLVIGLIIQLLCSYSTLPLYAIVTQMGSFYKKEIFNEHVQQGVLGWAQKAKMKKGFKKSNGAAESTSPVGSAGPSAKVEMVRRPAGQGNDAGESIE

SEQ ID NO: 7555 - protein, 492 aa, Zea mays
MAAEGEAAALEFTPTWIVAAVCSLIVLLSLVAERCLHYLGKTLKRKNQKPLFEALLKVKEELMLLGFISLLLTVFQGMIRRTCIPERWTFHMLPCEKPDEKAGEAATMEHFVGTLGRIGRRLLQEGTAGAEQCQKKGKVPLLSLEAIHQLHIFIFVLAITHVIFSVTTMLLGGAQIHQWKQWENGIKKDAPGNGPKVTNVHHHEFIKKRFKGIGKDSIILSWLHSFGKQFYRSVSKSDYTTMRLGFIMTHCPGNPKFDFHRYMVRVLEADFKKVVGISWYLWVFVVIFLLLNVNGWHTYFWIAFLPLILLLAIGTKLEHVIAQLAHDVAEKHTAVEGDVIVKPSDEHFWFGKPRVILYLIHFILFQNAFEIAFFFWILSTYGFDSCIMGQVRFIVPRLVIGVVIQLLCSYSTLPLYAIVTQMGSCYKKEIFNEHVQQGVLGWAQKVKMKKGLKGAASASKDESITNADSAGPSVKIEMAKAGEDVEIVGNTG

SEQ ID NO: 7556 - protein, 492 aa, Zea mays; identical to SEQ ID NO: 7555

SEQ ID NO: 7557 - protein, 494 aa, Zea mays
MAAEGEAAALEFTPTWIVAAVCSLIVLLSLVAERCLHYLGKTLKRKNQKPLFEALLKVKEELMLLGFISLLLTVFQGMIRRTCIPERWTFHMLPCEKPDEKAGEAATMEHFVAVGTLGRIGRRLLQEGTAGAEQCQKKGKVPLLSLEAIHQLHIFIFVLAITHVIFSVTTMLLGGAQIHQWKQWENGIKKDAPGNGPKVTNVHHHEFIKKRFKGIGKDSIMLSWLHSFGKQFYRSVSKSDYTTMRLGFIMTHCPGNPKFDFHRYMVRVLEADFKKVVGISWYLWVFVVIFLLLNVNGWHTYFWIAFLPLILLLAIGTKLEHVIAQLAHDVAEKHTAVEGDVIVKPSDEHFWFGKPRIILYLIHFILFQNAFEIAFFFWILSTYGFDSCIMGQVRFIVPRLVIGVVIQLLCSYSTLPLYAIVTQMGSCYKKEIFNEHVQQGVLGWAQKVKMKKGLKGAASASKDESITNADSAGPSVKIEMAKAGEDVEIVGNTG

SEQ ID NO: 7558 - protein, 496 aa, Zea mays
MSEEATLEDTPTWIVASVCSVIVLISFVFERALHHLGKALERRRKTLYEALLKLKEELMLLGFVSLLLVVSQDLIQKICIDDSLMEHWMPCRGASATASAHYGVSSSSSSSAVGGGRRMLKGGGAAFGHCSSKGKVPLLSLHALEQVHIFIFVLAITQVVLSVATVLLGLLQMRIWMHWENTIQQEGSSAPKMIARVQKIRFIQDRCKGYEKAAWVIIWLRSFFKQFYGSVSNDDYIAMRLGFVMEHFRGHPKFNFYDYMIKALEKDFKRVVSIKWYYWIFVMIFLLLNVTGWHSYFWISLVPLALLLLIGTKLEHIINRLAYEVASKHAAGQGEGGIVVSPSDELFWFRSPRLVLVLIHFILFQNAFEFAYFFWTLAMFGANSCIMDSLGYSVSRIIICVVVQVLCSYSTLPLYAIVSHMGSSFKSAVFVDDVADNLRGWADGARRRVRRSATGVDASCLGTPAAAGRGWEGAAGWRLIAGRPSRPTQQPRSISF

SEQ ID NO: 7559 - protein, 496 aa, Zea mays; identical to SEQ ID NO: 7558

SEQ ID NO: 7560 - protein, 341 aa, Zea mays
MLLESVRIRQWKHWEDEIQKGATDNGPRKVTYVHQSEFIREHSKGIGRDTTMLSWLHSFLKQFYGSVTKSDYTTMRLGFITTHCRSNPKFDFHRYMMRALEADFKKVVGISWYLWIFVVVFMLLNINGWHTYFWISFIPLLLLLAVGTKLEHVITQLAQEVAEKHSAVEGDLVVNPSDDHFWFGRPKIVLYLIHFILFQNAFEIAFFFWILTTYGFNSCIMDHVPFIVPRLVVGAIIQLLCSYSTLPLYAIVTQMGTFFKKEIFDEHVQQSLLGWAQKAKKRKALRNNGNGSNGAAAGSSHPSATARLELMRRAVALEEGSAGGNGSEASAAELHDTGPKL

SEQ ID NO: 7561 - protein, 499 aa, Zea mays
MGKEATLAFTPTWVVAIVCLVIVSISLAAERSLHYLGKYLECKKQKALFSALQRLKEELMLLGFISFVLSLSQGFIVSICIPETSTDFMLPCNRGNSRVAEEGAKICNKKGDVPLLSLEALHQLHIFIFVLGLVHVVFCATTISFSGAKMRKWKHWETEIHREVHEKLQQEKNEGQGSSLSIVVLHREHQDEFVHKRTKGFWMKLAVASWITAFLKQFQDSVSKSDYEALRSAFVVEHYPEKPDIDFHKYMTRAVEYEFKRVVGISWYLWLFVILFLLLNINGWHTYFWLAFLPLFLLLIVGAKLEHIITRLAQEAAISLSNNTEEVPKIKPCKDHFWFHKPELVLHLIHFILFQNSFEISFFFWILVSEGFGSCMMERKPYVISRLVIGVIIEVICSYITLPLYAIVTHMTGQIKLHGFGSRVHESVHGWIGLRKKPFSFWKIPGGDPNADSGREADVTRRVAKERSGSSRSMPMAPADEIVTVDDVAVAAAAVGQGP

SEQ ID NO: 7562 - protein, 499 aa, Zea mays; identical to SEQ ID NO: 7561

SEQ ID NO: 7563 - protein, 498 aa, Zea mays
  unsure (1)..(498): unsure at all Xaa locations
MSEEATLEDTPTWIVASVCSVIVLISFVFERALHHLGKALERRRKTLYEALLKLKEELMLLGFVSLLLVVSQDLIQKICIDDSLMEHWMPCRGASATASAHYGVSSSSSSSAVGGGRRMLKGGGAAFGHCSSKGKVPLLSLHALEQVHIFIFVLAITQVVLSVATVLLGLLQMRIWMHWENTIQQEGSSAPKMIARVQKIRFIQDRCKGYEKAAWVIIWLRSFFKQFYGSVSNDDYIAMRLGFVMEHFRGHPKFNFYDYMIKALEKDFKRVVSIKWYYWIFVMIFLLLNVTGWHSYFWISLVPLALLLLIGTASDWDXKLEHIINRLAYEVASKHAAGQGEGGIVVSPSDELFWFRSPRLVLVLIHFILFQNAFEFAYFFWTLVMACMHACIMHALSVSIRRRVVVVVXVDPIWPLASDDLCGSIPESXSLXRVNCNAGDVRRQLLHHGQSRIQRXRESSYGTERVAVGNRKKXGAAGWRLIAGRPSRPTQQPRSISF

SEQ ID NO: 7564 - protein, 569 aa, Arabidopsis thaliana
MATRCFWCWTTLLFCSQLLTGFARASSAGGAKEKGLSQTPTWAVALVCTFFILVSVLLEKALHRVATWLWEKHKNSLLEALEKIKAELMILGFISLLLTFGEQYILKICIPEKAAASMLPCPAPSTHDQDKTHRRRLAAATTSSRCDEGHEPLIPATGLHQLHILLFFMAAFHILYSFITMMLGRLKIRGWKKWEQETCSHDYEFSIDPSRFRLTHETSFVRQHSSFWTKIPFFFYAGCFLQQFFRSVGRTDYLTLRHGFIAAHLAPGRKFDFQKYIKRSLEDDFKVVVGISPLLWASFVIFLLLNVNGWEALFWASILPVLIILAVSTKLQAILTRMALGITERHAVVQGIPLVHGSDKYFWFNRPQLLLHLLHFALFQNAFQLTYFFWVWYSFGLKSCFHTDFKLVIVKLSLGVGALILCSYITLPLYALVTQMGSNMKKAVFDEQMAKALKKWHMTVKKKKGKARKPPTETLGVSDTVSTSTSSFHASGATLLRSKTTGHSTASYMSNFEDQSMSDLEAEPLSPEPIEGHTLVRVGDQNTEIEYTGDISPGNQFSFVKNVPANDID

SEQ ID NO: 7565 - protein, 593 aa, Arabidopsis thaliana
MGIIDGSLLRRLICLCLWCLLGGGVTVVTAEDEKKVVHKQLNQTPTWAVAAVCTFFIVVSVLLEKLLHKVGKVLWDRHKTALLDALEKIKAELMVLGFISLLLTFGQTYILDICIPSHVARTMLPCPAPNLKKEDDDNGESHRRLLSFEHRFLSGGEASPTKCTKEGYVELISAEALHQLHILIFFLAIFHVLYSFLTMMLGRLKIRGWKHWENETSSHNYEFSTDTSRFRLTHETSFVRAHTSFWTRIPFFFYVGCFFRQFFRSVGRTDYLTLRNGFIAVHLAPGSQFNFQKYIKRSLEDDFKVVVGVSPVLWGSFVLFLLLNIDGFKMMFIGTAIPVIIILAVGTKLQAIMTRMALGITDRHAVVQGMPLVQGNDEYFWFGRPHLILHLMHFALFQNAFQITYFFWIWYSFGSDSCYHPNFKIALVKVAIALGVLCLCSYITLPLYALVTQMGSRMKKSVFDEQTSKALKKWRMAVKKKKGVKATTKRLGGDGSASPTASTVRSTSSVRSLQRYKTTPHSMRYEGLDPETSDLDTDNEALTPPKSPPSFELVVKVEPNKTNTGETSRDTETDSKEFSFVKPAPSNESSQDR

SEQ ID NO: 7566 - protein, 574 aa, Arabidopsis thaliana
MGIIDGSLLRRLICLCLWCLLGGGVTVVTAEDEKKVVHKQLNQTPTWAVAAVCTFFIVVSVLLEKLLHKVGKVLWDRHKTALLDALEKIKAELMVLGFISLLLTFGQTYILDICIPSHVARTMLPCPAPNLKKEDDDNGESHRRLLSFEHRFLSGGEASPTKCTKEGYVELISAEALHQLHILIFFLAIFHVLYSFLTMMLGRLKIRGWKHWENETSSHNYEFSTDTSRFRLTHETSFVRAHTSFWTRIPFFFYVGCFFRQFFRSVGRTDYLTLRNGFIAVHLAPGSQFNFQKYIKRSLEDDFKVVVGVSPVLWGSFVLFLLLNIDGTKLQAIMTRMALGITDRHAVVQGMPLVQGNDEYFWFGRPHLILHLMHFALFQNAFQITYFFWIWYSFGSDSCYHPNFKIALVKVAIALGVLCLCSYITLPLYALVTQMGSRMKKSVFDEQTSKALKKWRMAVKKKKGVKATTKRLGGDGSASPTASTVRSTSSVRSLQRYKTTPHSMRYEGLDPETSDLDTDNEALTPPKSPPSFELVVKVEPNKTNTGETSRDTETDSKEFSFVKPAPSNESSQDR

SEQ ID NO: 7567 - protein, 560 aa, Arabidopsis thaliana
MGIIDGSLLRRLICLCLWCLLGGGVTVVTAEDEKKVVHKQLNQTPTWAVAAVCTFFIVVSVLLEKLLHKVGKVLWDRHKTALLDALEKIKAELMVLGFISLLLTFGQTYILDICIPSHVARTMLPCPAPNLKKEDDDNGESHRRLLSFEHRFLSGGEASPTKCTKEGYVELISAEALHQLHILIFFLAIFHVLYSFLTMMLGRLKIRGWKHWENETSSHNYEFSTDTSRFRLTHETSFVRAHTSFWTRIPFFFYVGCFFRQFFRSVGRTDYLTLRNGFIAVHLAPGSQFNFQKYIKRSLEDDFKVVVGMMFIGTAIPVIIILAVGTKLQAIMTRMALGITDRHAVVQGMPLVQGNDEYFWFGRPHLILHLMHFALFQYSFGSDSCYHPNFKIALVKVAIALGVLCLCSYITLPLYALVTQMGSRMKKSVFDEQTSKALKKWRMAVKKKKGVKATTKRLGGDGSASPTASTVRSTSSVRSLQRYKTTPHSMRYEGLDPETSDLDTDNEALTPPKSPPSFELVVKVEPNKTNTGETSRDTETDSKEFSFVKPAPSNESSQDR

SEQ ID NO: 7568 - protein, 580 aa, Arabidopsis thaliana
MITRSRCRRSLLWFLVFHGGATATGAPSGGKELSQTPTWAVAVVCTFLILISHLLEKGLQRLANVCFLLLLLLFLRVFLFKHSLSETYEFVSSQWLWKKHKNSLLEALEKIKAELMILGFISLLLTFGEPYILKICVPRKAALSMLPCLSEDTVLFQKLAPSSLSRHLLAAGDTSINCKQGSEPLITLKGLHQLHILLFFLAIFHIVYSLITMMLSRLKIRGWKKWEQETLSNDYEFSIDHSRLRLTHETSFVREHTSFWTTTPFFFYVGCFFRQFFVSVERTDYLTLRHGFISAHLAPGRKFNFQRYIKRSLEDDFKLVVGISPVLWASFVIFLLFNVNGWRTLFWASIPPLLIILAVGTKLQAIMATMALEIVETHAVVQGMPLVQGSDRYFWFDCPQLLLHLIHFALFQNAFQITHFFWIWYSFGLKSCFHKDFNLVVSKLFLCLGALILCSYITLPLYALVTQMMKWCVEQMGSHMKKAVFDEQMAKALKKWHKDIKLKKGKARKLPSKTLGVSESFSLSSSSSATTLHRSKTTGHSSNIIYYKQEDEEDEMSDLEAGAEDAIDRIQQQEMQFHNS

SEQ ID NO: 7569 - protein, 501 aa, Arabidopsis thaliana
MAGGGGGSTSGEGPRELDQTPTWAVSTVCGVIILISIVLELMIHKIGEVFTERRKKALYEALQKIKNELMVLGFISLLLTFGQNYIASLCVASRYGHAMSFCGPYDGPSGESKKPKTTEHLERRVLADAAPAQCKKGYVPLISLNALHQVHIFIFFLAVFHVIYSAITMMLGRAKIRGWKVWEEEVINDHEMMNDPSRFRLTHETSFVREHVNPWAKNRFSFYVMCFFRQMLRSVRKSDYLTMRHGFISVHLAPGMKFNFQKYIKRSLEDDFKVVVGISPELWAFVMLFLLFDVHGWYVTAVITMIPPLLTLAIGTKLQAIISDMALEIQERHAVIQGMPLVNVSDRHFWFSRPALVLHIIHFILFQNAFEITYFFWIWYEFGLRSCFHHHFALIIIRVALGVGVQFLCSYITLPLYALVTQMGSTMKRSVFDDQTSKALKNWHKNAKKKSETPGQTQPPLPNLRPKTGGDIESASPANITASVDVKESDQSQSRDLLSGP

SEQ ID NO: 7570 - protein, 467 aa, Arabidopsis thaliana
MAGGGGGGGGEGPRQLDQTPTWAVSTVCGVIILISIILELIIHKVGEVFERKKKKALFEALEKIKNELMVLGFISLLLTFGQNYIASICVPSRYGHAMSFCGPYDGPSEDDRKKLKKTDHAMRILYSVQRRSLADAPPVNCKKDYVALISLNALHQVHIFIFFLAVFHVIYSAITMMLGRAKIRGWKVWEQEVIHEQEMMNDPSRFRLTHETSFVREHVNSWASNKFFFYVMCFFRQILRSVRKSDYLTMRHGFISVHLAPGMKFDFQKYIKRSLEDDFKVVVGIRPELWAFVMLFLLFDVHGWYVTAVITMIPPLLTLAIGTKLQAIISYMALEIQERHAVIQGMPVVNVSDQHFWFEKPDLVLHMIHFVLFQNAFEITYFFWIWYEFGLRSCFHHHFGLIIIRVCLGVGVQFLCSYITLPLYALVTQMGSTMKRSVFDEQTSKALEQWHKKARKKNENLYTIFGK

SEQ ID NO: 7571 - protein, 500 aa, Arabidopsis thaliana
MAGGGGGSTSGEGPRELDQTPTWAVSTVCGVIILISIVLELMIHKIGEVFTERRKKALYEALQKIKNELMVLGFISLLLTFGQNYIASLCVASRYGHAMSFCGPYDGPSGESKKPKTTEHLERRVLADAAPAQCKKGYVPLISLNALHQVHIFIFFLAVFHVIYSAITMMLGRAKIRGWKVWEEEVINDHEMMNDPSRFRLTHETSFVREHVNPWAKNRFSFYVMCFFRQMLRSVRKSDYLTMRHGFISVHLAPGMKFNFQKYIKRSLEDDFKVVVGISPELWAFVMLFLLFDVHGWYVTAVITMIPPLLTLAIGTKLQAIISDMALEIQERHAVIQGMPLVNVSDRHFWFSRPALVLHIIHFILFQNAFEITYFFWIWYEFGLRSCFHHHFALIIIRVALGVGVQFLCSYITLPLYALVTQMGSTMKRSVFDDQTSKALKNWHKNAKKKSETPGQTPPLPNLRPKTGGDIESASPANITASVDVKESDQSQSRDLLSGP

SEQ ID NO: 7572 - protein, 406 aa, Arabidopsis thaliana
HLLAAGDTSINCKQGSEPLITLKGLHQLHILLFFLAIFHIVYSLITMMLSRLKIRGWKKWEQETLSNDYEFSIDHSRLRLTHETSFVREHTSFWTTTPFFFYVGCFFRQFFVSVERTDYLTLRHGFISAHLAPGRKFNFQRYIKRSLEDDFKLVVGISPVLWASFVIFLLFNVNGWRTLFWASIPPLLIILAVGTKLQAIMATMALEIVETHAVVQGMPLVQGSDRYFWFDCPQLLLHLIHFALFQNAFQITHFFWIWYSFGLKSCFHKDFNLVVSKLFLCLGALILCSYITLPLYALVTQMGSHMKKAVFDEQMAKALKKWHKDIKLKKGKARKLPSKTLGVSESFSLSSSSSATTLHRSKTTGHSSNIIYYKQEDEEDEMSDLEAGAEDAIDRIQQQEMQFHNS

SEQ ID NO: 7573 - protein, 443 aa, Arabidopsis thaliana
MAGGGGGGGGEGPRQLDQTPTWAVSTVCGVIILISIILELIIHKVGEVFERKKKKALFEALEKIKNELMVLGFISLLLTFGQNYIASICVPSRYGHAMSFCGPYDGPSEDDRKKLKKTDHAMRILYSVQRRSLADAPPDYVALISLNALHQVHIFIFFLAVFHVIYSAITMMLGRAKIRGWKVWEQEVIHEQEMMNDPSRFRLTHETSFVREHVNSWASNKFFFYVMCFFRQILRSVRKSDYLTMRHGFISVHLAPGMKFDFQKYIKRSLEDDFKVVVGIRPELWAFVMLFLLFDVHGWYVTAVITMIPPLLTLAIGTKLQAIISYMALEIQERHAVIQGMPVVNVSDQHFWFEKPDLVLHMIHFVLFQYEFGLRSCFHHHFGLIIIRVCLGVGVQFLCSYITLPLYALVTQMGSTMKRSVFDEQTSKALEQWHKKARKKNEK

SEQ ID NO: 7574 - protein, 580 aa, Oryza sativa (japonica cultivar-group)
MSGSGGGGGGGAGGDGARALDQTPTWAVAAVCAVIVAASILLEGLLHHLGQWFSKRRKKALFDALEKVKSELMTLGFISLLLSVTGRYISRICIPVGAADTMLPCSLRRSSSEQEVPGGGGHGRRHLSGDPTNFKCAKGMVSLVSADGLHQLHIFVFFLAVFHVAFSAITMSLGRAKTRIWKEWEKETCSLTYEFSYDPSKFRLTHQTSFVRQHASCWSKSTILLYFVSFFRQFFRSVRRTDYLTLRHGFIAAHLSLGTRFNFRKYIKRSLEDDFKTVVGISAPLWASALAIMLFNVHGWHNLFWFSTIPLVVTLAVGTKLQAIIAMMAVEIKERHTVIQGMPVVKLSDEHFWFGKPRLVLHLIHFASFQNAFEITYFFWIWYEFGLRSCFHDNFELIIARVCLGVVVQFMCSYITLPLYALVSQMGSQMKRTIFDEQTAKALKKWHKAAVVKKKQQKGSSHEPGSETPGTETTTTTATATEESQRERDAAAMPVRHLHRYKTIAHVGATGTLSDSDCSDTDTPFASPTRLLIPPTKQRSLDAGRAEVRVDVDSTPTPTPPERHDSFSFPRLPAHNLQQK

SEQ ID NO: 7575 - protein, 555 aa, Oryza sativa (japonica cultivar-group)
MAGGGGGRALPETPTWAVAVVCAVIVLVSVAMEHGLHKLGHWFHKREKKAMGEALEKIKAELMLLGFISLLLTVAQTPISKICIPESAANIMLPCKAGQDIVKGLKGKKDHRRRLLWYTGEEESHRRSLAGAAGEDYCAQSGKVALMSSGGMHQLHIFIFVLAVFHVTYCVITMALGRLKMKKWKKWELETNSLEYQFANDPSRFRFTHQTSFVKRHLGLSSTPGLRWIVAFFRQFFGSVTKVDYLTMRQGFINAHLSQNSKFDFHKYIKRSLEDDFKVVVGISLPLWFVAILVLFLDIQGFGTLIWISFVPLVILMLVGTKLEMVIMEMAQEIQDRATVIKGAPVVEPSNKYFWFNRPDWVLFFIHLILFQNAFQMAHFVWTLATPGLKKCFHENMGLSIMKVVVGIFIQFLCSYSTFPLYALVTQMGSNMKKTIFEEQTMKALMNWRKTAREKKKLRDADEFLAQMSGDTTPSRGSSPVHLLHKQRVRSEDPPSAPASPGFAGEARDMYPVPVAPVVRPHGFNRMDPDKRRAASSSAIQVDIADSDFSFSVQR

SEQ ID NO: 7576 - protein, 583 aa, Oryza sativa (japonica cultivar-group)
MAGGGGGRALPETPTWAVAVVCAVIVLVSVAMEHGLHKLGHWFHKREKKAMGEALEKIKAELMLLGFISLLLTVAQTPISKICIPESAANIMLPCKAGQDIVKGLKGKKDHRRRLLWYTGEEESHRRSLAGAAGEDYCAQSGKVALMSSGGMHQLHIFIFVLAVFHVTYCVITMALGRLKMKKWKKWELETNSLEYQFANDPSRFRFTHQTSFVKRHLGLSSTPGLRWIVAFFRQFFGSVTKVDYLTMRQGFINAHLSQNSKFDFHKYIKRSLEDDFKVVVGISLPLWFVAILVLFLDIQGFGTLIWISFVPLVILMLVGTKLEMVIMEMAQEIQDRATVIKGAPVVEPSNKYFWFNRPDWVLFFIHLILFQNAFQMAHFVWTLATPGLKKCFHENMGLSIMKVVVGIFIQFLCSYSTFPLYALVTQVKPFRQKSLVNALGGLNSNVLNLSVCLQMGSNMKKTIFEEQTMKALMNWRKTAREKKKLRDADEFLAQMSGDTTPSRGSSPVHLLHKQRVRSEDPPSAPASPGFAGEARDMYPVPVAPVVRPHGFNRMDPDKRRAASSSAIQVDIADSDFSFSVQR

SEQ ID NO: 7577 - protein, 580 aa, Oryza sativa
MSGSGGGGGGGAGGDGARALDQTPTWAVAAVCAVIVAASILLEGLLHHLGQWFSKRRKKALFDALEKVKSELMTLGFISLLLSVTGRYISRICIPVGAADTMLPCSLRRSSSEQEVPGGGGHGRRHLSGDPTNFKCAKGMVSLVSADGLHQLHIFVFFLAVFHVAFSAITMSLGRAKTRIWKEWEKETCSLTYEFSYDPSKFRLTHQTSFVRQHASCWSKSTILLYFVSFFRQFFRSVRRTDYLTLRHGFIAAHLSLGTRFNFRKYIKRSLEDDFKTVVGISAPLWASALAIMLFNVHGWHNLFWFSTIPLVVTLAVGTKLQAIIAMMAVEIKERHTVIQGMPVVKLSDEHFWFGKPRLVLHLIHFASFQNAFEITYFFWIWYEFGLRSCFHDNFELIIARVCLGVVVQFMCSYITLPLYALVSQMGSQMKRTIFDEQTAKALKKWHKAAVVKKKQQKGSSHEPGSETPGTETTTTTATATEESQRERDAAAMPVRHLHRYKTIAHVGATGTLSDSDCSDTDTPFASPTRLLIPPTKQRSLDPGRAEVRVDVDSTPTPTPPERHDSFSFPRLPAHNLQSE

SEQ ID NO: 7578 - protein, 561 aa, Oryza sativa
MGGGGGGGGNTRELDQTPTWAVASVCGVIVLISILLEKGLHKIGEFFSHRKKKAMVEALEKVKTELMVLGFISLLLVFGQNYIIKICITEKAADTMLPCRLKASTIHAETGKGGEHGATPAGGEQGATPAGGEHEATPAEHFSLVGVGPPFTAAFSRPHHRLLAEAKMATKCPDGKVSLISINALHQLHIFIFFLAVFHVTYSAITMALGRAKIRGWKEWEKEAAGQDFEDGDDPTKFRFTHETSFVRQHMNVLNKTPASFYISNFFRQFFRSVRRADYCALRHSFVNVHLAPGSKFDFQKYIKRSLEDDFKVIVGISPPLWASALIFLLLNVSGLRTMLWISIMPVVTILSVGTKLQGIICRMAIDITERHAVIQGIPLVQVSDSYFWFSRPTFVLFLIHFTLFQNGFQIIYFLWILYEYGMDSCFNDSKEFVFARLCLGVVVQFLCSYVTLPLYALVSQMGSTMKQSIFDDQTSKALKNWRAGVKKKPAAASSSKHGDAGGDHAAASPHSGSPKGEAGGVALTQRKAGGGEAGGEQQAGGGSGSKKGEEGDYEFVKLEP

SEQ ID NO: 7579 - protein, 434 aa, Oryza sativa
  unsure (1)..(434): unsure at all Xaa locations
GGGGGGGNTRELDQTPTWAVASVCGVIVLISILLEKGLHKIGEFFSHRKKKAMVEALEKVKTELMVLGFISLLLVFGQNYIIKICITEKAADTMLPCRLKASTIHAETGKGXXTATPEGKVSLISINALHQLHIFIFFLAVFHVTYSAITMALGRAKIRGWKEWEKEAAGQDFEFANDPTKFRFTHETSFVRQHMNVLNKTPASFYIVNFFRQFFRSVRRADYCALRHSFVNVHLAPGSKFDFQKYIKRSLEDDFKVIVGISPPLWASALIFLLLNVSGLHTMLWISIMPVVTILSVGTKLQGIICRMAIDITERHAVIQGIPLVQVSDSYFWFSRPTFVLFLIHFTLFQNGFQIIYFLWILVTQSLLTEFLQFCFMKIFSRLIDLVVQFLCSYVTLPLYALVSQMGSTMKQSIFDDQTSKALKNWRAGVKKKX

SEQ ID NO: 7580 - protein, 555 aa, Oryza sativa; identical to SEQ ID NO: 7575

SEQ ID NO: 7581 - protein, 554 aa, Oryza sativa; identical to SEQ ID NO: 7548

SEQ ID NO: 7582 - protein, 515 aa, Zea mays
MGGGGGGGNSRELDQTPTWAVASVCGVIVLISILLEKGLHHVGEFFSHRKKKAMVEALEKVKAELMVLGFISLLLVFGQNYIIKVCISNHAANTMLPCKLEAAAVEGKDGHGKEAAAVVAGKKKVAVAVPGKKKKKAAAAADHLGGVVDWPPPYYAHNARMLAEASMATKCPEGKVPLISINALHQLHIFIFFLAVFHVSYSAITMALGRAKIRAWKEWEKEAAGQDYEFSHDPTRFRFTHETSFVRQHMNVLNKFPASFYISNFFRQFFRSVRQADYCALRHSFVNVHLAPGSKFDFQKYIKRSLEDDFKVIVGISPPLWASALIFLFLNVNGWHTMLWISIMPVVIILSVGTKLQGIICRMAIDITERHAVIQGIPMVQVSDSYFWFARPTFVLFLIHFTLFQNGFQIIYFLWILYEYGMDSCFNDSEEFVFARLCLGVVVQVLCSYVTLPLYALVSQMGSTMKQSIFDEQTSKALKNWRAGAKKKAPTGGSKHGGGGSPTAGGSPTKADGDA

SEQ ID NO: 7583 - protein, 515 aa, Zea mays; identical to SEQ ID NO: 7582

SEQ ID NO: 7584 - protein, 565 aa, Zea mays
MGGDGTRALDQTPTWAVAAVCAVIVAASILLEGFLHHLGQLLNKKRKKALFDALEKVKSELMTLGFISLLLTVTGRYIARICIPEGAANTMLPCRLSGHSVAEEPKGHGRRHLSEDPTNLFSCRKGMVSLVSADGMHQLHIFVFFLAVFHVTFSFFTMSLGRAKTRIWKVWEKETCSPQYNYLNDPSKFRLTHQTSFVRQHASCWSKSTITLYFVSFFRQFFRSVRKTDYFTLRHGFISAHLSPGTRFNFRKYIKRSLEDDFKTVVGISPPLWASALAVMLFNVHGWHNLFWFSAIPLVVILAVGTKLQAIIAMMAIEIAERHTVIQGMPVVKLSDDHFWFGKPRLVLHLIHFASFQNAFEITYFFWIWYEFGLRSCFHDNFEFIIARVCLGAIVQFMCSYITLPLYALVSQMGSEMKRTIFDEQTAKALKKWHKAVVKKKHHKDSSHNSSETPSTDTTGPAGEAGEWQRLHEVPVRHLHRYKTIAHVGGVRSPLSDPDYSDTDDTEPLSLQTRHLIPPAKQRSLDTERAEVRVNVVETAAAPSDVLQDSFSFPRLLPPRHVPDK

SEQ ID NO: 7585 - protein, 565 aa, Zea mays; identical to SEQ ID NO: 7584

SEQ ID NO: 7586 - protein, 361 aa, Zea mays
PRVRARMLAEASMATKCPEGKVPLISINALHQLHIFIFFLAVFHVSYSAITMALGRAKIRAWKEWEKEAAGQDYEFSHDPTRFRFTHETSFVRQHMNVLNKFPASFYISNFFRQFFRSVRQADYCALRHSFVNVHLAPGSKFDFQKYIKRSLEDDFKVIVGISPPLWASALIFLFLNVNGWHTMLWISIMPVVIILSVGTKLQGIICRMAIDITERHAVIQGIPMVQVSDSYFWFARPTFVLFLIHFTLFQNGFQIIYFLWILYEYGMDSCFNDSEEFVFARLCLGVVVQVLCSYVTLPLYALVSQMGSTMKQSIFDEQTSKALKNWRAGAKKKAPTGGSKHGGGGSPTAGGSPTKADGDA

SEQ ID NO: 7587 - protein, 563 aa, Zea mays
MAGGGGGRDLPSTPTWAVALVCAVIVLVSVAMEHGLHKLGHWFHTRQKKAMREALEKIKAELMLMGFISLLLAVGQTPISKICIPAKAGSIMLPCKPPKGAAAAADDDKSDGRRRLLWYPPYPGYDEPGHHRRFLAGAAPDDNYCSDQGKVSLISSAGVHQLHIFIFVLAVFHIVYSVATMALGRLKMRKWKKWESETNSLEYQYANDPSRFRFTHQTSFVKRHLGLSSTPGVRWVVAFFRQFFASVTKVDYLTMRQGFINYHLSPSTKFNFQQYIKRSLEDDFKVVVGISLPLWFVAIFTLLIDIKGFGTLVWISFVPLVILLLVGAKLEVVIMEMAKEIQDKATVIKGAPVVEPSDRFFWFNRPGWVLFLIHLTALPERLPDGAFRLDTAHPRPEEMLPREAGLSIMKVAVGLVLQVLCSYITFPLYALVTQMGSHMKKTIFEEQTAKAVMKWRKTAKDKVRQREAAGFLDVLTSADTTPSHSRATSPSRGNSPVHLLHKYRGRSEEPQSGPASPGRELGDMYPVADQHRLHRLDPERMRPASSTAVNIDIADADFSFSMR

SEQ ID NO: 7588 - protein, 576 aa, Zea mays
MLVASTGTGKGRHMAGGGGGRDLPSTPTWAVALVCAVIVLVSVAMEHGLHKLGHWFHTRQKKAMREALEKIKAELMLMGFISLLLAVGQTPISKICIPAKAGSIMLPCKPPKGAAAADDDDKSDGRRRLLWYPPYPGYDEPGHHRRFLAGAAPDDNYCSDQGKVSLISSAGVHQLHIFIFVLAAFHIVYSVATMALGRLKMRKWKKWESETNSLEYQYANDPSRFRFTHQTSFVKRHLGLSSTPGVRWVVAFFRQFFASVTKVDYLTMRQGFINYHLSPSTKFNFQQYIKRSLEDDFKVVVGISLPLWFVAIFTLLIDIKGFGTLVWISFVPLVILLLVGAKLEVVIMEMAKEIQDKATVIKGAPVVEPSDRFFWFNRPGWVLFLIHLTALPERLPDGAFRLDTAHPRPEEMLPREAGLSIMKVAVGLVLQVLCSYITFPLYALVTQMGSHMKKTIFEEQTAKAVMKWRKTAKDKVRQREAAGFLDVLTSADTTPSHSRATSPSRGNSPVHLLHKYRGRSEEPQSGPASPGRELGDMYPVADQHRLHRLDPERMRPASSTAVNIDIADADFSFSMR

SEQ ID NO: 7589 - protein, 394 aa, Cricetulus griseus
MGCLGNSKTEDQRNEEKAQREANKKIEKQLQKDKQVYRATHRLLLLGAGESGKSTIVKQMRILHVNGFNGEGGEEDPQAARSNSDGEKATKVQDIKNNLKEAIETIVAAMSNLVPPVELANPENQFRVDYILSVMNVPNFDFPPEFYEHAKALWEDEGVRACYERSNEYQLIDCAQYFLDKIDVVKQADYVPSDQDLLRCRVLTSGIFETKFQVDKVNFHMFDVGGQRDERRKWIQCFNDVTAIIFVVASSSYNMVIREDNQTNRLQEALNLFKSIWNNRWLRTISVILFLNKQDLLAEKVLAGKSKIEDYFPEFARYTTPEDATPEPGEDPRVTRAKYFIRDEFLRISTASGDGRHYCYPHFTCAVDTENIRRVFNDCRDIIQRMHLRQYELL

SEQ ID NO: 7590 - protein, 155 aa, Cricetulus griseus
KIIHQDGYSLEECLEFIAIIYGNTLQSILAIVRAMTTLNIQYGDSARQDDARKLMHMADTIEEGTMPKEMSDIIQRLWKDSGIQACFERASEYQLNDSAGYYLLDLERLVTPGYVPTEQDVLRSRVKTAGIIETQFSFKDLNFRMFDVGGQRSEP

SEQ ID NO: 7591 - protein, 354 aa, Cricetulus longicaudatus
MGCTLSAEERAALERSKAIEKNLKEDGISAAKDVKLLLLGAGESGKSTIVKQMKIIHEDGFSGEDVKQYKPVVYSNTIQSLAAIVRAMDTLGVEYGDKERKADSKMVCDVVSRMEDTEPFSAELLSAMMRLWGDSGIQECFNRSREYQLNDSAKYYLDSLDRIGAADYQPTEQDILRTRVKTTGIVETHFTFKNLHFRLFDVGGQRSERKKWIHCFEDVTAIIFCVALSGYDQVLHEDETTNRMHESLKLFDSICNNKWFTDTSIILFLNKKDIFEEKITRSPLTICFPEYTGPSAFTEAVAHIQGQYESKNKSAHKEIYTHFTCATDTNNIQFVFDAVTDVIIAKNLRGCGLY

SEQ ID NO: 7592 - protein, 394 aa, Cricetulus longicaudatus
MGCLGDSKTEDQRNEEKAQREANKKIEKQLQKDKQVYRATHRLLLLGAGESGKSTIVKQMRILHVNGFNGEGGEEDPQAARSNSDGEKATKVQDIKNNLKEAIETIVAAMSNLVPPVELANPENQFRVDYILSVMNVPNFDFPPEFYEHAKALWEDEGVRACYERSNEYQLIDCAQYFLDKIDVIKQADYVPSDQDLLRCRVLTSGIFETKFQVDKVNFHMFDVGGQRDERRKWIQCFNDVTAIIFVVASSSYNMVIREDNQTNRLQEALNLFKSIWNNRWLRTISVILFLNKQDLLAEKVLAGKSKIEDYFPEFARYTTPEDATPEPGEDPRVTRAKYFIRDEFLRISTASGDGRHYCYPHFTCAVDTENIRRVFNDCRDIIQRMHLRQYELL

SEQ ID NO: 7593 - protein, 354 aa, Mus musculus
MGSGISAEDKELARRSKELEKKLQEDADKEAKTVKLLLLGAGESGKSTIVKQMKIIHQDGYSPEECLEFKSVIYGNVLQSILAIIRAMSTLGIDYAEPSCADAGRQLNNLADSTEEGTMPPELVDVIRKLWKDGGVQACFDRAAEFQLNDSASYYLNQLDRITDPNYLPNEQDVLRSRVKTTGIIETKFSVKDLNFRMFDVGGQRSERKKWIHCFEGVTCIIFCAALSAYDMVLVEDDEVNRMHESLHLFNSICNHKFFAATSIVLFLNKKDLFEEKIKKVHLSICFPEYDGNNSYEDAGNYIKSQFLDLNMRKDVKEIYSHMTCATDTQNVKFVFDAVTDIIIKENLKDCGLF

SEQ ID NO: 7594 - protein, 350 aa, Mus musculus
MGAGASAEEKHSRELEKKLKEDAEKDARTVKLLLLGAGESGKSTIVKQMKIIHQDGYSLEECLEFIAIIYGNTLQSILAIVRAMTTLNIQYGDSARQDDARKLMHMADTIEEGTMPKEMSDIIQRLWKDSGIQACFDRASEYQLNDSAGYYLSDLERLVTPGYVPTEQDVLRSRVKTTGIIETQFSFKDLNFRMFDVGGQRSERKKWIHCFEGVTCIIFIAALSAYDMVLVEDDEVNRMHESLHLFNSICNHRYFATTSIVLFLNKKDVFSEKIKKAHLSICFPDYDGPNTYEDAGNYIKVQFLELNMRRDVKEIYSHMTCATDTQNVKFVFDAVTDIIIKENLKDCGLF

SEQ ID NO: 7595 - protein, 343 aa, Mus musculus
FARRSKELEKKLQEDADKEAKTVKLLLLGAGESGKSTIVKQMKIIHQDGYSPEECLEFKSVIYGNLLQSILAIIRAMSTLGIDYAEPSCADAGRQLNNLADSTEEGTMPPELVDVIRKLWKDGGVQACFDRAAEFQLNDSASYYLNQLDRITDPNYLPNEQDVLRSRVKTTGIIETKFSVKDLNFRMFDVGGQRSERKKWIHCFEGVTCIIFCAALSAYDMVLVEDDEVNRMHESLHLFNSICNHKFFAATSIVLFLNKKDLFEEKIKKVHLSICFPEYDGNNSYEDAGNYIKSQFLDLNMRKDVKEIYSHMTCATDTQNVKFVFDAVTDIIIKENLKDCGLF

SEQ ID NO: 7596 - protein, 354 aa, Mus musculus
MGCTLSAEDKAAVERSKMIDRNLREDGEKAAKEVKLLLLGAGESGKSTIVKQMKIIHEDGYSEDECKQYKVVVYSNTIQSIIAIIRAMGRLKIDFGESARADDARQLFVLAGSAEEGVMTSELAGVIKRLWRDGGVQACFSRSREYQLNDSASYYLNDLDRISQTNYIPTQQDVLRTRVKTTGIVETHFTFKELYFKMFDVGGQRSERKKWIHCFEGVTAIIFCVALSDYDLVLAEDEEMNRMHESMKLFDSICNNKWFTDTSIILFLNKKDLFEEKIKRSPLTICYPEYTGSNTYEEAAAYIQCQFEDLNRRKDTKEVYTHFTCATDTKNVQFVFDAVTDVIIKNNLKECGLY

SEQ ID NO: 7597 - protein, 354 aa, Mus musculus
MGCTLSAEERAALERSKAIEKNLKEDGISAAKDVKLLLLGAGESGKSTIVKQMKIIHEDGFSGEDVKQYKPVVYSNTIQSLAAIVRAMDTLGVEYGDKERKTDSKMVCDVVSRMEDTEPFSAELLSAMMRLWGDSGIQECFNRSREYQLNDSAKYYLDSLDRIGAGDYQPTEQDILRTRVKTTGIVETHFTFKNLHFRLFDVGGQRSERKKWIHCFEDVTAIIFCVALSGYDQVLHEDETTNRMHESLMLFDSICNNKFFIDTSIILFLNKKDLFGEKIKKSPLTICFPEYPGSNTYEDAAAYIQTQFESKNRSPNKEIYCHMTCATDTNNIQVVFDAVTDIIIANNLRGCGLY

SEQ ID NO: 7598 - protein, 355 aa, Mus musculus
MGCTVSAEDKAAAERSKMIDKNLREDGEKAAREVKLLLLGAGESGKSTIVKQMKIIHEDGYSEEECRQYRAVVYSNTIQSILAIVKRMGNLQIDFADPQRADDARQLFALSCAAEEQGMLPEDLSGVIRRLWADHGVQACFGRSREYQLNDSAAYYLNDLERIAQSDYIPTQQDVLRTRVKTTGIVETHFTFKDLHFKMFDVGGQRSERKKWIHCFEGVTAIIFCVALSAYDLVLAEDEEMNRMHESMKLFDSICNNKWFTDTSIILFLNKKDLFEEKITQSSLTICFPEYTGANKYDEAASYIQSKFEDLNKRKDTKEIYTHFTCATDTKNVQFVFDAVTDVIIKNNLKDCGLF

SEQ ID NO: 7599 - protein, 355 aa, Mus musculus
MGCTVSAEDKAAAERSKMIDKNLREDGEKAAREVKLLLLGAGESGKSTIVKQMKIIHEDGYSEEECRQYRAVVYSNTIQSILAIVKAMGNLQIDFADPQRADDARQLFALSCAAEEQGMLPEDLSGVIRRLWADHGVQACFGRSREYQLNDSAAYYLNDLERIAQSDYIPTQQDVLRTRVKTTGIVETHFTFKDLHFKMFDVGGQRSERKKWIHCFEGVTAIIFCVALSAYDLVLAEDEEMNRMHESMKLFDSICNNKWFTDTSIILFLNKKDLFEEKITQSSLTICFPEYTGANKYDEAASYIQSKFEDLNKRKDTKEIYTHFTCATDTKNVQFVFDAVTDVIIKNNLKDCGLF

SEQ ID NO: 7600 - protein, 354 aa, Mus musculus
MGCTLSAEERAALERSKAIEKNLKEDGISAAKDVKLLLLGAGESGKSTIVKQMKIIHEDGFSGEDVKQYKPVVYSNTIQSLAAIVRAMDTLGVEYGDKERKTDSKMVCDVVSRMEDTEPFSAELLSAMMRLWGDSGIQECFNRSREYQLNDSAKYYLDSLDRIGAGDYQPTEQDILRTRVKTTGIVETHFTFKNLHFRLFDVGGQRSERKKWIHCFEDVTAIIFCVALSGYDQVLHEDETTNRMHESLKLFDSICNNKWFTDTSIILFLNKKDIFEEKIKKSPLTICFPEYTGPSAFTEAVAHIQGQYESKNKSAHKEVYSHVTCATDTNNIQFVFDAVTDVIIAKNLRGCGLY

SEQ ID NO: 7601 - protein, 333 aa, Mus musculus
LREDGEKAAREVKLLLLGAGESGKSTIVKQMKIIHEDGYSEEECRQYRAVVYSNTIQSIIAIVKAMGNLQIDFADPQRADDARQLFALSCAAEEQGMLPEDLSGVIRRLWADHGVQACFGRSREYQLNDSAAYYLNDLERIAQSDYIPTQQDVLRTRVKTTGIVETHFTFKDLHFKMFDVGGQRSERKKWIHCFEGVTAIIFCVALSAYDLVLAEDEEMNRMHESMKLFDSICNNKWFTDTSIILFLNKKDLFEEKITQSSLTICFPEYTGANKYDEAASYIQSKFEDLNKRKDTKEIYTHFTCATDTKNVQFVFDAVTDVIIKNNLKDCGLF

SEQ ID NO: 7602 - protein, 355 aa, Mus musculus
MAGCCCLSAEEKESQRISAEIERQLRRDKKDARRELKLLLLGTGESGKSTFIKQMRIIHGSGYSDEDRKGFTKLVYQNIFTAMQAMIRAMDTLRIQYMCEQNKENAQIIREVEVDKVTALSRDQVAAIKQLWLDPGIQECYDRRREYQLSDSAKYYLTDIERIAMPSFVPTQQDVLRVRVPTTGIIEYPFDLENIIFRMVDVGGQRSERRKWIHCFESVTSIIFLVALSEYDQVLAECDNENRMEESKALFRTIITYPWFLNSSVILFLNKKDLLEEKIMYSHLISYFPEYTGPKQDVKAARDFILKLYQDQNPDKEKVIYSHFTCATDTENIRFVFAAVKDTILQLNLREFNLV

SEQ ID NO: 7603 - protein, 355 aa, Mus musculus
MAGCCCLSAEEKESQRISAEIERHVRRDKKDARRELKLLLLGTGESGKSTFIKQMRIIHGSGYSDEDRKGFTKLVYQNIFTAMQAMIRAMDTLRIQYMCEQNKENAQIIREVEVDKVTALSRDQVAAIKQLWLDPGIQECYDRRREYQLSDSAKYYLTDIERIAMPSFVPTQQDVLRVRVPTTGIIEYPFDLENIIFRMVDVGGQRSERRKWIHCFESVTSIIFLVALSEYDQVLAECDNENRMEESKALFRTIITYPWFLNSSVILFLNKKDLLEEKIMYSHLISYFPEYTGPKQDVKAARDFILKLYQDQNPDKEKVIYSHFTCATDTENIRFVFAAVKDTILQLNLREFNLV

SEQ ID NO: 7604 - protein, 355 aa, Mus musculus
MAGCCCLSAEEKESQRISAEIERQLRRDKKDARRELKLLLLGTGESGKSTFIKQMRIIHGSGYSDEDRKGFTKLVYQNIFTAMQAMIRAMDTLRIQYMCEQNKENAQIIREVEVDKVTALSRDQVAAIKQLWLDPGIQECYDRRREYQLSDSAKYYLTDIERIAMPSFVPTQQDVLRVRVPTTGIIEYPFDLENIIFRMVDVGGQRSERRKWIHCFESVTSIIFLVALSEYDQVLAECDNENRMEESKALFRTIITYPWFLNSSVILFLNKKDLLEEKIMYSHLISYFPEYTGPKQDVKAARDFILKLYQDQNPDKEKVIYSHFTCATDTENIPFVFAAVKDTILQLNLREFNLV

SEQ ID NO: 7605 - protein, 359 aa, Mus musculus
MTLESMMACCLSDEVKESKRINAEIEKQLRRDKRDARRELKLLLLGTGESGKSTFIKQMRIIHGAGYSEEDKRGFTKLVYQNIFTAMQAMVRAMETLKILYKYEQNKANALLIREVDVEKVTTFEHQYVNAIKTLWSDPGVQECYDRRREFQLSDSAKYYLTDVDRIATVGYLPTQQDVLRVRVPTTGIIEYPFDLENIIFRMVDVGGQRSERRKWIHCFENVTSIMFLVALSEYDQVLVESDNENRMEESKALFRTIITYPWFQNSSVILFLNKKDLLEDKILHSHLVDYFPEFDGPQRDAQAAREFILKMFVDLNPDSDKIIYSHFTCATDTENIRFVFAAVKDTILQLNLKEYNLV

SEQ ID NO: 7606 - protein, 359 aa, Mus musculus
MTLESMMACCLSDEVKESKRINAEIEKQLRRDKRDARRELKLLLLGTGESGKSTFIKQMRIIHGAGYSEEDKRGFTLLVYQNIFTAMQAMVRAMETLKILYKYEQNKANALLIREVDVEKVTTFEHQYVNAIKTLWSDPGVQECYDRRREFQLSDSAKYYLTDVDRIATVGYLPTQQDVLRVRVPTTGIIEYPFDLENIIFRMVDVGGQRSERRKWIHCFENVTSIMFLVALSEYDQVLVESDNENRMEESKALFRTIITYPWFQNSSVILFLNKKDLLEDKILHSHLVDYFPEFDGPQRDAQAAREFILKMFVDLNPDSDKIIYSHFTCATDTENIRFVFAAVKDTILQLNLKEYNLV

SEQ ID NO: 7607 - protein, 359 aa, Mus musculus
MTLENLMACCLSDEVKESKRINAEIEKQLRRDKRDARRELKLLLLGTGESGKSTFIKQMRIIHGAGYSEEDKRGFTKLVYQNIFTAMQAMVRAMATLKILYKYEQNKANALLIREVDLEKVTTFEHQYVNAIKTLWSDPGVQECYDRRPEFQLSDSAKYYLTDVDRIATVGYLPTQQDVLRVRVPTTGIIEYPFDLENIIFRMVDVGGQRSERRKWIHCFENVTSIMFLVALSEYDQVLVESDNENRMEESKALFRTIITYPWFQNSSVILFLNKKDLLEDKILHSHLVDYFPEFDGPQRDAQAAREFILKMFVDLNPDSDKIIYSHFTCATDTENIRFVFAAVKDTILQLNLKEYNLV

SEQ ID NO: 7608 - protein, 353 aa, Mus musculus
MACCLSEEAKEARRINDEIERHVRRDKRDARRELKLLLLGTGESGKSTFIKQMRIIHGSGYSDEDKRGFTKLVYQNIFTAMQAMIRAMDTLKIPYKYEHNKAHAQLVREVDVEKVSAFENPYVDAIKSLWNDPGIQECYDRRREYQLSDSTKYYLNDLDRVADPSYLPTQQDVLRVRVPTTGIIEYPFDLQSVIFRMVDVGGQRSERRKWIHCFENVTSIMFLVALSEYDQVLVESDNENRMEESKALFRTIITYPWFQNSSVILFLNKKDLLEEKIMYSHLVDYFPEYDGPQRDAQAAREFILKMFVDLNPDSDKIIYSHFTCATDTENIRFVFAAVKDTILQLNLKEYNLV

SEQ ID NO: 7609 - protein, 359 aa, Mus musculus
MTLESIMACCLSEEAKEARRINDEIERHVRRDKRDARRELKLLLLGTGESGKSTFIKQMRIIHGSGYSDEDKRGFTKLVYQNIFTAMQAMIRAMDTLKIPYKYEHNKAHAQLVREVDVEKVSAFENPYVDAIKSLWNDPGIQECYDRRREYQLSDSTKYYLNDLDRVADPSYLPTQQDVLRVRVPTTGIIEYPFDLQSVIFRMVDVGGQRSERRKWIHCFENVTSIMFLVALSEYDQVLVESDNENRMEESKALFRTIITYPWFQNSSVILFLNKKDLLEEKIMYSHLVDYFPEYDGPQRDAQAAREFILKMFVDLNPDSDKIIYSHFTCATDTENIRFVFAAVKDTILQLNLKEYNLV

SEQ ID NO: 7610 - protein, 355 aa, Mus musculus
MGCRQSSEEKEAARRSRRIDRHLRSESQRQRREIKLLLLGTSNSGKSTIVKQMKIIHSGGFNLDACKEYKPLIIYNAIDSLTRIIRALAALKIDFHNPDRAYDAVQLFALTGPAESKGEITPELLGVMRRLWADPGAQACFGRSSEYHLEDNAAYYLNDLERIAAPDYIPTVEDILRSRDMTTGIVENKFTFKELTFKMVDVGGQRSERKKWIHCFEGVTAIIFCVELSGYDLKLYEDNQTSRMAESLRLFDSICNNNWFINTSLILFLNKKDLLAEKIRRIPLSVCFPEYKGQNTYEEAAVYIQRQFEDLNRNKETKEIYSHFTCATDTSNIQFVFDAVTDVIIQNNLKYIGLC

SEQ ID NO: 7611 - protein, 374 aa, Mus musculus
MARSLTWGCCPWCLTEEEKTAARIDQEINRILLEQKKQEREELKLLLLGPGESGKSTFIKQMRIIHGVGYSEEDRRAFRLLIYQNIFVSMQAMIDAMDRLQIPFSRPDSKQHASLVMTQDPYKVSTFEKPYAVAMQYLWRDAGIRACYERRREFHLLDSAVYYLSHLERISEDSYIPTAQDVLRSRMPTTGINEYCFSVKKTKLRIVDVGGQRSERRKWIHCFENVIALIYLASLSEYDQCLEENDQENRMEESLALFSTILELPWFKSTSVILFLNKTDILEDKIHTSHLATYFPSFQGPRRDAEAAKSFILDMYARVYASCAEPQDGGRKGSRARRFFAHFTCATDTQSVRSVFKDVRDSVLARYLDEINLL

SEQ ID NO: 7612 - protein, 377 aa, Mus musculus
MADFLPSRSVLSVCFPGCVLTNGEAEQQRKSKEIDKCLSREKTYVKRLVKILLLGAGESGKSTFLKQMRIIHGQDFDQRAREEFRPTIYSNVIKGMRVLVDAREKLHIPWGDNKNQLHGDKLMAFDTRAPMAAQGMVETRVFLQYLPAIRALWEDSGIQNAYDRRREFQLGESVKYFLDNLDKLGVPDYIPSQQDILLARRPTKGIHEYDFEIKNVPFKMVDVGGQRSERKRWFECFDSVTSILFLVSSSEFDQVLMEDRQTNRLTESLNIFETIVNNRVFSNVSIILFLNKTDLLEEKVQVVSIKDYFLEFEGDPHCLRDVQKFLVECFRGKRRDQQQRPLYHHFTTAINTENIRLVFRDVKDTILHDNLKQLMLQ

SEQ ID NO: 7613 - protein, 379 aa, Mus musculus
MSGVVRTLSRCLLPAEAGARERRAGAARDAEREARRRSRDIDALLARERRAVRRLVKILLLGAGESGKSTFLKQMRIIHGREFDQKALLEFRDTIFDNILKGSRVLVDARDKLGIPWQHSENEKHGMFLMAFENKAGLPVEPATFQLYVPALSALWRDSGIREAFSRRSEFQLGESVKYFLDNLDRIGQLNYFPSKQDILLARKATKGIVEHDFVIKKIPFKMVDVGGQRSQRQKWFQCFDGITSILFMVSSSEYDQVLMEDRRTNRLVESMNIFETIVNNKLFFNVSIILFLNKMDLLVEKVKSVSIKKHFPDFKGDPHRLEDVQRYLVQCFDRKRRNRSKPLFHHFTTAIDTENIRFVFHAVKDTILQENLKDIMLQ

SEQ ID NO: 7614 - protein, 310 aa, Mus musculus
SGKSTFIKQMRIIHGSGYSDEDRKGFTKLVYQNIFTAMQAMIRAMDTLRIQYMCEQNKENAQIIREVEVDKVTALSRDQVAAIKQLWLDPGIQECYDRRREYQLSDSAKYYLTDIERIAMPSFVPTQQDVLRVRVPTTGIIEYPFDLENIIFRMVDVGGQRSERRKWIHCFESVTSIIFLVALSEYDQVLAECDNENRMEESKALFRTIITYPWFLNSSVILFLNKKDLLEEKIMYSHLISYFPEYTGPKQDVKAARDFILKLYQDHNPDKEKVIYSHFTCATDTENIRFVFAAVKDTILQLNLREFNLV

SEQ ID NO: 7615 - protein, 381 aa, Mus musculus
MGCLGNSSKTAEDQGVDEKERREANKKIEKQLQKERLAYKATHRLLLLGAGESGKSTIVKQMRILHVNGFNPEEKKQKILDIRKNVKDAIVTIVSAMSTIIPPVPLANPENQFRSDYIKSIAPITDFEYSQEFFDHVKKLWDDEGVKACFERSNEYQLIDCAQYFLERIDSVSLVDYTPTDQDLLRCRVLTSGIFETRFQVDKVNFHMFDVGGQRDERRKWIQCFNDVTAIIYVAACSSYNMVIREDNNTNRLRESLDLFESIWNNRWLRTISIILFLNKQDMLAEKVLAGKSKIEDYFPEYANYTVPEDATPDAGEDPKVTRAKFFIRDLFLRISTATGDGKHYCYPHFTCAVDTENIRRVFNDCRDIIQRMHLKQYELL

SEQ ID NO: 7616 - protein, 194 aa, Mus musculus
QRLWKDSGIQACFDRASEYQLNDSAGYYLSDLERLVTPGYVPTEQDVLRSRVKTTGIIETQFSFKDLNFRMFDVGGQRSERKKWIHCFEGVTCIIFIAALSAYDMVLVEDDEVNRMHESLHLFNSICNHRYFATTSIVLFLNKKDVFSEKIKKAHLSICFPDYDGPNTYEDAGNYIKVQFLELNMRRDVKEIYS

SEQ ID NO: 7617 - protein, 756 aa, Mus musculus
MEGSPTTATAVEGKVPSPERGDGSSTQPEAMDAKPAPAAQAVSTGSDAGAPTDSAMLTDSQSDAGEDGTAPGTPSDLQSDPEELEEAPAVRADPDGGAAPVAPATPAESESEGSRDPAAEPASEAVPATTAESASGAAPVTQVEPAAAAVSATLAEPAARAAPITPKEPTTRAVPSARAHPAAGAVPGAPAMSASARAAAARAAYAGPLVWGARSLSATPAARASLPARAAAAARAASAARAVAAGRSASAAPSRAHLRPPSPEIQVADPPTPRPPPRPTAWPDKYERGRSCCRYEASSGICEIESSSDESEEGATGCFQWLLRRNRRPGLPRSHTVGSNPVRNFFTRAFGSCFGLSECTRSRSLSPGKAKDPMEERRKQMRKEAIEMREQKRADKKRSKLIDKQLEEEKMDYMCTHRLLLLGAGESGKSTIVKQMRILHVNGFNGDSEKATKVQDIKNNLKEAIETIVAAMSNLVPPVELANPENQFRVDYILSVMNVPNFDFPPEFYEHAKALWEDEGVRACYERSNEYQLIDCAQYFLDKIDVIKQADYVPSDQDLLRCRVLTSGIFETKFQVDKVNFHMFDVGGQRDERRKWIQCFNDVTAIIFVVASSSYNMVIREDNQTNRLQEALNLFKSIWNNRWLRTISVILFLNKQDLLAEKVLAGKSKIEDYFPEFARYTTPEDATPEPGEDPRVTRAKYFIRDEFLRISTASGDGRHYCYPHFTCAVDTENIRRVFNDCRDIIQRMHLRQYELL

SEQ ID NO: 7618 - protein, 377 aa, Mus musculus
MAARGAAGLRGGGEKAQREANKKIEKQLQKDKQVYRATHRLLLLGAGESGKSTIVKQMRILHVNGFNGDEKATKVQDIKNNLKEAIETIVAAMSNLVPPVELANPENQFRVDYILSVMNLPNFDFPPEFYEHAKALWEDEGVRACYERSNEYQLIDCAQYFLDKIDVIKQADYVPSDQDLLRCRVLTSGIFETKFQVDKVNFHMFDVGGQRDERRKWIQCFNDVTAIIFVVASSSYNMVIREDNQTNRLQEALNLFKSIWNNRWLRTISVILFLNKQDLLAEKVLAGKSKIEDYFPEFARYTTPEDATPEPGEDPRVTRAKYFIRDEFLRISTASGDGRHYCYPHFTCAVDTENIRRVFNDCRDIIQRMHLRQYELL

SEQ ID NO: 7619 - protein, 232 aa, Mus musculus
PELLGVMRRLWADPGAQACFGRSSEYHLEDNAAYYLNDLERIAAPDYIPTVEDILRSRDMTTGIVENKFTFKELTFKMVDVGGQRSERKKWIHCFEGVTAIIFCVELSGYDLKLYEDNQTSRMAESLRLFDSICNNNWFINTSLILFLNKKDLLAEKIRRIPLSVCFPEYKGQNTYEEAAVYIQRQFEDLNRNKETKEIYSHFTCATDTSNIQFVFDAVTDVIIQNNLKYIG

SEQ ID NO: 7620 - protein, 394 aa, Mus musculus
MGCLGNSKTEDQRNEEKAQREANKKIEKQLQKDKQVYRATHRLLLLGAGESGKSTIVKQMRILHVNGFNGEGGEEDPQAARSNSDGEKATKVQDIKNNLKEAIETIVAAMSNLVPPVELANPENQFRVDYILSVMNVPDFDFPPEFYEHAKALWEDEGVRACYERSNEYQLIDCAQYFLDKIDVIKQADYVPSDQDLLRCRVLTSGIFETKFQVDKVNFHMFDVGGQRDERRKWIQCFNDVTAIIFVVASSSYNMVIREDNQTNRLQEALNLFKSIWNNRWLRTISVILFLNKQDLLAEKVLAGKSKIEDYFPEFARYTTPEDATPEPGEDPRVTRAKYFIRDEFLRISTASGDGRHYCYPHFTCAVDTENIRRVFNDCRDIIQRMHLPQYELL

SEQ ID NO: 7621 - protein, 362 aa, Mus musculus
MGDSVQILLVFMDKGAGESGKSTIVKQMRILHVNGFNGEGGEEDPQAARSNSDGEKATKVQDIKNNLKEAIETIVAAMSNLVPPVELANPENQFRVDYILSVMNLPNFDFPPEFYEHAKALWEDEGVRACYERSNEYQLIDCAQYFLDKIDVIKQADYVPSDQDLLRCRVLTSGIFETKFQVDKVNFHMFDVGGQRDERRKWIQCFNDVTAIIFVVASSSYNMVIREDNQTNRLQEALNLFKSIWNNRWLRTISVILFLNKQDLLAEKVLAGKSKIEDYFPEFARYTTPEDATPEPGEDPRVTRAKYFIRDEFLRISTASGDGRHYCYPHFTCAVDTENIRRVFNDCRDIIQRMHLRQYELL

SEQ ID NO: 7622 - protein, 241 aa, Mus musculus
MGCRQSSEEKEAARRSRRIDRHLRSESQRQRREIKLLLLGTSNSGKSTIVKQMKIIHSGGFNLDACKEYKPLIIYNAIDSLTRIIRALAALKIDFHNPDRAYDAVQLFALTGPAESKGEITPELLGVMRRLWADPGAQACFGRSSEYHLEDNAAYYLNDLERIAAPDYIPTVEDILRSRDMTTGIVENKFTFKELTFKMVDVGGQRSERKKWIHCFEGVTAIIFCVELSGYDLKLYEDNQT

SEQ ID NO: 7623 - protein, 243 aa, Mus musculus
MGSGISSESKESARRSKELEKKLQEDAERDARTVKLLLLGAGESGKSTIVKQMKIIHKNGYSKQECMEFKAVIYSNTLQSILAIVKAMATLGIDYVNPRSREDQEQLHSMANTLEDGDMTPQLAEIIKRLWGDPGIQACFERASEYQLNDSAAYYLNDLDRLTAPGYVPNEQDVLHSRVKTTGIIETQFSFKDLNFSDGSMDRLHESYNLMEIILEFFSSQCANCQADRTTYLKVLLKAERAN

SEQ ID NO: 7624 - protein, 302 aa, Mus musculus
QDIKNNLKEAIETIVAAMSNLVPPVELANPENQFRVDYILSVMNVPNFDFPPEFYEHAKALWEDEGVRACYERSNEYQLIDCAQYFLDKIDVIKQADYVPSDQDLLRCRVLTSGIFETKFQVDKVNFHMFDVGGQRDERRKWIQCFNDVTAIIFVVASSSYNMVIREDNQTNRLQEALNLFKSIWNNRWLRTISVILFLNKQDLLAEKVLAGKSKIEDYFPEFARYTTPEDATPEPGEDPRVTRAKYFIRDEFLRISTASGDGRHYCYPHFTCAVDTENIRRVFNDCRDIIQRMHLRQYELL

SEQ ID NO: 7625 - protein, 337 aa, Mus musculus
MNLFLKVLVQRLWKSGEEDPQAARSNSDGEKATKVQDIKNNLKEAIETIVAAMSNLVPPVELANPENQFRVDYILSVMNVPNFDFPPEFYEHAKALWEDEGVPACYERSNEYQLIDCAQYFLDKIDVIKQADYVPSDQDLLRCRVLTSGIFETKFQVDKVNFHMFDVGGQRDERRKWIQCFNDVTAIIFVVASSSYNMVIREDNQTNRLQEALNLFKSIWNNRWLRTISVILFLNKQDLLAEKVLAGKSKIEDYFPEFARYTTPEDATPEPGEDPRVTRAKYFIRDEFLRISTASGDGRHYCYPHFTCAVDTENIRRVFNDCRDIIQRMHLRQYELL

SEQ ID NO: 7626 - protein, 157 aa, Mus musculus
MFDVGGQRSERKKWIHCFEGVTCIIFCAALSAYDMVLVEDDEVNRMHESLHLFNSICNHKFFAATSIVLFLNKKDLFEEKIKKVHLSICFPEYDGNNSYEDAGNYIKSQFLDLNMRKDVKEIYSHMTCATDTQNVKFVFDAVTDIIIKENLKDCGLF

SEQ ID NO: 7627 - protein, 167 aa, Mus musculus
MNDNLEQVIRTPLKGGQRSERKKWIHCFEGVTCIIFCAALSAYDMVLVEDEEVNRMHESLHLFNSICNHKYFATTSIVLFLNKKDLFQEKVAKVHLSICFPEYTGPNTFEDAGNYIKNQFLDLNLKKEDKEIYSHMTCATDTQNVKFVFDAVTDIIIKENLKDCGLF

SEQ ID NO: 7628 - protein, 165 aa, Mus musculus
FDVGGQRDERRKWIQCFNDVTAIIYVAACSSYNMVIREDNNTNRLRESLDLFESIWNNRWLRTISIILFLNKQDMLAEKVLAGKSKIEDYFPEYANYTVPEDATPDAGEDPKVTRAKFFIRDLFLRISTATGDGKHYCYPHFTCAVDTENIRRVFNDCRDIIQRM

SEQ ID NO: 7629 - protein, 230 aa, Mus musculus
MGLCYSLRPLLFGSPEDTPCAASEPCAEDAQPSAAPAPASIPAPAPVGTLLRRGGGRIVANARPPGELQSRRRQEQLRAEEREAAKEARKVSRGIDRMLREQKRDLQQTHRLLLLGAGESGKSTIVKQMRILHVNGFNPEEKKQKILDIRKNVKDAIVTIVSAMSTIIPPVPLANPENQFRSDYIKSIAPITDFEYSQEFFDHVKKLWDDEGVKACFERSNEYQLIDCAQ

SEQ ID NO: 7630 - protein, 173 aa, Mus musculus
MADFLPSRSVLSVCFPGCVLTNGEAEQQRKSKEIDKCLSREKTYVKRLVKILLLGAGESGKSTFLKQMRIIHGQDFDQRAREEFRPTIYSNVIKGMRVLVDAREKLHIPWGDNKNQLHGDKLMAFDTRAPMAAQGMVETRVFLQYLPAIRALWEDSGIQNAYDRRREFQLMET

SEQ ID NO: 7631 - protein, 132 aa, Mus musculus
MGCTVSAYDLVLAEDEEMNRMHESMKLFDSICNNKWFTDTSIILFLNKKDLFEEKITQSSLTICFPEYTGANKYDEAASYIQSKFEDLNKRKDTKEIYTHFTCATDTKNVQFVFDAVTDVIIKNNLKDCGLF

SEQ ID NO: 7632 - protein, 61 aa, Mus musculus
SERRKWIHCFEGVTAIIFCVELSGYDLKLYEDNQTSRMAESLRLFDSICNNNWFINTSLIL

SEQ ID NO: 7633 - protein, 61 aa, Mus musculus
SERRKWIHCFENVTSIMFLVALSEYDQVLVESDNENRMEESKALFRTIITYPWFQNSSVIL

SEQ ID NO: 7634 - protein, 354 aa, Rattus norvegicus
MGSGISSESKESAKRSKELEKKLQEDAERDARTVKLLLLGAGESGKSTIVKQMKIIHKNGYSKQECMEFKAVVYSNTLQSILAIVKAMTTLGIDYVNPRSREDQQLLLSMANTLEDGDMTPQLAEIIKRLWGDPGIQACFERASEYQLNDSAAYYLNDLDRLTAPGYVPNEQDVLHSRVKTTGIIETQFSFKDLNFRMFDVGGQRSERKKWIHCFEGVTCIIFCAALSAYDMVLVEDEEVNRMHESLHLFNSICNHKYFATTSIVLFLNKKDLFQEKVTKVHLSICFPEYTGPNTFEDAGNYIKNQFLDLNLKKEDKEIYSHMTCATDTQNVKFVFDAVTDIIIKENLKDCGLF

SEQ ID NO: 7635 - protein, 354 aa, Rattus norvegicus
MGCTLSAEDKAAVERSKMIDRNLREDGEKAAREVKLLLLGAGESGKSTIVKQMKIIHEAGYSEEECKQYKAVVYSNTIQSIIAIIRAMGRLKIDFGDAARADDARQLFVLAGAAEEGFMTAELAGVIKRLWKDSGVQACFNRSREYQLNDSAAYYLNDLDRIAQPNYIPTQQDVLRTRVKTTGIVETHFTFKDLHFKMFDVGGQRSERKKWIHCFEGVTAIIFCVALSDYDLVLAEDEEMNRMHESMKLFDSICNNKWFTDTSIILFLNKKDLFEEKIKKSPLTICYPEYAGSNTYEEAAAYIQCQFEDLNKRKDTKEIYTHFTCATDTKNVQFVFDAVTDVIIKNNLKDCGLF

SEQ ID NO: 7636 - protein, 353 aa, Rattus norvegicus
GCTLSAEDKAAVERSKMIDRNLREDGEKAAREVKLLLLGAGESGKSTIVKQMKIIHEAGYSEEECKQYKAVVYSNTIQSIIAIIRAMGRLKIDFGDAARADDARQLFVLAGAAEEGFMTAELAGVIKRLWKDSGVQACFNRSREYQLNDSAAYYLNDLDRIAQPNYIPTQQDVLRTRVKTTGIVETHFTFKDLHFKMFDVGAQRSERKKWIHCFEGVTAIIFCVALSDYDLVLAEDEEMNRMHESMKLFDSICNNKWFTDTSIILFLNKKDLFEEKIKKSPLTICYPEYAGSNTYEEAAAYIQCQFEDLNKRKDTKEIYTHFTCATDTKNVQFVFDAVTDVIIKNNLKDCGLF

SEQ ID NO: 7637 - protein, 353 aa, Rattus norvegicus
GCTLSAEDKAAVERSKMIDRNLREDGEKAAREVKLLLLGAGESGKSTIVKQMKIIHEAGYSEEECKQYKAVVYSNTIQSIIAIIRAMGRLKIDFGDAARADDARQLFVLAGAAEEGFMTAELAGVIKRLWKDSGVQACFNRSREYQLNDSAAYYLNDLDRIAQPNYIPTQQDVLRTRVKTTGIVETHFTFKDLHFKMFDVGGLRSERKKWIHCFEGVTAIIFCVALSDYDLVLAEDEEMNRMHESMKLFDSICNNKWFTDTSIILFLNKKDLFEEKIKKSPLTICYPEYAGSNTYEEAAAYIQCQFEDLNKRKDTKEIYTHFTCATDTKNVQFVFDAVTDVIIKNNLKDCGLF

SEQ ID NO: 7638 - protein, 353 aa, Rattus norvegicus
GCTLSAEDKAAVERSKMIDRNLREDGEKAAREVKLLLLGAVESGKSTIVKQMKIIHEAGYSEEECKQYKAVVYSNTIQSIIAIIRAMGRLKIDFGDAARADDARQLFVLAGAAEEGFMTAELAGVIKRLWKDSGVQACFNRSREYQLNDSAAYYLNDLDRIAQPNYIPTQQDVLRTRVKTTGIVETHFTFKDLHFKMFDVGGQRSERKKWIHCFEGVTAIIFCVALSDYDLVLAEDEEMNRMHESMKLFDSICNNKWFTDTSIILFLNKKDLFEEKIKKSPLTICYPEYAGSNTYEEAAAYIQCQFEDLNKRKDTKEIYTHFTCATDTKNVQFVFDAVTDVIIKNNLKDCGLF

SEQ ID NO: 7639 - protein, 354 aa, Rattus norvegicus
MGCTLSAEDKAAVERSKMIDRNLREDGEKAAKEVKLLLLGAGESGKSTIVKQMKIIHEDGYSEDECKQYKVVVYSNTIQSIIAIIRAMGRLKIDFGEAARADDARQLFVLAGSAEEGVMTSELAGVIKRLWRDGGVQACFSRSREYQLNDSASYYLNDLDRISQTNYIPTQQDVLRTRVKTTGIVETHFTFKELYFKMFDVGGQRSERKKWIHCFEGVTAIIFCVALSDYDLVLAEDEEMNRMHESMKLFDSICNNKWFTDTSIILFLNKKDLFEEKIKRSPLTICYPEYTGSNTYEEAAAYIQCQFEDLNRRKDTKEVYTHFTCATDTKNVQFVFDAVTDVIIKNNLKECGLY

SEQ ID NO: 7640 - protein, 354 aa, Rattus norvegicus
MGCTLSAEERAALERSKAIEKNLKEDGISAAKDVKLLLLGAGESGKSTIVKQMKIIHEDGFSGEDVKQYKPVVYSNTIQSLAAIVRAMDTLGVEYGDKERKADSKMVCDVVSRMEDTEPFSAELLSAMMRLWGDSGIQECFNRSREYQLNDSAKYYLDSLDRIGAADYQPTEQDILRTRVKTTGIVETHFTFKNLHFRLFDVGGQRSERKKWIHCFEDVTAIIFCVALSGYDQVLHEDETTNRMHESLMLFDSICNNKFFIDTSIILFLNKKDLFGEKIKKSPLTICFPEYPGSNTYEDAAAYIQTQFESKNRSPNKEIYCHMTCATDTNNIQVVFDAVTDIIIANNLRGCGLY

SEQ ID NO: 7641 - protein, 315 aa, Rattus norvegicus
REVKLLLLGAGESGKSTIVKQMKIIHEAGYSEEECKQYKAVVYSNTIQSIIAIIRAMGRLKIDFGDAARADDARQLFVLAGAAEEGFMTAELAGVIKRLWKDSGVQACFNRSREYQLNDSAAYYLNDLDRIAQPNYIPTQQDVLRTRVKTTGIVETHFTFKDLHFKMFDVGGQRSERKKWIHCFEGVTAIIFCVALSDYDLVLAEDEEMNRMHESMKLFDSICNNKWFTDTSIILFLNKKDLFEEKIKKSPLTICYPEYAGSNTYEEAAAYIQCQFEDLNKRKDTKEIYTHFTCSTDTKNVQFVFDAVTDVIIKN

SEQ ID NO: 7642 - protein, 355 aa, Rattus norvegicus
MGCTVSAEDKAAAERSKMIDKNLREDGEKAAREVKLLLLGAGESGKSTIVKQMKIIHEDGYSEEECRQYRAVVYSNTIQSIMAIVKAMGNLQIDFADPQRADDARQLFALSCAAEEQGMLPEDLSGVIRRLWADHGVQACFGRSREYQLNDSAAYYLNDLERIAQSDYIPTQQDVLRTRVKTTGIVETHFTFKDLHFKMFDVGGQRSERKKWIHCFEGVTAIIFCVALSAYDLVLAEDEEMNRMHESMKLFDSICNNKWFTDTSIILFLNKKDLFEEKITQSPLTICFPEYTGANKYDEAASYIQSKFEDLNKRKDTKEIYTHFTCATDTKNVQFVFDAVTDVIIKNNLKDCGLF

SEQ ID NO: 7643 - protein, 354 aa, Rattus norvegicus
MGCTLSAEERAALERSKAIEKNLKEDGISAAKDVKLLLLGAGESGKSTIVKQMKIIHEDGFSGEDVKQYKPVVYSNTIQSLAAIVRAMDTLGVEYGDKERKADSKMVCDVVSRMEDTEPFSAELLSAMMRLWGDSGIQECFNRSREYQLNDSAKYYLDSLDRIGAADYQPTEQDILRTRVKTTGIVETHFTFKNLHFRLFDVGGQRSERKKWIHCFEDVTAIIFCVALSGYDQVLHEDETTNRMHEFLKLFDSICNNKWFTDTSIILFLNKKDIFEEKIKKSPLTICFPEYTGPSAFTEAVAHIQGQYESKNKSAHKEVYSHVTCATDTNNIQFVFDAVTDVIIAKNLRGCGLY

SEQ ID NO: 7644 - protein, 310 aa, Rattus norvegicus
GKSTIVKQMKIIHEDGFSGEDVKQYKPVVYSNTIQSLAAIVRAMDTLGVEYGDKERKADSKMVCDVVSRMEDTEPFSAELLSAMMRLWGDSGIQECFNRSREYQLNDSAKYYLDSLDRIGAADYQPTEQDILRTRVKTTGIVETHFTFKNLHFRLFDVGGQRSERKKWIHCFEDVTAIIFCVALSGYDQVLHEDETTNRMHESLMLFDSICNNKFFIDTSIILFLNKKDLFGEKIKKSPLTICFPEYPGSNTYEDAAAYIQTQFESKNRSPNKEIYCHMTCATDTNNIQVVFDAVTDIIIANNLRGCGLY

SEQ ID NO: 7645 - protein, 359 aa, Rattus norvegicus
MTLESMIACCLSDEVKESKRINAEIEKQLRRDKRDARRELKLLLLGTGESGKSTFIKQMRIIHGAGYSEEDKRGFTKLVYQNIFTAMQAVVRAMDTLKIRYKYEQNKANALLIREVDVEKVTTFEHQYVNAIKTLWSDPGVQECYDRRREFQLSDSAKYYLTDVDRIATVGYLPTQQDVLRVRVPTTGIIEYPFDLENIIFRMVDVGGQRSERRKWIHCFENVTSIMFLVALSEYDQVLVESDNENRMEESKALFRTIITYPWFQHSSVILFLNKKDLLEDKILHSHLVDYFPEFDGPQRDAQAAREFILKMFVDLNPDSDKIIYSHFTCATDTENIRFVFAAVKDTILQLNLKEYNLV

SEQ ID NO: 7646 - protein, 353 aa, Rattus norvegicus
MACCLSEEAKEARRINDEIERQLRRDKRDARRELKLLLLGTGESGKSTFIKQMRIIHGSGYSDEDKRGFTKLVYQNIFTAMQAMVRAMDTLKIPYKYEHNKAHAQLVREVDVEKVSAFENPYVDAIKSLWNDPGIQECYDRRREYQLSDSTKYYLNDLDRVADPSYLPTQQDVLRVRVPTTGIIEYPFDLQSVIFRMVDVGGQRSERRKWIHCFENVTSIMFLVALSEYDQVLVESDNENRMEESKALFRTIITYPWFQNSSVILFLNKKDLLEEKIMYSHLVDYFPEYDGPQRDAQAAREFILKMFVDLNPDSDKIIYSHFTCATDTENIRFVFAAVKDTILQLNLKEYNLV

SEQ ID NO: 7647 - protein, 359 aa, Rattus norvegicus
MTLESIMACCLSEEAKEARRINDEIERQLRRDKRDARRELKLLLLGTGESGKSTFIKQMRIIHGSGYSDEDKRGFTKLVYQNIFTAMQAMVRAMDTLKIPYKYEHNKAHAQLVREVDVEKVSAFENPYVDAIKSLWNDPGIQECYDRRREYQLSDSTKYYLNDLDRVADPSYLPTQQDVLRVRVPTTGIIEYPFDLQSVIFRMVDVGGQRSERRKWIHCFENVTSIMFLVALSEYDQVLVESDNENRMEESKALFRTIITYPWFQNSSVILFLNKKDLLEEKIMYSHLVDYFPEYDGPQRDAQAAREFILKMFVDLNPDSDKIIYSHFTCATDTENIRFVFAAVKDTILQLNLKEYNLV

SEQ ID NO: 7648 - protein, 355 aa, Rattus norvegicus
MGCRQSSEEKEAARRSRRIDRHLRSESQRQRREIKLLLLGTSNSGKSTIVKQMKIIHSGGFNLEACKEYKPLIIYNAIDSLTRIIRALAALKIDFHNPDRAYDAVQLFALTGPAESKGEITPELLGVMRRLWADPGAQACFGRSSEYHLEDNAAYYLNDLERIAAPDYIPTVEDILRSRDMTTGIVENKFTFKELTFKMVDVGGQRSERKKWIHCFEGVTAIIFCVELSGYDLKLYEDNQTSRMAESLRLFDSICNNNWFINTSLILFLNKKDLLSEKIRRIPLSVCFPEYKGQNTYEEAAVYIQRQFEDLNRNKETKEIYSHFTCATDTSNIQFVFDAVTDVIIQNNLKYIGLC

SEQ ID NO: 7649 - protein, 374 aa, Rattus norvegicus
MARSLTWGCCPWCLTEEEKTAARIDQEINKILLEQKKQERGELKLLLLGPGESGKSTFIKQMRIIHGAGYSEEDRRAFRLLVYQNIFVSMQAMIEAMDRLQIPFSRPDSKQHASLVMTQDPYKVSSFEKPYAVAMQYLWRDAGIRACYERRREFHLLDSAVYYLSHLERIAEDDYIPTAQDVLRSRMPTTGINEYCFSVQKTKLRIVDAGGQKSERKKWIHCFENVIALIYLASLSEYDQCLEENSQENRMKESLALFSTILELPWFKSTSVILFLNKTDILEDKIHTSHLASYFPSFQGPRRDAEAAKRFILDMYARVYASCAEPHDGGRKGSRARRLFAHFTCATDTHSVRSVFKDVRDSVLARYLDEINLL

SEQ ID NO: 7650 - protein, 379 aa, Rattus norvegicus
MSGVVRTLSRCLLPAEAGARERRAGAARDAEREARRRSRDIDALLARERRAVRRLVKILLLGAGESGKSTFLKQMRIIHGREFDQKALLEFRDTIFDNILKGSRVLVDARDKLGIPWQHSENEKHGMFLMAFENKAGLPVEPATFQLYVPALSALWRDSGIREAFSRRSEFQLGESVKYFLDNLDRIGQLNYFPSKQDILLARKATKGIVEHDFVIKKIPFKMVDVGGQRSQRQKWFQCFDGITSILFMVSSSEYDQVLMEDRRTNRLVESMNIFETIVNNKLFFNVSIILFLNKMDLLVEKVKSVSIKKHFPDFKGDPHRLEDVQRYLVQCFDRKRRNRGKPLFHHFTTAIDTENIRFVFHAVKDTILQENLKDIMLQ

SEQ ID NO: 7651 - protein, 381 aa, Rattus norvegicus
MGCLGNSSKTAEDQGVDEKERREANKKIEKQLQKERLAYKATHRLLLLGAGESGKSTIVKQMRILHVNGSNPEEKKQKILDIRKNVKDAIVTIVSAMSTIIPPVPLANPENQFRSDYIKSIAPITDFEYSQEFFDHVKKLWDDEGVKACFERSNEYQLIDCAQYFLERIDSVSLVDYTPTDQDLLRCRVLTSGIFETRFQVDKVNFHMFDVGGQRDERRKWIQCFNDVTAIIYVAACSSYNMVIREDNNTNRLRESLDLFESIWNNRWLRTISIILFLNKQDMLAEKVLAGKSKIEDYFPEYANYTVPEDATPDAGEDPKVTRAKFFIRDLFLRISTATGDGKHYCYPHFTCAVDTENIRRVFNDCRDIIQRMHLKQYELL

SEQ ID NO: 7652 - protein, 310 aa, Rattus norvegicus
MCVYVHVNRESTYSQLTGISLVTMLARLQKSMAAESQGLTQALAECAVDSAHGQSSENENAQIIREVEVDKVSAISRDQVAAIKQLWLDPGIQECYDRRREYQLSDSAKYYLTDIDRIAMPSFVPTQQDVLRVRVPTTGIIEYPFDLENIIFRMVDVGGQRSERRKWIHCFESVTSIIFLVALSEYDQVLAECDNENRMEESKALFKTIITYPWFLNSSVILFLNKKDLLEEKIMYSHLISYFPEYTGPKQDVKAARDFILKLYQDQNPDKEKVIYSHFTCATDTENIRFVFAAVKDTILQLNLREFNLV

SEQ ID NO: 7653 - protein, 394 aa, Rattus norvegicus
MGCLGNSKTEDQRNEEKAQREANKKIEKQLQKDKQVYRATHRLLLLGAGESGKSTIVKQMRILHVNGFNGEGGEEDPQAARSNSDGEKATKVQDIKNNLKEAIETIVAAMSNLVPPVELANPENQFRVDYILSVMNVPNFDFPPEFYEHAKALWEDEGVRACYERSNEYQLIDCAQYFLDKIDVIKQADYVPSDQDLLRCRVLTSGIFETKFQVDKVNFHMFDVGGQRDERRKWIQCFNDVTAIIFVVASSSYNMVIREDNQTNRLQEALNLFKSIWNNRWLRTISVILFLNKQDLLAEKVLAGKSKIEDYFPEFARYTTPEDATPEPGEDPRVTRAKYFIRDEFLRISTASGDGRHYCYPHFTCAVDTENIRRVFNDCRDIIQRMHLRQYELL

SEQ ID NO: 7654 - protein, 715 aa, Rattus norvegicus
MPTDLPPASEDAGPDVRAEPDGGTAPATPAESEDNREPAAAAAAEPAAEPAAEPAAEPAAEPAAEPAAEAVPDTEAESASGAVPDTQEEPAAAAASATPAEPAARAAPVTPTEPATRAVPSARAHPAAGAVPGASAMSAAARAAAARAAYAGPLVWGARSLSATPAARASLPARAAAAARAASAARAVAAGRSASAAPSRAHLRPPSPEIQVADPPTPRPAPRPSAWPDKYERGRSCCRYEAASGICEIESSSDESEEGATGCFQWLLRRNRRPGQPRSHTVGSNPVRNFFARAFGSCFGLSECTRSRSLSPGKAKDPMEERRKQMRKEAMEMREQKRADKKRSKLIDKQLEEEKMDYMCTHRLLLLGAGESGKSTIVKQMRILHVNGFNGEGGEEDPQAARSNSDGEKATKVQDIKNNLKEAIETIVAAMSNLVPPVELANPENQFRVDYILSVMNVPNFDFPPEFYEHAKALWEDEGVRACYERSNEYQLIDCAQYFLDKIDVIKQADYVPSDQDLPRCRVLTSGIFETKFQVDKVNFHMFDVGGQRDERRKWIQCFNDVTAIIFVVASSSYNMVIREDNQTNRLQEALNLFKSIWNNRWLRTISVILFLNKQDLLAEKVLAGKSKIEDYFPEFARYTTPEDATPEPGEDPRVTRAKYFIRDEFLRISTASGDGRHYCYPHFTCAVDTENIRRVFNDCRDIIQRMHLRQYELL

SEQ ID NO: 7655 - protein, 846 aa, Rattus norvegicus
MEITRPLLEIGRASTGVDDDTAVNMDSPPIASDGPPIEVSGAPVKSEHAKRPPLERQAAETGNSPISSTTAEEAKVPSLERGEGSPTQPETVHIKPAPVAESGTDSSKADPDSATHAVLQIGPEEVGGVPTMPTDLPPASEDAGPDVRAEPDGGTAPATPAESEDNREPAAAAAAEPAAEPAAEPAAEPAAEPAAEPAAEAVPDTEAESASGAVPDTQEEPAAAAASATPAEPAARAAPVTPTEPATRAVPSARAHPAAGAVPGASAMSAAARAAAARAAYAGPLVWGARSLSATPAARASLPARAAAAARAASAARAVAAGRSASAAPSRAHLRPPSPEIQVADPPTPRPAPRPSAWPDKYERGRSCCRYEAASGICEIESSSDESEEGATGCFQWLLRRNRRPGQPRSHTVGSNPVRNFFARAFGSCFGLSECTRSRSLSPGKAKDPMEERRKQMRKEAMEMREQKRADKKRSKLIDKQLEEEKMDYMCTHRLLLLGAGESGKSTIVKQMRILHVNGFNGEGGEEDPQAARSNSDGEKATKVQDIKNNLKEAIETIVAAMSNLVPPVELANPENQFRVDYILSVMNVPNFDFPPEFYEHAKALWEDEGVRACYERSNEYQLIDCAQYFLDKIDVIKQADYVPSDQDLPRCRVLTSGIFETKFQVDKVNFHMFDVGGQRDERRKWIQCFNDVTAIIFVVASSSYNMVIREDNQTNRLQEALNLFKSIWNNRWLRTISVILFLNKQDLLAEKVLAGKSKIEDYFPEFARYTTPEDATPEPGEDPRVTRAKYFIRDEFLRISTASGDGRHYCYPHFTCAVDTENIRRVFNDCRDIIQRMHLRQYELL

SEQ ID NO: 7656 - protein, 846 aa, Rattus norvegicus
MEITRPLLEIGRASTGVDDDTAVNMDSPPIASDGPPIEVSGAPVKSEHAKRPPLERQAAETGNSPISSTTAEEAKVPSLERGEGSPTQPETVHIKPAPVAESGTDSSKADPDSATHAVLQIGPEEVGGVPTMPTDLPPASEDAGPDVRAEPDGGTAPATPAESEDNREPAAAAAAEPAAEPAAEPAAEPAAEPAAEPAAEAVPDTEAESASGAVPDTQEEPAAAAASATPAEPAARAAPVTPTEPATRAVPSARAHPAAGAVPGASAMSAAARAAAARAAYAGPLVWGARSLSATPAARASLPARAAAAARAASAARAVAAGRSASAAPSRAHLRPPSPEIQVADPPTPRPAPRPSAWPDKYERGRSCCRYEAASGICEIESSSDESEEGATGCFQWLLRRNRRPGQPRSHTVGSNPVRNFFARAFGSCFGLSECTRSRSLSPGKAKDPMEERRKQMRKEAMEMREQKRADKKRSKLIDKQLEEEKMDYMCTHRLLLLGAGESGKSTIVKQMRILHVNGFNGEGGEEDPQAARSNSDGEKATKVQDIKNNLKEAIETIVAAMSNLVPPVELANPENQFRVDYILSVMNVPNFDFPPEFYEHAKALWEDEGVRACYERSNEYQLIDCAWYFLDKIDVIKQADYVPSDQDLPRCRVLTSGIFETKFQVDKVNFHMFDVGGQRDERRKWIQCFNDVTAIIFVVASSSYNMVIREDNQTNRLQEALNLFKSIWNNRWLRTISVILFLNKQDLLAEKVLAGKSKIEDYFPEFARYTTPEDATPEPGEDPRVTRAKYFIRDEFLRISTASGDGRHYCYPHFTCAVDTENIRRVFNDCRDIIQRMHLRQYELL

SEQ ID NO: 7657 - protein, 225 aa, Rattus norvegicus
MKIIHKNGYSKQECMEFKAVVYSNTLQSILAIVKAMTTLGIDYVNPRSREDQQLLLSMANTLEDGDMTPQLAEIIKRLWGDPGIQACFERASEYQLNDSAAYYLNDLDRLTAPGYVPNEQDVLHSRVKTTGIIETQFSFKDLNFRMFDVGGQRSERKKWIHCFEGVTCIIFCAALSAYDMVLVEDEEVNRMHESLPSSTASVITSILQPPPLFCFLTRKISSRRK

SEQ ID NO: 7658 - protein, 362 aa, Rattus norvegicus
MGDSVQILLVFMDKGAGESGKSTIVKQMRILHVNGFNGEGGEEDPQAARSNSDGEKATKVQDIKNNLKEAIETIVAAMSNLVPPVELANPENQFRVDYILSVMNVPNFDFPPEFYEHAKALWEDEGVRACYERSNEYQLIDCAQYFLDKIDVIKQADYVPSDQDLLRCRVLTSGIFETKFQVDKVNFHMFDVGGQRDERRKWIQCFNDVTAIIFVVASSSYNMVIREDNQTNRLQEALNLFKSIWNNRWLRTISVILFLNKQDLLAEKVLAGKSKIEDYFPEFARYTTPEDATPEPGEDPRVTRAKYFIRDEFLRISTASGDGRHYCYPHFTCAVDTENIRRVFNDCRDIIQRMHLRQYELL

SEQ ID NO: 7659 - protein, 378 aa, Rattus norvegicus
MLVQILSSLPGGGRSFGFSLVNSPLRPFDCKYNPVIECSHTYVCASQPSLELQPMFQGKRALVSFQVVSGPCKQKQILLGNRSEFRPTIYSNVIKGMRVLVDAREKLHIPWGDNKNQVHGDKLMAFDTRAPMAAQGMVETRVFLQYLPAIRALWDDSGIQNAYDRRREFQLGESVKYFLDNLDKLGVPDYIPSQQDILLARRPTKGIHEYDFEIKNVPFKMVDVGGQRSERKRWFECFDSVTSILFLVSSSEFDQVLMEDRLTNRLTESLNIFETIVNNRVFSNVSIILFLNKTDLLEEKVQVVSIKDYFLEFEGDPHCLRDVQKFLVECFRGKRRDQQQRPLYHHFTTAINTENIRLVFRDVKDTILHDNLKQLMLQ

SEQ ID NO: 7660 - protein, 109 aa, Rattus norvegicus
QVLHEDETTNRMHESLMLFDSICNNKFFIDTSIILFLNKKDLFGEKIKKSPLTICFPEYPGSNTYEEAAAYIQTQFESKNRSPNKEIYCHMTCATDTNNIQTASWTLCC

SEQ ID NO: 7661 - protein, 353 aa, Rattus rattus
GCTLSAEDKAAVERSKMIDRNLREDGEKAAREVKLLLLGAGESGKSTIVKQMKIIHEAGYSEEECKQYKAVVYSNTIQSIIAIIRAMGRLKIDFGDAARADDARQLFVLAGAAEEGFMTAELAGVIKRLWKDSGVQACFNRSREYQLNDSAAYYLNDLDRIAQPNYIPTQQDVLRTRVKTTGIVETHFTFKDLHFKMFDVGGQRSERKKWIHCFEGVTAIIFCVALSDYDLVLAEDEEMNRMHESMKLFDSICNNKWFTDTSIILFLNKKDLFEEKIKKSPLTICYPEYAGSNTYEEAAAYIQCQFEDLNKRKDTKEIYTHFTCATDTKNVQFVFDAVTDVIIKNNLKDCGLF

SEQ ID NO: 7662 - protein, 85 aa, Rattus sp.
DLDRVADPSYLPTQQDVLRVRVPTTGIIEYPFDLQSVIFRMVDVGGQRSERRKWIHCFENVTSIMFLVALSEYDQVLVESDNENR

SEQ ID NO: 7663 - protein, 354 aa, Cavia porcellus
MGCTLSAEDKAAVERSKMIDRNLREDGEKAAREVKLLLLGAGESGKSTIVKQMKIIHEAGYSEEECKQYKAVVYSNTIQSIIAIIRAMGRLKIDFGDSARADDARQLFVLAGAAEEGFMTAELAGVIKRLWKDSGVQACFNRSREYQLNDSAAYYLNDLDRIAQSNYIPTQQDVLRTRVKTTGIVETHFTFKDLHFKMFDVGGQRSERKKWIHCFEGVTAIIFCVALSDYDLVLAEDEEMNRMHESMKLFDSICNNKWFTDTSIILFLNKKDLFEEKIKKSPLTICYPEYTGSNTYEEAAAYIQCQFEDLNKRKDTKEIYTHFTCATDTKNVQFVFDAVTDVIIKNNLKDCGLF

SEQ ID NO: 7664 - protein, 354 aa, Cavia porcellus
MGCTLSAEDKAAVERSKMIDRNLREDGEKAAREVKLLLLGAGESGKSTIVKQMKIIHEAGYSEEECKQYKAVVYSNTIQSIIAIIRQMGRLKIDFGDSARADDARQLFVLAGAAEEGFMTAELAGVIKRLWKDSGVQACFNRSREYQLNDSAAYYLNDLDRIAQSNYIPTQQDVLRTRVKTTGIVETHFTFKDLHFKMFDVGGQRSERKKWIHCFEGVTAIIFCVALSDYDLVLAEDEEMNRMHESMKLFDSICNNKWFTDTSIILFLNKKDLFEEKIKKSPLTICYPEYTGSNTYEEAAAYIQCQFEDLNKRKDTKEIYTHFTCATDTKNVQFVFDAVTDVIIKNNLKDCGLF

SEQ ID NO: 7665 - protein, 354 aa, Cavia porcellus
MGCTLSAEDKAAVERSKMIDRNLREDGEKAAKEVKLLLLGAGESGKSTIVKQMKIIHEDGYSEEECKQYKVVVYSNTIQSIIAIIRAMGRLKIDFGEPARADDARQLFVLAGSAEEGLMTSELAGVIRRLWRDGGVQACFSRSREYQLNDSASYYLNDLDRISQTNYIPTQQDVLRTRVKTTGIVETHFTFKDLYFKMFDVGGQRSERKKWIHCFEGVTAIIFCVALSDYDLVLAEDEEMNRMHESMKLFDSICNNKWFTDTSIILFLNKKDLFEEKIKRSPLTICYPEYTGSNTYEEAAAYIQCQFEDLNRRKDTKEIYTHFTCATDTKNVQFVFDAVTDVIIKNNLKECGLY

SEQ ID NO: 7666 - protein, 355 aa, Cavia porcellus
MGCTVSAEDKAAAERSKMIDKNLREDGEKAAREVKLLLLGAGESGKSTIVKQMKIIHEDGYSEEECRQYRAVVYSNTIQSIMAIVKAMGNLQIDFADPLRADDARQLFALSCTAEEQGMLPEDLSGVIRRLWADHGVQACFSRSREYQLNDSAAYYLNDLDRIAQSDYIPTQQDVLRTRVKTTGIVETHFTFKDLHFKMFDVGGQRSERKKWIHCFEGVTAIIFCVALSDYDLVLAEDEDMNRMHESMKLFDSICNNKWFTDTSIILFLNKKDLFEEKITHSPLTICFPEYTGANKYDEAASYIQSKFEDLNKRKDTKEIYTHFTCATDTKNVQFVFDAVTDVIIKNNLKDCGLF

SEQ ID NO: 7667 - protein, 355 aa, Cavia porcellus
MGCTVSAEDKAAAERSKMIDKNLREDGEKAAREVKLLLLGAGESGKSTIVKQMKIIHEDGYSEEECRQYRAVVYSNTIQSIMAIVKAMGNLQIDFADPLRADDARQLFALSCTAEEQGMLPEDLSGVIRRLWADHGVQACFSRSREYQLNDSAAYYLNDLDRIAQSDYIPTQQDVLRTRVKTTGIVETHFTFKDLHFKMFDVGGQRSERKKWIHCFEGVTAIIFCVALSAYDLVLAEDEEMNRMHESMKLFDSICNNKWFTDTSIILFLNKKDLFEEKITHSPLTICFPEYTGANKYDEAASYIQSKFEDLNKRKDTKEIYTHFTCATDTKNVQFVFDAVTDVIIKNNLKDCGLF

SEQ ID NO: 7668 - protein, 354 aa, Cavia porcellus
MGCTLSAEDKAAVERSKMIDRNLREDGEKAAKEVKLLLLGAGESGKSTIVKQMKIIHEDGYSEEECKQYKVVVYSNTIQSIIAIIRAMGRLKIDFGEPARADDARQLFVLAGSAEEGLMTSELAGVIRRLWRDGGVQACFSRSREYQLNDSASYYLNDLDRISQTNYIPTQQDVLRTRVKTTGIVETHFTFKDLYFKMFDVGGQRSERKKWIHCFEDVTAIIFCVALSDYTLVLAEDEEMNRMHESMKLFDSICMNKWFTDTSIILFLNKKDLFEEKIKRSPLTICYPEYTGSNTYEEAAAYIQCQFEDLNRRKDTKEIYTHFTCATDTKNVQFVFDAVTDVIIKNNLKECGLY

SEQ ID NO: 7669 - protein, 383 aa, Hordeum vulgare subsp. vulgare
MGSSCSRPHSVNEAEAAGNTRSADIDRRILHETKADQHIHKLLLLGAGESGKSTIFKQIKLLFRTGFDEAELKGYTPVIHANVYQTIKILYDGAKELAQVELESSKYVISSDNQEIGEKLSEIGGRLDYPLLNKELVQDVRKLWEDPAIQETYSCGSVLQVPDCAHYFMENLDRLAEADYVPTKEDVLHARVRTNGVVEIQFSPLGESKRGGEVYRLYDVGGQRNERRKWIHLFEGVDAVIFCAAISEYDQLLFEDETQNRMMETKELFDWVLKQRCFEKTSFMLFLNKFDIFERKIQKVPLTVCEWFKDYEPIAPGKVQDVEHAYEFVKKKFEEVYFQSSKPDRVDRVFKIYRTTALDQKLVKKTFKLIDESMRRSREGTGT

SEQ ID NO: 7670 - protein, 354 aa, Ustilago hordei
MGNCLSSSDQKEAKDRSVAIDKQIEQDSRQFKKECKILLLGSGESGKSTIVKQMKIIHQNGYSKDELLLYRLTVIKNLVDSAQAIVLALRKFKMEPEMPENRENVDVILQYRVDADPGATLDHPMARKVDSLWKDPIIPAIMERSSEFYLMDSAAYFFDNVNRIGQADYVPDENDVLRARSKTTGISETRFNMGQLSIHLFDVGGQRSERKKWIHCFEAVTSIIFCVALSEYDQVLLEESGQNRMAESLVLFESVVNSRWFLRTSVILFLNKIDIFKQKIPKQPLSKYFPEYSGGPDINKAAKYILWRFTQTNRARLSIYPHLTQATDTSNIRLVFAAVKETILTNALKDSGIL

SEQ ID NO: 7671 - protein, 353 aa, Magnaporthe grisea
MGCGMSTEEKEGKARNEEIENQLKRDRLQQRNEIKMLLLGAGESGKSTILKQMKLIHEGGYSRDERESFKEIIFSNTVQSMRVILEAMESLELPLEDQRMEYHVQTIFMQPAQIEGDVLPPEVGNAIEALWKDRGVQECFKRSREYQLNDSARYYFDNIARIAAPDYMPNDQDVLRSRVKTTGITETTFIIGDLTYRMFDVGGQRSERKKWIHCFENVTTILFLVAISEYDQLLFEDETVNRMQEALTLFDSICNSRWFIKTSITLFLNKIDRFKEKLPISPMKNYFPDYEGGDDYAAACDYILNRFVSLNQHETKQIYTHFTCATDTTQIRFVMAAVNDIIIQENLRLCGLI

SEQ ID NO: 7672 - protein, 356 aa, Magnaporthe grisea
MMGACMSASSEESEQKKRSQKIDKDLEEDSKRLRRECKILLLGSGESGKSTIVKQMKIIHLKGYSDDELYNYRPTVFKNLIECAKAVISAMRQFDIEPQLEGNKELCDYLLDYMVESGPQAEIDPKVGQAVQSIWNDPAREQLMDRQTEFYLMDSAEYFFQEVLRIVSPDYLPNEMDVLRARTKTTGIYETRFQMGQLSIHMFDVGGQRSERKKWIHCFENVTSIIFCVALSEYDQVLLEESSQNRMMESLLLFDSVVNSRWFMRTSIILFLNKVDIFKQKLGRSPLGNYFPDYSGGNDVNKADKYLLWRFNQVNRAHLNLYPHLTQATDTSNIRLVFAAVKETILNNALKDSGIL

SEQ ID NO: 7673 - protein, 355 aa, Magnaporthe grisea
MCFGSRNVHDEAGAARSRELDKAIRADEKRLQKEVKLLLLGAGESGKSTVLKQMKLIYAQGFSKNEKIEWKPVVFQHIVQSFRLIHDAMQELDIEFENKENERNITLIMEEQELGAHDALPIEFLDPIKALWVDAGVKKAIAKGNEFALHDNLDYFCDDLDRIWDKSYVPTDQDLLRSRLRTTGITETVFDLGQLTYRMFDVGGQRSERKKWIHCFENVNCLLFLVAISGYDQCLVEDKDGNQMNEALMLWESIANSHWFTKSALILFLNKMDLFKEKITKSPITEYGFTDYHGPSDDWKQTSKYFMDKFRALNRNPEKEIYGHFTNATDTNLLKITMTSVQDMIIQRNLKQLIL

SEQ ID NO: 7674 - protein, 354 aa, Pisolithus sp. 441
MGCVQSTGVDGDAKARNDEIENQLRRDKMLAKNEIKMLLLGAGESGKSTVLKQMKLIHHGGYNDSERDSYKEIIFSNTIQSMRAILEAMPQLDISLSPQNDARRAVILALPIQIEGDVLPRDVADAIRGLWKDPGVKEAVRRSREFQLNDSAVYYFNAIDRMAAPGYLPTDQDILRSRVKTTGITETTFKVGELTYRLFDVGGQRSERKKWIHCFENVTALVFLVSLSEYDQMLYEDESVNRMQEALTLFDSICNSRWFVKTSIILFLNKIDLFAEKLPTSPLSDYFPDYTGGENYDAACDYLLHRFVALNQNAATKQIYAHYTCATDTQQIKFVLSAIQDILLQIHLRECGLL

SEQ ID NO: 7675 - protein, 353 aa, Emericella nidulans
MGCGMSTEDKEGKARNEEIENQLKRDKMMQRNEIKMLLLGAGESGKSTILKQMKLIHEGGYSRDERESFKEIIYSNTVQSMRVILEAMESLELPLEDARNEYHVQTVFMQPAQIEGDSLPSEVGNAIAALWQDAGVQECFKRSREYQLNDSAKYYFDSIERIAQSDYLPTDQDVLRSRVKTTGITETTFIIGDLTYRMFDVGGQRSERKKWIHCFENVTTILFLVAISEYDQLLFEDETVNRMQEALTLFDSICNSRWFVKTSIILFLNKIDRFKEKLPVSPMKNYFPDYEGGADYAAACDYILNRFVSLNQAEQKQIYTHFTCATDTTQIRFVMAAVNDIIIQENLRLCGLI

SEQ ID NO: 7676 - protein, 356 aa, Emericella nidulans
MGSCFSSESAGDVEQKKRSQAIDRKLEEDSRRLRRECKILLLGSGESGKSTIVKQMKIIHQNGYTVEELALYRLTVYKNLLECAKALIGAYHQFNLEPTSQKVRDNIEFLANYNIDPDPNIPLDPAVGDAITYIWNDPCTSTALERQNEFYLMDSAPYFFEEAKRITSPDYIPNVNDVLRARTKTTGIYETRFTMGQLSIHMFDVGGQRSERKKWIHCFENVTSIIFCVALSEYDQVLLEEGNQNRMMESLVLFDSVVNSRWFMRTSIILFLNKVDLFRQKLPRSPLSNYFPDYSGGNDVNRAAKYLLWRFNQVNRAHLNLYPHLTQATDTTNIRLVFAAVKETILQNALKDSGIL

SEQ ID NO: 7677 - protein, 361 aa, Emericella nidulans
MGCMSSKQLEAGDDKEAIQRNARIEKSLKNDKKVMDRTIKILLLGAGESGKSTIIKQMRIIHSGGFPEDERRQTRAVIYSNIVVAFKVLLDIMRTENIDFEQEGTRVSDTEFVDNLEPDVGVEEAFSDLRVRDAMNEMWKDGGVQKAVSKGHEFALHDNLNYFFHSLDRLFESGWLPDNQDMLQARLRTTGITETLFELGQMNFRMMDVGGQRSERKKWIHCFEGVQCLLFMVALSGYDLCLVEDQNANQMHEAMMLFESLVNGEWFKRKPIILFLNKIDLFKDKLAISPISKHFPDYSDSNTDFDAAAKYFADRFRGINRIPEREIYIHYTNATDTTLLKATMDSVQDMIIQKNLHTLIL

SEQ ID NO: 7678 - protein, 357 aa, Anopheles gambiae str. PEST
NQIKMGCAVSRDKEAIERSKNIDRALRADGERAASEVKLLLLGAGESGKSTIVKQMKIIHETGYSQEECEQYRPVVYSNTIQSLMAIIRAMGQLRIDFADPSKTDIARQFFTYASATEEGELTPELVALMKKLWTDPGVQQCFARSREYQLNDSAAYYLNSLDRISQPAYIPTQQDVLRTRVKTTGIVETHFSFKSIHFKMFDVGGQRSERKKWIHCFEGVTAIIFCVALSGYDLVLAEDEEMNRMIESMKLFDSICNSKWFVETSIILFLNKKDLFEEKIVRSPLTICFPEYTGSNTYEEASSYIRMKFENLNRRKDQKEIYTHLTCATDTSNIQFVFDAVSDVIIKNNLKDCGLF

SEQ ID NO: 7679 - protein, 326 aa, Anopheles gambiae str. PEST
MGCAQSAEERAAAARSRLIERNLKEDGIQAAKDIKLLLLGAGESGKSTIVKQMNSMLMLMYSFLLLSFSPPPQCDAKMVFDVVQRMHDTEPFSEDLLLAMKRLWSDSGVQECFCRSNEYQLNDSAKYFLDDLDRLGAKDYQPTEQDILRTRVKTTGIVEVHFSFKNLNFKLFDVGGQRSERKKWIHCFEDVTAIIFCVAMSEYDQVLHEDETTNRMQESLKLFDSICNNKWFTDTSIILFLNKKDLFEEKIRKSPLTICFPEYTGGQEYGEAAAYIQAQFEAKNKSTSKEIYCHMTCATDTNNIQFVFDAVTDVIIANNLRGCGLY

SEQ ID NO: 7680 - protein, 384 aa, Anopheles gambiae str. PEST
ANLAASMECCLSEEAKEQKRINQEIERQLRRDKRDARRELKLLLLGTGESGKSTFIKQMRIIHGSGYSDEDKRGFIKLVYQNIFMAMQSMIRAMDLLKILYSDPANIEHAELIRSVDFETVTTFEPPYVQAIKDLWADAGIQECYDRRREYQLTDSAKYYLMEIDRVAAPNYLPTEQDILRVRVPTTGIIEYPFDLEEIRFSYLSDLARIEAEDFLPTEQDILRARAPTTGILEYPFDLDSIIFRMVDVGGQRSERRKWIHCFENVTSIIFLVALSEYDQILFESENENRMEESKALFKTIITYPWFQHSSVILFLNKKDLLEEKIMYSHLVDYFPEYDDLNPDSEKIIYSHFTCATDTENIRFVFAAVKDTILQSNLKEYNLV

SEQ ID NO: 7681 - protein, 383 aa, Anopheles gambiae str. PEST
MGCFGSAGSKQSDSNSSEDTKSQKRRSDAITRQLQKDKQVYRATHRLLLLGAGESGKSTIVKQMRILHVNGFSDSERKQKIEDIKKNIRDAILTITGAMSTLTPPIQLEKPENQARVDYIQDYASGPDFNYPPEFYEHTEELWKDRGVQQTYERSNEYQLIDCAKYFLDRVSEIKQPNYTPTEQDILRCRVLTSGIFETRFQVDKVNFHMFDVGGQRDERRKWIQCFNDVTAIIFVTACSSYNMVLREDPTQNRLRESLDLFKSIWNNRWLRTISVILFLNKQDLLAEKIKAGKSKLSDYFGEFNRYQTPADAVCEMGEDPEVIRAKYFIRDEFLRISTASGDGKHYCYPHFTCAVDTENIKRVFNDCRDIIQRMHLRQYELL

SEQ ID NO: 7682 - protein, 384 aa, Anopheles gambiae str. PEST
MLLIDCFRRPSHELQARKKQSSKEVVQMRKLYRDPVKVLLLGAGESGKTTIIKQMRILHIQNSYSFDERLEKLSDIYENIHESIYELVRQVILLELEFDSIANQRCAEYILRMGPQAPWNLSAEYVRCVRRLWSDAGVKRCYKRSNEFQLIDSAKYFLDRVEKISMPGYIPTNGDILNCRKTTTGIQEVRFNVRMPGSLGGGTQEFRMFDVGGQRHHRSKWMQAFEGVQAVLFLISCGGFDQTLREDPKQNRLAEGFELFRGVWHNRFLAETGVIVFMNKQDVLEQKLLAGQSIRTYFPDYDDYVAFADKDQLYDELTRTRSFIRSKLVDITNEPPRRTSHLVGRKRTCYFHFTIATDTQNVRTVFNDVHNIILTKNLSKMDLL

SEQ ID NO: 7683 - protein, 374 aa, Anopheles gambiae str. PEST
SKLSCARCCGDFFGYLLRLRVSPEELEQRYKSREIDKILEKDKHAFRRQVKLLLLGAGESGKSTFLKQMRIIHGINFEPELIKEYQHVIYQNIVKGMQVLCDARDKLDIPWEHPTSQLAANEAVMFHSGCLLDAEQFHQYVPLINILWTDGAIRKAYDRRREFQISDSVSYFLDELDRISRLDYKPTHRDILHCRKATKGVFEFTIRIQNIPFVFVDVGGQRTQRQKWTKCFDCSVTSILFLVSTSEFDQVLAEDRKTNRLEESRNIFDTIVNNTTFEGISIILFLNKTDLLQQKVKNPETDIRWYYPQFTGNPHSILDVQNFILQMFMNVRKNTKTPIYHHFTNAVDTQNIQVVFSSVKDTILHRNLSALMLQ

SEQ ID NO: 7684 - protein, 155 aa, Coccidioides posadasii
FDVGGQRSERKKWIHCFENVTTILFLVAISEYDQLLFEDETVNRMQEALTLFDSICNSRWFTKTSIILFLNKIDRFKEKLPVSPMKNYFPDYEGGADYAAACDYILNRFVSLNQAEQKQIYTHFTCATDTTQIRFVMAAVNDIIIQENLRLCGLI

SEQ ID NO: 7685 - protein, 354 aa, Helisoma trivolvis
MGCTLSAEERAAMERSKAIEKNLKEDGMQAAKDIKLLLLGAGESGKSTIVKQMKIIHEGGFTSEDTKQYKPVVYSNTIQSLVAIIRAMGTLSIPFGDNERESDAKMVLDVIARMEDTEPFSEELLAAMKRLWVDSGVQECLGRANEYQLNDSAKYFLDDLDRLGAKDYMPTEQDILRTRVKTTGIVEVHFSFKNLNFKLFDVGGQRSERKKWIHCFEDVTAIIFCVAMSEYDQVLHEDETTNRMQESLKLFDSICNNKWFTETSIILFLNKKDLFEEKIKKSPLTICFPEYTGKQMYQEASAYIQAQFEAKNKSSAKEIYCHQTCATDTNNIQFVFDAVTDVIIANNLRGCGLY

SEQ ID NO: 7686 - protein, 354 aa, Helisoma trivolvis
MGCVTSQEDKAAVERSKQIDKSLRMDGEKAAREVKLLLLGAGESGKSTIVKQMKIIHEKGYSQEECLQYNPVVYSNAIQSMIAIIKAMGQLKIQFGHPDRAEEARQFFALAGHADEGEMSQELSGIMKRLWKDVGVQECFSRSREYQLNDSAEYYLNALDRISAPGYIPTEQDVLRTRVKTTGIVETHFTFKDLHFKMFDVGGQRSERKKWIHCFEGVTAIIFIVAMSEYDLTLAEDQEMNRMMESMKLFDSICNNKWFTETSIILFLNKKDLFEEKIKKSPLTICFPEYTGANTYEEAAAYIQLQFENLNKKKDTKEIYSHFTCATDTNNVQFVFDAVTDVIIKNNLKDCGLF

SEQ ID NO: 7687 - protein, 370 aa, Kluyveromyces lactis
MTGISQALALNDSGVNGFDTDLAKRNGTVNASGGQSPGGSETVNALKVLLLGSGESGKSTVLQQLKILHQNGFSREELLEYKPFIFDNIIETGKDLAKARRTFNVQLEEDAEISESDLDELLSQQYQPTKLPCLPADLAKTLKILWNLQSTQDLLVSEHRSSFYLMDSASYFYENLDRISEPKYIPTITDVIRTRKKTSGIFDTMIDLDKNLKLHFFDVGGQRSERKKWIHCFDNVTLIIFCVSLSEYDQTLLEDNSQNRLEESLILFDSVVNSRWFARSSVVLFLNKIDIFAEKLRHVPLEKYFPDYTGGKDINKAAKYILWRFVQLNRANLNIYPHVTQATDTSNIKLVFAAIKETILENSLKDSGVL

SEQ ID NO: 7688 - protein, 447 aa, Kluyveromyces lactis
MGCVASTGNYENEDDPFIQNKRANDLIEQNLQQERNKNKNEVKLLLLGAGESGKSTVLKQMKLLHQGGFTHRERMQYGQVIWADAIESMRTLILQAGKLGIELDSDLKNAHSGQLVNTELHQCKEKIFRANTLDQIDARMAGGSEFLNEYVLKYNGIGSKKKRQTTLGFKESNGADPEEEDETDAFLSEKLAGTSYTGSSETSELKRIDQSTNEEIAYAIKKLWTQDKGIRQCFNRSSEFQLEGSASYYFDNIEKFARVDYVCDDMDILKVRIKTTGITENSFKIGPSTFKVYDAGGQRSERRKWIHCFEGITAVVFVIAISEYDQMLFEDERVNRMHESIVLLDTLLNSRWFANTPFILFLNKVDIFQEKVKRSPIRTWFPNYPGKLGDSETGLKYFESLFLSLNRSNKPIYVHRTCATDTQSMRFVLGAVTDLVIQQNLKKSGIL

SEQ ID NO: 7689 - protein, 353 aa, Hypocrea virens
MGCGMSTEDKEGKARNEEIENQLKRDKMMQRNEIKMLLLGAGESGKSTILKQMKLIHEGGYSRDERESFKEIIFSNTVQSMRVILEAMESLELPLEDQRMEYHVQTIFIQPAQIEGDVLPPEVGGAIEALWKDHGVQECFKRSREYQLNDSARYYFDNIARIAAPDYMPNDQDVLRSRVKTTGITETTFIIGDLTYRMFDVGGQRSERKKWIHCFENVTTILFLVAISEYDQLLFEDETVNRMQEALTLFDSICNSRWFIKTSIILFLNKIDRFKEKLPVSPMKNYFPDYEGGDDYAAACDYILNRFVSLNQHETKQIYTHFTCATDTTQIRFVMAAVNDIIIQENLRLCGLI

SEQ ID NO: 7690 - protein, 354 aa, Hypocrea virens
MCFGARNKNEDGEARSRELDKGIRQEEKRMAKEVKLLLLGAGESGKSTILKQMKLIYAQGFNKSERLDFKPVIFSNIVQSFKTISEAMAEMGFEYDSPDNEKYMAHILVDNEISPDSGMPEDYLEPIKALWQDSGVLAAVSKGNEYALHDNLTYFVTDIDRIWADGYVPNDQDLLRSRLRTTGITETVFDLGQLTYRMFDVGGQRSERKKWIHCFENVNCLLFLVAISGYDQCLVEDKDGNQMNEALMLWESIANSHWFTMTSLILFLNKIDLFKEKLPKSPISKYGFTDYHGPDDDYKAASKYFLDKFRALSRNPEKEIYGHFTNATDTNLLKITMGSVQDMIIQRNLKKLIL

SEQ ID NO: 7691 - protein, 353 aa, Sporothrix schenckii
MGCGMSVEEKEGKARNEEIENQLKRDRMQQRNEIKMLLLGAGESGKSTILKQMKLIHEGGYSRDERESFKEIIYSNTVQSMRVILEAMESLELPLEDQRMEYHVQTIFMQPAQIEGEVLPPEVGNAIEALWKDAVVQECFKRSREYQLNDSARYYFDNIARIAAPDYMPDDQDVLRSRVKTTGITEKTFIIGDLTYRMFDVGGQRSERKKWIHCFENVTTILFLVAISEYDQLLFEDETVNRMQEALTLFDSICNSRWFIKTSIILFLNKIDRFKEKLPISPMKNYFPDYEGGDDYAAACDYILNRFVNLNQHESKQIYTHFTCATDTTQIRFVMAAVNDIIIQENLRLCGLI

SEQ ID NO: 7692 - protein, 355 aa, Sporothrix schenckii
MGACMSSNSEEVEQKKRSQKIDKDLEEDSKRLRRECKILLLGSGESGKSTIVKQMKIIHLKGYSEDELFSYRPTVFKNLLECAKAVINAMRQFEIELESDEIRAYCDFLLDYSIGSGPQPSIDPKVGEAVLALWEDPVRGQLMERQTEFYLMDSAGYFFDEVRRIVHPDYIPNEMDVLRARTKTTGIYETRFQMGPLSIHMFDVGGQRSERKKWIHCFEDVTSIIFCVALSEYDQVLLEESSQNRMMESLLLFDSVVNSRWFMRTSIILFLNKVDIFKQKLGRSPLGNYFPDYSGGDDANKAAKYLLWRFNQVNRAHLNLYPHLTQATDTSNIRLVFAAVKETILNNALKDSGIL

SEQ ID NO: 7693 - protein, 358 aa, Takifugu rubripes
MGAGISAEEKHSREAEKDIKEDAEKDARTVKLLLLGAGESGKSTIVKQMKIIHQDGYSLFECLFFIAIIYGNTLQSILTIVRAMTTLNIQYGDSARQDDARKLMHMADTIEEGTMPKEMSDIIQRLWKDTGLQACFFRASEYQLNDSAGYYLSDLERLVTPGYVPTEQDVLRSRVKTTGIIFTQFSFKDLNFRMFDVGGQRSERKKWIHCFEGVTCIDFIAALSAYDMVLVEDDEVNRMHESLHLFNSICNHRYFAATSIVLFLNKKDVFEEKIKKAHLSICFPDYDGPDTYEDAGNYIKVQFAFLNMRRDIKEIYSHMTCATDTQNVKFVFVFDAVTDIIIKENLKDCGLFVTHHGR

SEQ ID NO: 7694 - protein, 371 aa, Takifugu rubripes
MGCTVSAETKALAERSNMIDRNLREDGEKTAREVKLLLLGAGESGKSTIVKQMKIIHEDGYSEDECKQYRAVVYSNTIQSIMAIIKAMGNLKIDYEDSARADDAAQLFALSAAAEEQGILPDDLSRVIQRLWSDGGVQSCFTRAREYQLNDSAAYYLNDLERIAKSDYIPTQQDVLRTRVKTTGIVETHFTFKDLHFKDFDVGGQRSERKKWFHCFEGVTGIIFCVGMSAYDLVLAEDEEMNRMHESMKLFDSICNNKWFTETSIILFLNKKDLFEEKIAHSPLTICFPEYTGPNKYEEAQAYIETKFEDLNKKKDTKEIYTHFTCATDTKNVQFVFDAVTDVIIKNKLKDCGLFVSAAVQRNGRHKAKTV

SEQ ID NO: 7695 - protein, 355 aa, Takifugu rubripes
MGCRQTSEEKEKARSCRRIDRHLRSESQRQRREIKLLLLGTSNSGKSTIVKQMKIIHSGGSNLEACKEYMPLILYNLIDSLTRIIRALAALRIDFHNPDRAYDAVQLFALTGPAESSGEITPELLGVMRRLWADPGAGACFKRSSEYHLEDNAAYYLNDLLRISALEYIPTVEDILRSRDMTTGIVENKFTFKELTFKMVDVGGQRSERKKWIHCFEGVTAIIFCVELSGYDLKLYEDNQTSRMAESLRLFDSICKTIWFINTSLILFLNKKDLLAEKIRRIPLVICFPEYKGQNTYEEAAVYIQRQFEDLNRNKETKEIYSHFTCATDTSNIQFVFDAVTDVLIQNNLKYIGLC

SEQ ID NO: 7696 - protein, 109 aa, Takifugu rubripes
DSVTSILFLVSSSEYDQVLMEDRQTNRLRESVDIFETIVNNRVFGNVSIILFLNKTDLLEEKVQVPLKDYFPEYTGPEHSLADIQAFMVECFRARRRDATQKPLYHHFT

SEQ ID NO: 7697 - protein, 109 aa, Takifugu rubripes
DGITSILFMVSSSEYDQVLMEDRRTNRLVESMNIFETIVNNKLFLNVSIILFLNKTDLLVDKIRTVNICKNFPEFRGDPRRLEDVQAFLVQSFSRKRRNRIKPLFHHLT

SEQ ID NO: 7698 - protein, 340 aa, Caenorhabditis remanei
EGNARNKEIEKQLNADKRAGSSIVKLLLLGAGECGKSTVLKQMQILHSNGFTEEEVNEKRAIVYNNTVSAMCTILRAMDGVLHLPLENGQKEAEKAIVMKVQENGEEGEALTEEVSKAIQSLWADPGVKKAFEMRSEYQLPDSAKYFLDNCQRISEPGYRPNDQDILYSRVATTGVVEVKFKIKELDFRVFDVGGQRSERRKWIHCFDNVESIIFITAISEYDQVLFEDETTNRMIESMQLFNSICNSTWFLSTAMILFMNKKDLFMEKIQRVNITTAFPDYEGGQNYEEAVNFIKQKFAELNLNPDKKTIYMHETCATDTNQVQLVISSVIDTIIQKNL

SEQ ID NO: 7699 - protein, 339 aa, Caenorhabditis remanei
EGNARNKEIEKQLNADKRAGSSIVKLLLLGAGECGKSTVLKQMQILHSNGFTEEEVNEKRAIVYNNTVSAMCTILRAMDGVLHLPLENGQKEAEKAIVMKVQENGEEGEALTEEVSKAIQSLWADPGVKKAFEMRSEYQLPDSAKYFLDNCQRISEPGYRPNDQDILYSRVATTGVVEVKFKIKELDFRVFDVGGQRSERRKWIHCFDNVESIIFITAISEYDQVLFEDETTNRMIESMQLFNSICNSTWFLSTAMILFMNKKDLFMEKIQRVNITTAFPDYEGGQNYEEAVNFIKQKFAELNLNPDKKTIYMHETCATDTNQVQLVISSVIDTIIQKN

SEQ ID NO: 7700 - protein, 340 aa, Caenorhabditis remanei
ENSEGNARNKEIEKQLNADKRAGSSIVKLLLLGAGECGKSTVLKQMQILHSNGFTEEEVNEKRAIVYNNTVSAMCTILRAMDGVLHLPLENGQKEAEKAIVMKVQENGEEGEALTEEVSKAIQSLWADPGVKKAFEMRSEYQLPDSAKYFLDNCQRISEPGYRPNDQDILYSRVATTGVVEVKFKIKELDFRVFDVGGQRSERRKWIHCFDNVESIIFITAISEYDQVLFEDETTNRMIESMQLFNSICNSTWFLSTAMILFMNKKDLFMEKIQRVNITTAFPDYEGGQNYEEAVNFIKQKFAELNLNPDKKTIYMHETCATDTNQVQLVISSVIDTIIQ

SEQ ID NO: 7701 - protein, 343 aa, Caenorhabditis remanei
ENSEGNARNKEIEKQLNADKRAGSSIVKLLLLGAGECGKSTVLKQMQILHSNGFTEEEVNEKRAIVYNNTVSAMCTILRAMDGVLHLPLENGQKEAEKAIVMKVQENGEEGEALTEEVSKAIQSLWADPGVKKAFEMRSEYQLPDSAKYFLDNCQRISEPGYRPNDQDILYSRVATTGVVEVKFKIKELDFRVFDVGGQRSERRKWIHCFDNVESIIFITAISEYDQVLFEDETTNRMIESMQLFNSICNSTWFLSTAMILFMNKKDLFMEKIQRVNITTAFPDYEGGQNYEEAVNFIKQKFAELNLNPDKKTIYMHETCATDTNQVQLVISSVIDTIIQKNL

SEQ ID NO: 7702 - protein, 333 aa, Caenorhabditis remanei
EIEKQLNADKRAGSSIVKLLLLGAGECGKSTVLKQMQILHSNGFTEEEVNEKRAIVYNNTVSAMCTILRAMDGVLHLPLENGQKEAEKAIVMKVQENGEEGEALTEEVSKAIQSLWADPGVKKAFEMRSEYQLPDSAKYFLDNCQRISEPGYRPNDQDILYSRVATTGVVEVKFKIKELDFRVFDVGGQRSERRKWIHCFDNVESIIFITAISEYDQVLFEDETTNRMIESMQLFNSICNSTWFLSTAMILFMNKKDLFMEKIQRVNITTAFPDYEGGQNYEEAVNFIKQKFAELNLNPDKKTIYMHETCATDTNQVQLVISSVIDTIIQKNL

SEQ ID NO: 7703 - protein, 334 aa, Caenorhabditis remanei
KEIEKQLNADKRAGSSIVKLLLLGAGECGKSTVLKQMQILHSNGFTEEEVNEKRAIVYNNTVSAMCTILRAMDGVLHLPLENGQKEAEKAIVMKVQENGEEGEALTEEVSKAIQSLWADPGVKKAFEMRSEYQLPDSAKYFLDNCQRISEPGYRPNDQDILYSRVATTGVVEVKFKIKELDFRVFDVGGQRSERRKWIHCFDNVESIIFITAISEYDQVLFEDETTNRMIESMQLFNSICNSTWFLSTAMILFMNKKDLFMEKIQRVNITTAFPDYEGGQNYEEAVNFIKQKFAELNLNPDKKTIYMHETCATDTNQVQLVISSVIDTIIQKNL

SEQ ID NO: 7704 - protein, 332 aa, Caenorhabditis remanei
NKEIEKQLNADKRAGSSIVKLLLLGAGECGKSTVLKQMQILHSNGFTEEEVNEKRAIVYNNTVSAMCTILRAMDGVLHLPLENGQKEAEKAIVMKVQENGEEGEALTEEVSKAIQSLWADPGVKKAFEMRSEYQLPDSAKYFLDNCQRISEPGYRPNDQDILYSRVATTGVVEVKFKIKELDFRVFDVGGQRSERRKWIHCFDNVESIIFITAISEYDQVLFEDETTNRMIESMQLFNSICNSTWFLSTAMILFMNKKDLFMEKIQRVNITTAFPDYEGGQNYEEAVNFIKQKFAELNLNPDKKTIYMHETCATDTNQVQLVISSVIDTIIQ

SEQ ID NO: 7705 - protein, 336 aa, Caenorhabditis remanei
RNKEIEKQLNADKRAGSSIVKLLLLGAGECGMSTVLKQMQILHSNGFTEEEVNEKRAIVYNNTVSAMCTILRAMDGVLHLPLENGQKEAEKAIVMKVQENGEEGEALTEEVSKAIQSLWADPGVKKAFEMRSEYQLPDSAKYFLDNCQRISEPGYRPNDQDILYSRVATTGVVEVKFKIKELDFRVFDVGGQRSERRKWIHCFDNVESIIFITAISEYDQVLFEDETTNRMIESMQLFNSICNSTWFLSTAMILFMNKKDLFMEKIQRVNITTAFPDYEGGQNYEEAVNFIKQKFAELNLNPDKKTIYMHETCATDTNQVQLVISSVIDTIIQKNL

SEQ ID NO: 7706 - protein, 301 aa, Ephydatia fluviatilis
KIIHENGYTAEECEQYRPVVYSNTVQSMMAIIKAMDTLAIPYENGDRREDAKELCAMASQSDEIRFTEDLVVRMKRLWADGGVKECVRRAREYQLNDSAEYYLSSLDRLAQPDYIPTEQDVLRTRVKTTGIVESFFTYQGLNFKIVDVGGQRSERKKWIHCFEGVTSIIFCVALSGYDLLLAEDEKTNRMLESMKLFHSICNNRWFENTSIILFLNKKDLFAEKIQLSPLTICFPEYTGANSYDEASKYIREKFEALNDKKEKKQIYTHFTCATDTGNIRHVFKDVTDVIVKNNLRDVGLF

SEQ ID NO: 7707 - protein, 302 aa, Ephydatia fluviatilis
KIIHESGFNREECKQYRPVVYSNAIQSLAAIIKGMDLLGINFASPARREDAMLLFEVTARHEDTEPFTPELLAAMKRLWGDTGVQLCFRRSSEYQLNDSAKFYLDSLDRIGDKRYIPTEQDILRTRVKSTGIVEYEFSYKGLHFRVVDVGGQRSERKKWIHCFEDVTAILFFVALSEYDMSLREDATVNRMEEALRLFNSILNNKWFLETSVILFLNKKDLFEEKLRCKPLSHCFPNYVGENTFQDGANFIRDRFVSLNRNPDKKTVYTHITCATDTNNIQIVFQSVTDIVISEHLRGAGLL

SEQ ID NO: 7708 - protein, 301 aa, Ephydatia fluviatilis
RIIHGQGYSDADRADFRSLVFRNVFTAVNALTEAMTSLKIPFQNASNKESGAVYGRKKDEEVTMLSESDRDKLKAFWLDRGVQSCFERRNEFQISDSAKYYLDALDRICTSNYLPTVDDVLRIRIATTGIVEYTFPMRKDVVFRMVDVGGQRSERRKWIHCFEDVKAIIFLTAINEYDQVLVEDDTVNRLKESLALFETILRYPWFEKSSIVLFMNKEDIFKEKIMKSDLARYFPSYQGPKQNNEQAREFLKNEFLAVNPNPERIISPHFTCATDTENISRVFETVRLHVLEENLKDYNLM

SEQ ID NO: 7709 - protein, 304 aa, Ephydatia fluviatilis
KIIHGDGYSKDELESFRPVIYGNLAASMRVVVSNMENLGIPFSDTTNREYANMILSLSTSIPNCNSLPSEVAEAFRRLWNDQGVRACFSRAYEYQLNDSAPYYFENMDRLLKPDYVPDEQDVLRSRVQTTGIIETSFRVEKLVYRVVDVGGQRSERRKWIQCFDDVKAVLFVVALNGYDMTLFEDGKTNRLEESLNLFQAICNNKFFVKTSMILFLNKVDLFENKVLTSDRQLRNYFSSYQGPDRNPEEAKKFIQSQFLERNMSKNKIIYPHFTTATNTSNIRVVFQAVLDAIIRENLEAANLL

SEQ ID NO: 7710 - protein, 301 aa, Ephydatia fluviatilis
RIIHGQGYSDADRADFRTLVFRNIFTAVNALTEAMTSLKIPFERASNKESGAVYGRKKDEEETVLSESDRDKLKAFWLDRGVQSCFERRNEFQISDSAKYYLDALDRICISNYLPTIDDVLRIRIATTGIVEYTFQMRKDVIFRMVDVGGQRSERRKWIHSFEDVKAIIFLTAINEYDQVLQEDAGVNRLLESLALFGTILTYPFFLKCAIILFMNKTDIFAEKIQKSHLKLHFPEYTGPLQDVESGRQFILQKFREKFDSERLFSHHFTCATDTENIKLVFQAVREQILQENIDTIFNNG

SEQ ID NO: 7711 - protein, 305 aa, Ephydatia fluviatilis
RIIHGSGYNETDRANFKATVYRNVVVAIQAIVAAMRDLQIPYASDAVKEAAAEVESIAVEEVQMIDAGAKSAIERLWRDSGVQQCFLRRREYQISDSAKYYLDDLNRLCTQDYIPTMQDVLRVRVPTTGINEYLFTIDTRVFRMVDVGGQRSERRKWIHCFENVASVMFLVALSEYDQLLQETGEDVKVNRMEESLALFKTTTGLQWFTNSSLILFLNKKDLFEEKITTSSPLSDYFPDYKGPPKDHIQARDFILRKFTSSNPSREKDIYPHFTCATDTDNIKFVFETVRDHILDGIIGGIFPGL

SEQ ID NO: 7712 - protein, 307 aa, Ephydatia fluviatilis
KIIHGDGYSNEELDAFKHVVYKNLVASMAAIVRNMERLGISFSDPSNSVHADTLLALSSNQDFSSMPPKLAEAIKHLWSDQGVKACFKRAYEYQIEDSASYFLGDMDRLLQSGYVPNEQDVLRSRVQTTGIIETSFRVKKLIYRIVDVGGQRAERSKWIQCFDDVKAVLFVVALNGYDMTLAEDGVTNRMREALVLFEDICNKPIFARTSMILFLNKVDAFETKILDTDRHLRTFFPEFSGPDHDVEAAKEYIKSQFLACNKSRGKQITPHFTTATNTSNVRVVIDAVIEAIIRENLESIGLIREDE

SEQ ID NO: 7713 - protein, 303 aa, Ephydatia fluviatilis
RIIHGEDYSEQDRLEFRSSIYHNILKGMKILVEARRRLQIPLSNPQCDEYSQVITNYHRTGEITPEDFQDYTKALGTLWKDTGIRETEKRKNEFQLGDNMAYLLNNLDRIGQVGYIPNKEDILYARKATRGVHEYLINIKGVPFRFVDVGGQRSQRQKWFQCFDEVTSVLFLVSSSSFDQTLLEDRVTNRMVESVNIFDTIVNNRCFRTVSIILFFNKTDLLIEKIKYQSIKDFFPDFDGNPRSLEEVKSYLVSMFNSVRKDQSQDLYRHFTTAVDTGNIKVVFNIVKDTILTRHIQEVMEIP

SEQ ID NO: 7714 - protein, 329 aa, Ephydatia fluviatilis
KILHKDGYSDQERYEKVKDIKSNVRDVILSVIEAMDKLQPRVQINDAENVPRAHYVRDIVSQKTFDSFSPEFFNTVSILWRDAGVQAMLRRSNEYQLIDSAAYFMDAHKLTEISRPDYKPSDQDILRCRVLTNGIFETKFVVEKVNFHMFDVGGQRSERRKWIQCFNDVTAIVFVVSCSSFDTVIREDGKTNCLQESLELFDNIWTNRWLQSVSVILFLNKQDTLRHKVEDGKRVEDYFPEFATYRAPTQEGRDKGEPGERESELYTRAKYFVRDLFVRISKATESDPRHPHYLYPHFTTAIDTENIKRVFSSCRDIIQREHLRKYELL

SEQ ID NO: 7715 - protein, 325 aa, synthetic construct
DARTVKLLLLGAGESGKSTIVKQMKIIHQDGYSLEECLEFIAIIYGNTLQSILAIVRAMTTLNIQYGDSARQDDARKLMHMADTIEEGTMPKEMSDIIQRLWKDSGIQACFDRASEYQLNDSAGYYLSDLERLVTPGYVPTEQDVLRSRVKTTGIIETQFSFKDLNFRMFDVGGQRSERKKWIHCFEGVTAIIFCVALSDYDLVLAEDEEMNRMHESMKLFDSICNNKWFTDTSIILFLNKKDLFEEKIKKSPLTICYPEYAGSNTYEEAGNYIKVQFLELNMRRDVKEIYSHMTCATDTQNVKFVFDAVTDIIIKENLKDCGLF

SEQ ID NO: 7716 - protein, 350 aa, synthetic construct
  unsure (1)..(350): unsure at all Xaa locations
MGAGASAEEKHSRELEKKLKEDAEKDARTVKLLLLGAGESGKSTIVKQXKIIHQDGYSLEECLEFIAIIYGNTLQSILAIVRAXTTLNIQYGDSARQDDARKLXHXADTIEEGTXPKEXSDIIQRLWKDSGIQACFDRASEYQLNDSAGYYLSDLERLVTPGYVPTEQDVLRSRVKTTGIIETQFSFKDLNFRXFDVGGQRSERKKWIHCFEGVTAIIFCVALSDYDLVLAEDEEXNRXHESXKLFDSICNNKWFTDTSIILFLNKKDLFEEKIKKSPLTICYPEYAGSNTYEEAGNYIKVQFLELNXRRDVKEIYSHXTCATDTQNVKFVFDAVTDIIIKENLKDCGLF

SEQ ID NO: 7717 - protein, 384 aa, Lotus japonicus
MGLLCSKNRRYNDADTEENTQTAEIERRIELETKAEKHIQKLLLLGAGESGKSTIFKQIKLLFQTGFDEAELKSYQPVIHANVYQTIKLLHDGAKELAQNDVDFSKYVISDENKEIGEKLSEIGGRLDYPCLTKELALEIENLWKDAAIQETYARGNELQVPDCTHYFMENLHRLSDANYVPTKDDVLYARVRTTGVVEIQFSPVGENKKSGEVYRLFDVGGQRNERRKWIHLFEGVSAVIFCAAISEYDQTLFEDENKNRMMETKELFEWVLKQPCFEKTSFMLFLNKFDIFEKKILKVPLNVCEWFKDYQPVSTGKQEIEHAYEFVKKKFEESYFQNTAPDRVDRVFKIYRTTALDQKVVKKTFKLVDETLRRRNLFEAGLL

SEQ ID NO: 7718 - protein, 354 aa, Blumeria graminis
MGCGLSTEEKEKKARNEEIENQLKRDKILQRNEIKMLLLGAGESGKSTILKQMKLIHEGGYSRDERESFKEIIFSNTEQSMRVILEAMESLELPLDDQKAEYHVQTIFMQPAQIEGDNLPPEVGTAISALWTDAGVQDCFKRSREYQLNDSARYYFDNIDRIAQPDYMPNDQDVLRSRVKTTGITETTFIIGDLTYRMFDVGGQRSERKKWIHCFENVTTILFLVAISEYDQLLFEDETVNRMQEALTLFDSICNSRWFIKTSIILFLNKIDRFKEKLPISPMKNYFPDFEGGDDYALACDYILNRFVSLNHHETKQIYTHFTCATDTTQIRFVMAAVNLDIIIQENLRLCGLI

SEQ ID NO: 7719 - protein, 383 aa, Spinacia oleracea
MGLLCSKHQHSTKPDAENAQATGIERRIERETIAEKHIQKLLLLGAGESGKSTIFKQIKLLFQMGFDDAELNSYTPVIHANVYQTIKLLIDGSKELAQNETDSSKYSLSPDNKEIGDKLSEIGGRLDYPQLTKELSEEIEKIWNDPAIQETHARSSELQLPDCANYFMEHLDRLSDVNYIPTKEDVLYARVRTTGVVEIQFSPVGENKKSGEVYRLFDVGGQRNERRKWIHLFEGVTAVIFCAAISDYDQMLYEDENKNRMVETKELFEWVLKQRCFERTSIMLFLNKFDIFEKKVQKVPLSTCEWFKDYQPVSSGQQEIEHTYEFVKKKFEELYYQCTAPDRVDRVFKIYRTTALDQKLVKKTFKLLDETLRRRNLVEAGLL

SEQ ID NO: 7720 - protein, 383 aa, Arabidopsis thaliana
MGLLCSRSRHHTEDTDENTQAAEIERRIEQEAKAEKHIRKLLLLGAGESGKSTIFKQIKLLFQTGFDEGELKSYVPVIHANVYQTIKLLHDGTKEFAQNETDSAKYMLSSESIAIGEKLSEIGGRLDYPRLTKDIAEGIETLWKDPAIQETCARGNELQVPDCTKYLMENLKRLSDINYIPTKEDVLYARVRTTGVVEIQFSPVGENKKSGEVYRLFDVGGQRNERRKWIHLFEGVTAVIFCAAISEYDQTLFEDEQKNRMMETKELFDWVLKQPCFEKTSFMLFLNKFDIFEKKVLDVPLNVCEWFRDYQPVSSGKQEIEHAYEFVKKKFEELYYQNTAPDRVDRVFKIYRTTALDQKLVKKTFKLVDETLRRRNLLEAGLL

SEQ ID NO: 7721 - protein, 353 aa, Penicillium marneffei
MGCGMSTEDKEGKARNEEIENQLKRDKMMQRNEIKMLLLGAGESGKSTILKQMKLINEGGYSRDERESFKEIIYSNTVQSMRVILEAMESLELPLEDPRAEYHVQTIFMQPSQIEGDSLPPEVGGAIQALWHDAGVQECFRRSREYQLNDSAKYYFDSIERIAQPDYLPSDQDVLRSRVKTTGITETTFIIGDLTYRMFDVGGQRSERKKWIHCFENVTTILFLVAISEYDQLLFEDETVNRMQEALTLFDSICNSRWFIKTSIILFLNKIDRFKEKLPVSPMKNYFPDYEGGADYAAACDYILNRFVSLNQAEQKQIYTHFTCATDTNQIRFVMAAVNDIIIQENLRLCGLI

SEQ ID NO: 7722 - protein, 354 aa, Pneumocystis carinii f. sp. ratti
MGCSPLQSYKQDTSRSREIELYLRRDQEEAIHEAKILLLGAGESGKTTILKQMKLIHLSGFTLKEREYYRTIIFSNMLQAMRLIIEAMEEFDICFERRENEQYLDLLLQERELTDRENLPPEYYRPFISLWEDAGVMRAVNRGNEYALHDNCFSFFENIHRLFERKYIPTDQDILRCRLKTTGITETCFKVSRLTYRMIDVGGQRSERRKWFHCFENVTAVLFLVAISGYDQCLAEDIGANQMQEALVLFDSICNSQWFINTSIILFLNKIDLFRVKLHVSLISNYFPDFNSEHQTDYRASCLFFRQKFLKLNRNHQKTIYTHFTNATDTTLLKSVMISVTDIIFNRNLQNLML

SEQ ID NO: 7723 - protein, 455 aa, Glycine max
MLLYKYLSTTLYRTWNTIYYIFLHGEEHKLNLLLSSFASHFTLNVSAKSRGIFHSTTISLQKRPFCFFSDNMGLVCSRGRRFREADAEENAQDAEIERRIKLETKAEKHIQKLLLLGAGESGKSTIFKQIKLLFQTGFDEAELKSYIPVVHANVYQAIKVLHDGSKELAQNDVDSSKYVISNENQDIGEKLSEIGGTLVYPRLTKELAQEIETLWEDAAIQETYARGNELQVPDCAHYFMENLERLSDANYVPTKEDVLYARVRTTGVVEIQFSPVGENKRSGEVYRLFDVGGQRNERRKWIHLFEGVTAVIFCSAISEYDQTLYEDENKNRMMETKELFEWVLRQPCFEKTSFMLFLNKFDIFEKKVLNVPLNVCEWFKDYQPVSTGKQEIEHAYEFVKKKFEELYFQSTAPDCVDRVFKIYQATALDQKLVKKTFKLVDETLRRRNLFEAGLL

SEQ ID NO: 7724 - protein, 385 aa, Glycine max
MGLLCSRNRRYNDADAEENAQTAEIERRIEVRNERAEKHIQKLLLLGAGESGKSTIFKQIKLLFQTGFDEAELKSYLPVIHANVYQTIKLLHDGSKEFAQNDVDSSKYVISNENKEIGEKLLEIGGRLDYPYLSKELAQEIENLWKDPAIQETYARGSELQIPDCTDYFMENLQRLSDANYVPTKEDVLYARVRTTGVVEIQFSPVGENKKSDEVYRLFDVGGQRNERRKWIHLFEGVSAVIFCAAISEYDQTLFEDENRNRMMETKELFEWILKQPCFEKTSFMLFLNKFDIFEKKILKVPLNVCEWFKDYQPVSTGKQEIEHAYEFVKKKFEESYFQSTAPDRVDRVFKIYRTTALDQKVVKKTFKLVDETLRRRNLLEAGLL

SEQ ID NO: 7725 - protein, 385 aa, Glycine max; identical to SEQ ID NO: 7724

SEQ ID NO: 7726 - protein, 393 aa, Glycine max
  unsure (1)..(393): unsure at all Xaa locations
MLSFVTENMGLLCSRNRRYNDADAEESAQTAEIERRIELETKAEKHIQKLLLLGAGESGKSTIFKQIKLLFQTGFDEAELKSYLPVIHANVYQTIKLLHDGSKEFAQNDVDSSKYVISNENKEIGEKLLEIGGRLDYPYLSKELARLLENLWKDPAIQETYARGSELQIPDCTDYFMENLQRLSDTNYVPTKEDVLYARVRTSGVVEIQFSPVGESKKSGEVYRLFDVGGQRNERRKWIHLFEGVSAVIFCAAISEYDQTLFEDENRNRMTETKELFEWILKQPCFEKTSFMLFLNKFDIFEKKILKVPLNVCEWFKDYQPVSTGKQEIEHAYEFVKKKFEESYFQSTAPDRVDRVFRIYRTPALDQKXVVKKTFKLVDETLRRRNLLEAGLL

SEQ ID NO: 7727 - protein, 385 aa, Glycine max
MGLVCSRSRRFREAHAEENAQDAEIERRIELETKAEKHIQKLLLLGAGESGRSTIFKQIKLLFQTGFNEAELKSYIPVVHANVYQTIKVLQDGSKELAQNDFDSSKYVISNENQDIGQKLSEIGGTLVYPRLTKELAQEIETMWEDAAIQETYARGNELQVPDCAHYFMENLERLSDANYVPTKEDFLYARVRTTGVVEIQFSPVGENKRSGEVYRLFDVGGQRNERRKWIHLFEGVTAVIFCSAISEYDQTLYEDENKNRMMETKELFEWVLRQPCFEKTSFMLFLNKFDIFEKKVLNVPLNVCEWFKHDYQPVSTEKQEIEHAYEFVKKKFEELYFQSTAPDCVDRVFKIYQATAPDQKLVKKTFKLGDETLRRRNPLEAGLL

SEQ ID NO: 7728 - protein, 385 aa, Glycine max; identical to SEQ ID NO: 7727

SEQ ID NO: 7729 - protein, 190 aa, Glycine max
  unsure (1)..(190): unsure at all Xaa locations
MGLVCSRSRRFREADAEENAQDAEIERRIELETKAEKHIQKLLLLGAGESGKSTIFKQIKLLFQTGFDEAELKSYIPVVHANVYQTIKVCNTXKGXLHDGSKELAQNDFDSSKYVISNENQDIGEKLSXIGGRLDYPRLTKELAQEIETLWEDAAIQETYARGNELQVPDCAHYFMENLERLSDANYVPX

SEQ ID NO: 7730 - protein, 159 aa, Glycine max
  unsure (1)..(159): unsure at all Xaa locations
XLSVISAPGLVLYSFSPVGESKKSGEVYRLXDVGGQRNERRKWIHLFEGVSAVIFCAAISEYDQTLFEDENRNRMTETKELFEWILKQPCFEKTSFMLFLNKFDIFEKKILKVPLNVCEWFKDYQPVSTGKQEIEHAYEXATSLYSEAYRIKNVADGKX

SEQ ID NO: 7731 - protein, 270 aa, Glycine max
  unsure (1)..(270): unsure at all Xaa locations
HVLIICSRSRSFREADAEENAQDAEIERRIKLETKAEKHIQKLLLLGAGESGKSTIFKQIKLLFQTGFDEAKLKSYIPVIHANVYQAIKVCNXLKEVXEVKXKFDVAGXSRVFKKCNITLKSRTFVKCSPAIKENDLTLYXDENKNRMMETKELFEWVLRQPCFEKTSFMLFLNKFDIFEKKVLNVPLNVCEWFKDYQPVSTGKQEIEHAYEFVKKKFEELYFQSTAPDCVDRVFKIYQATALDQKLVKKTFKLVDETLRRRNLFEAGLL

SEQ ID NO: 7732 - protein, 135 aa, Glycine max
EQTLYEDENKNRMMETKELFEWVLRQPCFEKTSFMLFLNKFDIFEKKVLNVPLNVCEWFKDYQPVSTGKQEIEHAYEFVKKKFEELYFQSTAPDCVDRVFKIYNTRLLEIRRVWKTFKLVDETLRRRGLFEALSL

SEQ ID NO: 7733 - protein, 384 aa, Lupinus luteus
MGLLCSRNRRYNDADAEENAQAAEIERRIELETKAEKHIQKLLLLGAGESGKSTIFKQIKLLFQTGFDEAELKSYLPVIHANVFQTIKLLHDGSKELAQNDVDSSKYVISDENKDIGEKLSEIGSKLDYPYLTTELAKEIETLWEDAAIQETYARGNELQVPGCAHYFMENLQRLSDANYVPTKEDVLYARVRTTGVVEIQFSPVGENKRSGEVYRLFDVGGQRNERRKWIHLFEGVSAVIFCAAISEYDQTLFEDENKNRMTETKELFEWILKQPCFEKTSFMLFLNKFDIFEKKILKVPLNVCEWFKDYQPVSTGKQEIEHAYEFVKKKFEELYFQSTAPERVDRVFKVYRTTALDQKLIKKTFKLVDESLRRRNLFEAGLL

SEQ ID NO: 7734 - protein, 384 aa, Pisum sativum
MGLVCSRNRRYRDSDPEENAQAAEIERRIESETKAEKHIQKLLLLGAGESGKSTIFKQIKLLFQTGFDEAELRSYTPVIFANVYQTIKVLHDGAKELAQNDLNSAKYVISDESKDIGEKLSEIGSRLDYPHLTKDLAKEIETLWEDAAIQETYARGNELQVPDCTKYFMENLQRLSDANYVPTKGDVLYARVRTTGVVEIQFSPVGENKRSGEVYRLFDVGGQRNERRKWIHLFEGVTAVIFCAAISEYDQTLFEDESKNRLMETKELFEWILKQPCFEKTSFMLFLNKFDIFEKKILNVPLNVCEWFKDYQPVSSGKQEIEHAYEFVKKKFEELYFQSSAPDRVDRVFKIYRTTALDQKVVKKTFKLVDETLRRRNLFEAGLL

SEQ ID NO: 7735 - protein, 384 aa, Pisum sativum
MGLVCSRNRRYRDSDPEENAQAAEIERRIEPEPKAEKHIQKLLLLGAGESGKSTIFKQIKLLFQTGFDEAELRSYTPVIFANVYQTIKVLHDGAKELAQNDLNSAKYVISDESKDIGEKLSEIGSRLDYPHLTKDLAKEIETLWEDAAIQETYARGNELQVPDCTKYFMENLQRLSDANYVPTKGDVLYARVRTTGVVEIQFSPVGENKRSGEVYRLFDVGGQRNERRKWIHLFEGVTAVIFCAAISEYDQTLFEDESKNRLMETKELFEWILKQPCFEKTSFILFLNKFDIFEKKILNVPLNVCEWFKDYQPVSSGKQEIEHAYEFVKKKFEELYFQSSAPDRVDRVFKIYRTTALDQKVVKKTFKLVDETLRRRNLFEAGLL

SEQ ID NO: 7736 - protein, 384 aa, Pisum sativum
MGLLCSKSNRYNDAKAEENAQTAEIERRIELETKAEKHIRKLLLLGAGESGKSTIFKQIKLLFQTGFDEAELKSYLPVVHANVYQTIKLLHDGSKEFAQNDVDFSKYVISTENKDIGEKLSEIGGRLDYPRLTKELAQEIESIWKDAAIQETYARGNELQVPDCTHYFMENLQRLSDANYVPTKEDVLLARVRTTGVVEIQFSPVGENKKSGEVYRLFDVGGQRNERRKWIHLFEGVSAVIFCVAISEYDQTLFEDENKNRMMETKELFEWVLKQQCFEKTSFMLFLNKFDIFEKKILDVPLNVCEWFKDYQPVSTGKQEIEHAYEFVKKKFEESYFQSTAPDSVDRVFKIYRTTALDQKVVKKTFKLVDETLRRRNLFEAGLL

SEQ ID NO: 7737 - protein, 384 aa, Pisum sativum
MGLVCSRNRRYRDSDPGENAQAAEIERRIESETKAEKHIQKLLLLGAGESGKSTIFKQIKLLFQTGFDEAELRSYTPVIFANVYQTIKVLHDGAKELAQNDLNSAKYVISDESKDVGEKLSEIGSRLDYPHLTKDLAKEIETLWEDAAIQETYARGNELQVPDCTKYFMENLQRLSDANYVPTKGDVLYARVRTTGVVEIQFSPVGENKGSGEVYRLFDVGGQRNERRKWIHLFEGVTAVIFCAAISEYDQTLFEDESKNRLMETKELFEWILKQPCFEKTSFMLFLNKFDIFEKKILNVPLNVCEWFKDYQPVSSGKQEIEHAYEFVKKKFEELYFQSSAPDRVDRVFKIYRTTALDQKVVKKTFKLVDETLRRRNLFEAGLL

SEQ ID NO: 7738 - protein, 384 aa, Pisum sativum
MGLLCSKSNRYNDAKAEENAQTAEIERRIELETKAEKHIQKLLLLGAGESGKSTIFKQIKLLFQTGFDEAELKSYLPVVHANVYQTIKLLHDGSKEFAQNDVDFSKYVISTENKDIGEKLSEIGGRMDYPRLTKELAQEIESMWKDAAIQETYARGNELQAPDCTHYFMENLQRLSDANYVPTKEDVLLARVRTTGVVEIQFSPVGENKKSGEVYRLFDVGGQRNERRKWIHLFEGVSAVIFCVAISEYDQTLFEDENKNGMMETKELFEWVLKQQCFEKTSFMLFLNKFDIFEKKILDVPLNVCEWFKDYQPVSTGKQEIEHAYEFVKKKFEESYFQSTAPDSVNRVFKIYRTTALVKKVVKKTFKLVDETLRRRNLFEAGLL

SEQ ID NO: 7739 - protein, 380 aa, Oryza sativa (indica cultivar-group)
MGSSCSRSHSLSEAETTKNAKSADIDRRILQETKAEQHIHKLLLLGAGESGKSTIFKQIKLLFQTGFDEAELRSYTSVIHANVYQTIKILYEGAKELSQVESDSSKYVISPDNQEIGEKLSDIDGRLDYPLLNKELVLDVKRLWQDPAIQETYLRGSILQLPDCAQYFMENLVRLAEAGYVPTKEDVLYARVRTNGVVQIQFSPVGENKRGGEVYRLYDVGGQRNERRKWIHLFEGVNAVIFCAAISEYDQMLFEDETKNRMMETKELFDWVLKQRCFEKTSFILFLNKFDICEKKIQKVPLSVCEWFKDYQPIAPGKQEVEHAYEFVKKKFEELYFQSSKPDRVDRVFKIYRTTALDQKLVKKTFKLIDESMRRSREGT

SEQ ID NO: 7740 - protein, 867 aa, Oryza sativa (japonica cultivar-group)
MAGAGAVGGSNWEEMVRRMLPPGTTIPEAPANLDYSIALEYDGPPVSYELPRIDPVDLPAIPTAQPVSGPLVPGRSNGVVAPVVRPVFMPPVHRKQDAHRAEPPPVAAQGRRRRSSESVDSAPQNEGFSDDDDSCSVSQESAHNFHGQRGGRTAAQEGRRAQVVTFGVTEDSRYESKEFDDVSEQYVAVTKKEKRGRTCSRCGKRKWESKESCIVCDARFCSYCVLRAMGSMPEGRKCITCIGQPIDESKRSKLGKGSRILSRLLSPLEVRQILKAEKECQANQLRPEQLIINGFPLNPDEMASLLSCQRPPQKLKPGRYWYDKESGLWGKEGEKPDRVVSTNLTFNGKLQPNASNGNTQVYMNGREITKIELRVLKIAQVQCPRDTHFWVYHDGGYEEEGQNNIKGKIWESPVTRFACALFSLPVPPANSDEPKDEAPYSARTVPDYLDQKRIQKLLILGSPGAGTSTIFKQAKLLYDTRFTQEELDSIKLMIQSNMFKYLGILLEGRERFEEEALAGSNNPSSEDENTQHDGNKSNGSDSCIYSINAKLKKFSDWLLDIIAMGDLDAFFPAATREYAPIVEEMWKDPAIQATYKRKDELHFLPDVAEYFLSRAIEVSSNEYEPSEKDIIYAEGVTQGNGLAFIEFTLDDRSPMSEMYTDNHEPHSQTLNKYQLIRVSAKGMNEGCKWVEMFEDVSMVIFSVALSDYDQLGAPSSGGNSPLVNKMIQSRDLFEATIRQPCFRDMPFVLVLNKFDLFEEKIGRVPLSTCEWFSDFCPLRTHHNNQSLAHQAFYYVAMKFKELYAACTDRKLFVWQARARDRLTVDEAFKFIREVLKWEDEKDGGGYYPDESFYSTTELSSSRLIRQE

SEQ ID NO: 7741 - protein, 432 aa, Cryptococcus neoformans var. neoformans
MGGCMSTPEAPKKTAETKQVPSSSTSSRPPQASTSATATAAGAGTSAANGTANGIKGDTTATNRVGTSGGQGLAAALASTEPPGAQDSKGNKDRSNQIDRQLEDDQKKFRKECKILLLGSGESGKSTIVKQMKIIHQNGYSKDELLSFRGVIYKNVLDSAQALIMAMRKIGVDPEDANNRSYADRILEYRMDAGLDAVIPSEILYNIESLWHDPVIPSVMDRSSEFYLMDSATYFFANIRKIAGPDYVPDEADVLRARTKTTGISETRFNMGQLSIHMFDVGGQRSERKKWIHCFEAVTSIIFCVALSEYDQVLLEESGQNRMQESLVLFESVINSRWFLRTSVILFLNKIDLFKQKLPKVPLVQYFPEYTGGADINKAAKYILWRFTQTNRARLSVYPHLTQATDTSNIRLVFAAVKETILQNALRDSGIL

SEQ ID NO: 7742 - protein, 353 aa, Botryotinia fuckeliana
MGCGMSTEEKEGKARNEEIENQLKRDKMLQRNEIKMLLLGAGESGKSTILKQMKLIHEGGYSRDERESFKEIIFSNTVQSMRVILEAMESLELPLDDQRAEYHVQTIFMQPQQIEGDNLPPEVGSAIAALWKDAGVQDCFKRSREYQLNDSARCYFDNIERIAQHDYMPNDQDVLRSRVKTTGITETTFIIGDLTYRMFDVGGQRSERKKWIHCFENVTTILFLVAISEYDQLLFEDETVNRMQEALTLFDSICNSRWFIKTSIILFLNKIDRFKEKLPVSPMKNYFPDYEGGDDYALACDYILNRFVSLNQHETKQIYTHFTCATDTTQIRFVMAAVNDIIIQENLRLCGLI

SEQ ID NO: 7743 - protein, 355 aa, Botryotinia fuckeliana
MMCFGSREDVEAKRSKEIDALIHRDEKVMQRQVKLLLLAGAGESGKSTILKQMRLIYTDKGFSKTEKEEWRIIIFHNILDGLRMTVEAMNDFNTPFEHENTKQYLPMITEEKDLRPCEPIPLEYLKAFKDMWADSGIQKTVERGNEFALHDNLGYFFEDLDRLFSKEFVPTDQDVLRARLRTTGITETHFDLGSLQYRMFDVGGQRSERKKWIHCFENVNALLFLVAISGYDQCLAEDKDENQMQEALMLWESIANSHWFKHSALILFLNKIDLFKAKIGHSPITKFGFSDFQGDTTSWQQTSKYFMDKFIALNRSPGREVYGHFTNATDTDLLKVTMSSVQDMIIQRNLQKLIL

SEQ ID NO: 7744 - protein, 384 aa, Lycopersicon esculentum
MGSLCSRNKHYSQADDEENTQTAEIERRIEQETKAEKHIQKLLLLGAGDSGKSTIFKQIKLLFQTGFDEEELKNYIPVIHANVYQTTKILHDGSKELAQNELEASKYLLSAENKEIGEKLSEIGGRLDYPHLTKDLVQDIEALWKDPAIQETLLRGNELQVPDCAHYFMENLERFSDVHYIPTKEDVLFARIRTTGVVEIQFSPVGENKKSGEVYRLFDVGGQRNERRKWIHLFEGVTAVIFCAAISEYDQTLFEDERKNRMMETKELFEWVLKQPCFEKTSFMLFLNKFDIFEQKVPKVPLNACEWFKDYQSVSTGKQEIEHAYEFVKKKFEESYFQCTAPDRVDRVFKIYRTTALDQKLVKKTFKLVDETLRRRNLFEAGLL

SEQ ID NO: 7745 - protein, 372 aa, Nicotiana plumbaginifolia
MRCVVLENMGLLCSRNKGYNQADDEENTQTADIERRIEQETKADKHIQKLLLLGAGDSGKSTIFKQIKLLFQTGFDEAELKNYIPVIHANVYQTIKVLHDGSKELAQSELEASKYLLSAENKDIGEKLSEIGGRLDYPHLTKDLVQDIEALWRDPAIQETILRGNELQVPDCAHYFMENLQRFSDVNYVPSKEDVLFARIRTTGVVEIQFSPVGENKKSGEVYRLFDVGGQRNERRKWIHLFEDERKNRMMETKELFEWVLKQPCFEKTSFMLFLNKFDIFEQKALKVPLNVCEWFKDYQPVSTGKQEIEHAYEFVKKKFEESYFQCTAPDRVDRVFKIYRTTALDQKLVKKTFKLVDETLRRRNLFEAGLL

SEQ ID NO: 7746 - protein, 384 aa, Nicotiana tabacum
MGLLCSRNKGYNQADDEENTQTADIERRIEQETKADKHIQKLLLLGAGDSGKSTIFKQIKLLFQTGFDEAELKNYIPVIHANVYQTIKVLHDGSKELAQSELEASKYLLSAENKDIGEKLSEIGGRLDYPHLTKDLVQDIEALWKDPAIQETILRGNELQVPDCAHYFMENLQRFSDINYVPSKEDVLFARIRTTGVVEIQFSPVGENKKSGEVYRLFDVGGQRNERRKWIHLFEGVTAVIFCAAISGYDQTLFEDERKNRMMETKELFEWVLKQPCFEKTSFMLFLNKFDIFEQKALKVPLNVCEWFKDYQSVSTGKQEIEHAYEFVKKKFEESYFQCTAPDRVDRVFKIYRTTALDQKLVKKTFKLVDETLRRRNLFEAGLL

SEQ ID NO: 7747 - protein, 366 aa, Nicotiana tabacum
NQADDEENTQTADIERRIEQETKADKHIQKLLLLGAGDSGKSTIFKQIKLLFQTGFDEAELKNYIPVIHANVYQTIKVLHDGSKELAQSELEASKYLLSAENKDIGEKLSEIGGRLDYPHLTKDLVQDIEALWKDPAIQETILRGNELQVPDCAHYFMENLQRFSDINYVPSKEDVLFARIRTTGVVEIQFSPVGENKKSGEVYRLFDVGGQRNERRKWIHLFEGVTAVIFCAAISEYDQTLFEDERKNRMMETKELFEWVLKQPCFEKTSFMLFLNKFDIFEQKALKVPLNVCEWFKDYQPVSTGKQEIEHAYEFVKKKFEESYFQCTAPDRVDRVFKIYRTTALDQKLVKKTFKLVDETLRRRN

SEQ ID NO: 7748 - protein, 384 aa, Nicotiana tabacum
MGLLCSRNKGYNQADDEENTQTADIERRIEQETKADKHIQKLLLLGAGDSGKSTIFKQIKLLFQTGFDEAELKNYIPVIHANVYQTIKVLHDGSKELAQSELEASKYLLSAENKDIGEKLSEIGGRLDYPHLTKDLVQDIEALRKDPAIQETILRGNELQVPDCAHYFMENLQRFSDINYVPSKEDVLFARIRTTGVVEIQFSPVGENKKSGEVYRLFDVGGQRNERRKWIHLFEGVTAVIFCAAISEYDQTLFEDERKNRMMETKELFEWVLKQPCFEKTSFMLFLNKFDIFEQKALKVPLNVCEWFKDYQSVSTGKQEIEHAYEFVKKKLEESYFQCTAPDRVDRVFKIYRTTALDQKLVKKTFKLVDETLRRRNLFEAGLL

SEQ ID NO: 7749 - protein, 366 aa, Nicotiana tomentosiformis
NQADDEENTQTADIERRIEQETKADKHIQKLLLLGAGDSGKSTIFKQIKLLFQTGFDEAELKNYIPVIHANVYQTIKVLHDGSKELAQSELEASKYLLSAENKDIGEKLSEIGGRLDYPHLTKDLVQDIEALWKDPAIQETILRGNELQVPDCAHYFMENLQRFSDINYVPSKEDVLFARIRTTGVVEIQFSPVGENKKSGEVYRLFDVGGQRNERRKWIHLFEGVTAVIFCAAISEYDQTLFEDERKNRMMESKELFEWVLKQPCFEKTSFMLFLNKFDIFEQKALKVPLNVCEWFKDYQSVSTGKQEIEHAYEFVKKKFEESYFQCTAPDRVDRVFKIYRTTALDQKLVKRTFKLVDETLRRRN

SEQ ID NO: 7750 - protein, 392 aa, Solanum tuberosum
MLSVVLENMGSLCSRNKHYSQADDEENTQTAEIERRIEQETKADKHIQKLLLLGAGDSGKSTIFKQIKLLFQTGFDEAELKNYIPVIHANVYQTIKILHDGSKELAQNELEASKYLLSAENKEIGEKLSEIGGRLDYPRLTKDLVQDIEALWKDPAIQETLLRGNELQVPDCAHYFMENLERFSDIHYIPTKEDVLFARIRTTGVVEIQFSPVGENKKSGEVYRLFDVGGQRNERRKWIHLFEGVTAVIFCAAISEYDQTLFEDERKNRMMETKELFEWVLKQPCFEKTSFMLFLNKFDIFEQKVLKVPLNTCEWFKDYQSVSTGKQEIEHAYEFVKKKFEESYFQCTAPDCVDRVFKIYRTTALDQKLVKKTFKLVDETLRRRNLFEAGLL

SEQ ID NO: 7751 - protein, 384 aa, Solanum tuberosum
MGSLCSRNKHYSQADDEENTQTAEIERRIEQETKADKHIQKLLLLGAGDSGKSTIFKQIKLLFQTGFDEAELKNYIPVIHANVYQTIKILHDGSKELAQNELEASKYLLSAENKEIGEKLSEIGGRLDYPRLTKDLVQDIEALWKDPAIQETLLRGNELQVPDCAHYFMENLERFSDIHYIPTKEDVLFARIRTTGVVEIQFSPVGENKKSGEVYRLFDVGGQRNERRKWIHLFEGVTAVIFCAAISEYDQTLFEDERKNRMMETKELFEWVLKQPCFEKTSFMLFLNKFDIFEQKVLKVPLNTCEWFKDYQSVSTGKQEIEHAYEFVKKKFEESYFQCTAPDRVDRVFKIYRTTALDQKLVKKTFKLVDETLRRRNLFEAGLL

SEQ ID NO: 7752 - protein, 385 aa, Solanum tuberosum
MGSLCSSRNKHYSQADDEENTQTAEIERRIEQETKADKHIQKLLLLGAGDSGKSTIFKQIKLLFQTGFDEAELKNYIPVIHANAYQTIKILHDGSKELAQNELEASKYLLSAENKEIGEKLSEIGGRLDYPRLTKDLVQDIEALWKDPAIQETLLRGNELQVPDCAHYFMENLERFSDIHYIPTKEDVLFARIRTTGVVEIQFSPVGENKKSGEVYRLFDVGGQRNERRKWIHLFEGVTAVIFCAAISEYDQTLFEDERKNRMMETKELFEWVLKQPCFEKTSCMLFLNKFDIFEQKVLKVPLNTCEWFKDYQSVSTGKQEIEHAYEFVKKKFEESYFQCTAPDRVDRVFKIYRTTALDQKLVKKTFKLVDETLRRRNLFEAGLL

SEQ ID NO: 7753 - protein, 356 aa, Dictyostelium discoideum
MGNICGKPELGSPEEIKANQHINSLLKQARSKLEGEIKLLLLGAGESGKSTIAKQMKIIHLNGFNDEEKSSYKTIIYNNTVGSMRVLVNAAEELKIGISENNKEAASRISNDLGDHFNGVLTAELAQDIKALWADPGIQNTFQRSSEFQLNDSAAYYFDSIDRISQPLYLPSENDVLRSRTKTTGIIETVFEIQNSTFRMVDVGGQRSERKKWMHCFQEVTAVIFCVALSEYDLKLYEDDTTNRMQESLKLFKEICNTKWFANTAMILFLNKRDIFSEKITKTPITVCFKEYDGPQTYEGCSEFIKQQFINQNENPKKSIYPHLTCATDTNNILVVFNAVKDIVLNLTLGEAGMIL

SEQ ID NO: 7754 - protein, 347 aa, Dictyostelium discoideum
MGCILTIEAKKSRDIDYQLRKEEGSKNETKLLLLGPGESGKSTIFKQMKIIQDDGGFSIDERLEYRYIIYGNCISQMKVLVTAAISQDLKPNNPDNETRFEKFSKISPGGNSWTLEIAEDIKQLWSDDSIQNIYRMKDKFYQLNDSAAYFFDNIGRFANENYVPTQDDVLRSRVRTTGIQEAHFKFINIEFRMLDVGGQRSERRKWIHCFDSVTAVIFCVALSEYDQTLREEESQNRMKESLMLFDEIVNSHWFRNTAFIIFFNKVDLFREKIAKIDLGDYFPAYTGGLSFDNSTQFIKKMFLDLSTGNQRIFAHFTCAIDTANIQFVFHAVRETLLKNIFNTIINY

SEQ ID NO: 7755 - protein, 357 aa, Dictyostelium discoideum
MGICASSMEGEKTNTDINLSIEKERKKKHNEVKLLLLGAGESGKSTISKQMKIIHQSGYSNEERKEFKPIITRNILDNMRVLLDGMGRLGMTIDPSNSDAAVMIKELTSLQASIVTDCWGELNEDQGKKIKALWTDPGVKQAMRRANEFSTLPDSAPYFFDSIDRMTSPVYIPTDQDILHTRVMTRGVHETNFEIGKIKFRLVDVGGQRSERKKWLSCFDDVTAVVFCVALSEYDLLLYEDNSTNRMLESLRVFSDVCNSWFVNTPIILFLNKSDLFREKIKHVDLSETFPEYKGGRDYERASNYIKERFWQINKTEQKAIYSHITCATDTNNIRVVFEAVKDIIFTQCVMKAGLYS

SEQ ID NO: 7756 - protein, 403 aa, Dictyostelium discoideum
MGCYQSRVQVEDKTNEQLDKYLVQAGKEGLLDFRILLLGAGESGKSTVVKQLKSIYKIQVDDDELHSYAVNIHKNTVLCMQVLLEAGETLGIELTDPETKKRAINVKSFQFEPEVKQMPVSIGLDIEELWRDEDIQKIWDRRSEYWFLDATPYYFENIQRFLDDDFVPTEEDCIMTRVRTTGISVTEFDEGPVHFRVVDVGGQRNERKKWIHCFDDVKALLFVVNLAGYDQVMFEDPSQNRMQESLTLFGQICNNPIFSETPTFLVLNKKDLFEQMIQKTDLSKCFPDYKGGSDVKTALEFIQMKYQQKIQESNKPLHTFHIAARYKKDIKYTWEEAKGILLEENKKVLMKATKDLKKSSKQSSKSSLGNSTQNNSNNNNNNNNSNNNNGQTTIDGATAKINS

SEQ ID NO: 7757 - protein, 345 aa, Dictyostelium discoideum
MRFKCFGSEETEQSSKIDKSIETDRRKLRKDVKLLLLGPGESGKSTIFKQMKIIQEDGGYSVEELLEYRAFVYSNCISQMEALLTASAKLNIELEVENKQRAANVLRRTIGNEPWLLLAADIKHLWEDKGIKETYAQKDKHFQLNDSAAYFFDNIDRYMREDFVPNEQDVLRCRVRTTGIQESEFTFDKIRLKIVDVGGQRSQRRKWIHCFDCVTAVIFVAAMSDYDQVLREDESVNRTRESLALFKEIVNCDYFKETPIVLFLNKKDLFKEKLKRVPLQSCFSDYTGPNKYKDAAMFIQSQYLAQGPSPRTIYTHATCAVDTENIKFVFRAVRQTILSQALEHF

SEQ ID NO: 7758 - protein, 390 aa, Dictyostelium discoideum
MSSTTTNTTTATPAIQVNGNQSSSPQSPSSSTSTLSPPMSPSLLTRYREQKAVNKQIEKQLKEEKKIMDSELKLLLLGTGDSGKSTVVKQMKILHLEGYSQEERINQRQFVYRNIIEIAYSIIRGCGVLNLTIPSQFDSICSSIEEIYETKNYTNLDKNVLKGVAELSKNESFINAANNSGSNFQLHSSSQYFLDDIARFSEEDYIPTDQDILYTRVASTSVSETRFSVRGIKFRMIDVAGQRGHRDKWIHHFSEVTAILFVISLCEYDQVLEEDGKTNRMIESIKVFGDIINQRLFKDIPIILFLNKRDLFAEKIKKTGISICFPDYTGPSDDYEQSLVFLKKKILSANKTSKAVYTNVTTATDTTNIGHVFEAVKDILTRQTMEEGGI

SEQ ID NO: 7759 - protein, 390 aa, Dictyostelium discoideum
MSSTTTNTTTATPAIQVNGNQSSSPQSPSSSTSTLSPPMSPSLLTRYREQKAVNKQIEKQLKEEKKIMDSELKLLLLGTGDSGKSTVVKQMKILHLEGYSQEERINQRQFVYRNIIEIAYSIIRGCGVLNLTIPSQFDSICSSIEEIYETKNYTNLDKNVLKGVAELSKNESFINAANNSGSNFQLHSSSQYFLDDIARFSEEDYIPTDQDILYTRVASTSVSETRFSVRGIKFRMIDVAGQRGHRDKWIHHFSEVTAILFVISLCEYDQVLEEDGKTNRMIESIKVFGDIINQRWFKDIPIILFLNKRDLFAEKIKKTGISICFPDYTGPSDDYEQSLVFLKKKILSANKTSKAVYTNVTTATDTTNIGHVFEAVKDILTRQTMEEGGI

SEQ ID NO: 7760 - protein, 504 aa, Dictyostelium discoideum
MEYVYNSNNNPREFCLSVETENKNWIISTGSKAQQLEWIEAIKHAIESAVETDEIKLQKHKSIEKQLQLDGKNKNKIPVLKLLLLGTGESGKSTVVKQMKILHHKGFSKEEEEFYRNLIYINLLDGMALLIHVIKENNIEIPQETLSAIKNYSSWYRVYIEKRNKNGIRNNPIGSMIPISILNNNKDNNNSNSSSLKNNSGGSSSSELDKKMTHLSLDGSTCINSNSASPNGPSSSTTTSTINTHNRSNSDGSSNNIFNVQDFGIPPIITNYISTIWSDPVVQSEVMLQAQKYHINESTQYYLNEIKRIGKPTYQPVNLDILKSRATTNGVVETDFNVNGEVIFRIVDVAGQRGERKKWINFFDDVTAIVFVAAINEYDQKLVEDNCTNRLHESLNLFDSICNDSTFPKTSIILFLNKIDLFREKLKRTSINICFPDYNGDQSYEKSSNYIKNNFLSKKKGGNGINSQNFIYFHFTCATDTKSFETVFNSVRDIIISKTLEFYC

SEQ ID NO: 7761 - protein, 219 aa, Avena fatua
STILKQIKLIHEGGYSRDERVPFKEIIFSNTVQSMRVILEAMESLELPLDDQRAEYHVRPSSCSRHRLRATRAFGVGNAISVLWKDAGVQQCFQRSNQYQLNDSAKYYFDSIDRYLAPDYIPNDQDVLRSRVKTTGIVETTFIIGDLTYRMFDVGGQRSEHKKWIHCFENVTTILFLVAISEYDQLLFEDETVNRMQEALTLFDSICNSRWFVKTSIIL

SEQ ID NO: 7762 - protein, 383 aa, Triticum aestivum
MGSSCSRPHSVNEAEAADNTRSADIDRRILQETKADQHVHKLLLLGAGESGKSTIFKQIKLLFRTGFDEAELKGYTPVIHANVFQTIKILYDGAKELAQLETESSKNVISPDNQEIGEKLSEIGGRLDYPLLNKELVQDVRKLWEDPAIQETYSCGSVLQVPDCAHYFMENLDRLAEPDYIPTKEDVLHARVRTNGVVEIQFSPLGESKRGGEVYRLYDVGGQRNERRKWIHLFEGVDAAIFCAAISEYDQLLFEDGTQNRMMETKELFDWVLKQRCFEKTSFMLFLNKFDIFEREIQKVPLTVCEWFKDYEPIAPGKVQDVEHAYEFVKKKFEEVYFQSSKPERVDRVFKIYRTTALDQKLVKKTFKLIDESMRRSREGTGT

SEQ ID NO: 7763 - protein, 390 aa, Triticum aestivum
MGSSCSRPHSVNEAEAADNTRSADIDRRILQETKADQHVHKLLLLGAGESGKSTIFKQIKLLFRTGFDEAELKGYTPVIHANVFQTIKVCQYWERILYDGAKELAQLETESLKHVISPDNQEIGEKLSEIGGRLDYPLLNKELVQDVRKLWEDPAIQETYSCGSVLQVPDCAHYFMENLDRLAEPDYIPTKEDVLHARVRTNGVVEIQFSPLGESKRGGEVYRLYDVGGQRNERRKWIHLFEGVDAVIFCAAISEYDQLLFEDETQNRMMETKELFDLVLKQRCFEKTSFMLFLNKFDIFERKIQKVPLTVCEWFKDYEPIAPGKVQDVEHAYEFVKKKFEEVYFQSSKPERVDRVFKIYRTTALDQKLVKKTFKLIDESMRRSREGTGT

SEQ ID NO: 7764 - protein, 396 aa, Triticum aestivum
  unsure (1)..(396): unsure at all Xaa locations
MSMLACALQTKGSTCLRHHFVNEAEAANNTRTADIDGGILQGTKPDQHVHKLLLLSAGESGKSTIFKQIKCVVIXLFSVGEEEDXFDPFVLAFTNKVQKTVLIYSTVSYKVAKVQPESSKYVILPDNQEIGEKLSEIGGRLDYPLLNKELVQDVRKLWEDQAIQETYSCGSVLQVPDCAHYFMDNLDRLAEADYVPTKEDVLHARVRTNGVVEIQFSPLGESKRGGEVYRLYDVGGQRNERRKWIHLFEGVDAVIFCAAISEYDQLLFEDETQNRMMETKELFDWVLKQRCFEKTSFMLFLNKFDIFERKIQKVPLTVCEWFKDYEPIAPGKQDVEHAYEFVKKKFEEVYFQSSKPERVDRVFKIYRTTALDQKLVKKTFKLMDESMRRSREGTGT

SEQ ID NO: 7765 - protein, 134 aa, Triticum aestivum
  unsure (1)..(134): unsure at all Xaa locations
XEYDQMLCEDETKNRMMETKELFDWVLKQRCFEKTSFMLFLNKFDIFERKIQKVPLSACEWFKDYQPIAPGKQEVEHAYEFVKKKFEELYFQSSLPDRVDRVFKIYRTTALDQKLVKKTFKLIDESMRRSREGT

SEQ ID NO: 7766 - protein, 131 aa, Triticum aestivum
  unsure (1)..(131): unsure at all Xaa locations
MSMLACALQTMGSSCSRPHSVNEAEAADNTRSADIDRRILQETKADQHVHKLLLLGAGESGKSTIFKQIKLLFRTGFDEAELKGYMPVIHANVFQTIKILYDGAKELAQLETESSKHVISPDNQEIGEKLX

SEQ ID NO: 7767 - protein, 110 aa, Triticum aestivum
  unsure (1)..(110): unsure at all Xaa locations
XKQRCFEKTSFMLFLNKFDIFXRKIQKVPLXVCEWFKDYEPIAXGKQDVEHXYEFVKKKFEEXYFQSSKPDRVDRVFKXYRTTALDQKLVKKTFKLIDESMRRSREGTGT

SEQ ID NO: 7768 - protein, 390 aa, Zea mays
MSVLTCVIESMGSSCSRSHSFDEAEAAENAKSADIDRRILQETKAEQHIHKLLLLGAGESGKSTIFKQIKLLFQTGFDEAELRSYTSVIHANVYQTIKILYEGAKELAQVEPDSSKYVLSPDNQEIGEKLSEIGARLEYPSLNKERVQDVRKLWQDPAIQETYSRGSILQVPDCAQYFMENLDRLSEEDYVPTKEDVLHARVRTNGVVETQFSPLGESKRGGEVYRLYDVGGQRNERRKWIHLFEGVNAVIFCAAISEYDQMLFEDETKNRMMETKELFDWVLKQRCFEKTSFMLFLNKFDIFERKIQKVPLSVCEWFKDYQPTAPGKQEVEHAYEFVKKKFEELYFQSSKPDRVDRVFKIYRTTALDQKLVKKTFKLIDESMRRSREGT

SEQ ID NO: 7769 - protein, 390 aa, Zea mays
MSVLTCVIESMGSSCSRSHSFDEAEAAENAKSADIDRRILQETKAEQHIHKLLLLGAGESGKSTIFKQIKLLFQTGFDEAELRSYTSVIHANVYQTIKILYEGAKELAQVEPDSSKYVLSPDNQEIGEKLSEIGARLEYPSLNKERVQDVRKLWQDPAIQETYSRGSILQVPDCAQYFMENLDKLSEEDYVPTKEDVLHARVRTNGVVETQFSPLGESKRGGEVYRLYDVGGQRNERRKWIHLFEGVNAVIFCAAISEYDQMLFEDETKNRMMETKELFDWVLKQRCFEKTSFMLFLNKFDIFERKIQKVPLSVCEWFKDYQPTAPGKQEVEHAYEFVKKKFEELYFQSSKPDRVDRVFKIYRTTALDQKLVKKTFKLIDESMRRSREGT

SEQ ID NO: 7770 - protein, 370 aa, Zea mays
MSVLTCVIESMGSSCSRSHSFDEAEAAENAKSADIDRRILQETKAEQHIHKLLLLGAGESGKSTIFKQIKLLFQTGFDEAELRSYTSVIHANVYQTIKILYEGAKELAQVEPDSSKYVLSPDNQEIGEKLSEIGARLEYPSLNKERVQDVRKLWQDPAIQETYSRGSILQVPDCAQYFMENLDKLSEEDYVPTKEDVLHARVRTNGVVETQFSPLGESKRGGEVYRLYDVGGQRNERRKWIHLFEGVNAVIFCAAISEYDQMLFEDETKNRMMETKELFDWVLKQRCFEVPLSVCEWFKDYQPTAPGKQEVEHAYEFVKKKFEELYFQSSKPDRVDRVFKIYRTTALDQKLVKKTFKLIDESMRRSREGT

SEQ ID NO: 7771 - protein, 216 aa, Zea mays
  unsure (1)..(216): unsure at all Xaa locations
FVYLIIYLRYLTRADFQXTREDVLHARVRTNGVVETQFSPLGESKRGGEVYRLYDVGGQRNERRKWIHLFEGVNAVIFCAAISEYDQMLFEDETKNRMMETKELFDWVLKQRCFEKTSFMLFLNKFDIFERKIQKVPLSVCEWFKDYQPTAPGKQEVEHAYEFVKKKFEELYFQSSKPDRVDRVFKIYRTTALDQKLVKKTFKLIDESMRRSREGT

SEQ ID NO: 7772 - protein, 179 aa, Zea mays
  unsure (1)..(179): unsure at all Xaa locations
MSMLACALQTMGSSCSRPHSVNEADAADNTRSADIDRRILHETEADQHIHKLLLLGAGESGKATIFKQIKLLFRTGFDEAELKGYTPVIHANVFQTIKILYDGAKELAQVESESSKYVMLPDNQEIGEKLSEIGGRLDYPSLNKXLVQDVRKLWEDQAIQETYSCGSVLLGPDCAPYFX

SEQ ID NO: 7773 - protein, 318 aa, Pneumocystis carinii
FSATYNQDTLRSKEIESYLRQEQEHACHEAKILLLGAGESGKTTILKQMKLLHLSGLTLKEREYYRTIIFSNMLQSMRLIIEAMEEFDICVERRENEQYLDLLLQERELTNRENLPPEYYRPFISLWEDAGVTRAVNRGNEYALHDNCFYFFENIHRLFERKYTPTDQDILRCRLKTTGITETCFKVSRLTYRMIDVGGQRSERRKWIHCFENVTAVLFLVAISGYDQCLTEDIGANRMQEALVLFDSICNSQWFINTSIILFLNKIDLFKVKLHVSLISNYFPDFNNENQTDYRACCLFFRQKFLRLNRNHQKTIYT

SEQ ID NO: 7774 - protein, 354 aa, Pneumocystis carinii
MGCCFSATYNQDTLRSKEIESYLRQEQEHACHEAKILLLGAGESGETTILKQMKLIHLSGFTLKEREYYRTIIFSNMLQSMRLIIEAMEEFDICFERRENEQYLDLLLQERELTNRENLPPEYYRPFISLWKDAGVTRAVNRGNEYALHDNCFYFYENIHRLFERKYIPTDQDILRCRLKTTGITETCFKVSRLTYRMIDVGGQRSERRKWIHCFENVTAVLFLVAISGYDQCLTEDIGANQMQEALVLFDSICNSQWFINTSIILFLNKIDLFKVKLHVSLISNYFPDFNNENQTDYRACCLFFRQKFLRLNRNHQKTIYTHFTNATDTTLLKNVMISVTDIIFNRNLQNLML

SEQ ID NO: 7775 - protein, 355 aa, Phytophthora infestans
MGLCASQMNDNDRQAMAKSREIEAKNEEAHRVEQEKVKLLLLGAGESGKSTVFKQMKILFGAALTEDEKRHCTPIIYNNVVTSMKMLIEQCAEMKLKGDVVCVQDFEDIRTLSDEAEVNLVIGQKIKNLWSDPGIVATWNRRAEFQIIESVKYYFNDLDRIMRDDYAATQQDMLYARVRTSGIVEERYQIDGATFVMYDVGGQRNERKKWIHCFEDVTAVIFVAALSEYDQSLYEDASTNRMIEAITLFDEIINNKFFLNSAMILFLNKKDLFQDKIKKVDPKTVEVFKDFPGGIGDYELGVQYFLGKFMEMNRQPEKEIYHHVTCATDSQNVQVVFNACKDIILKQNIKGSGFM

SEQ ID NO: 7776 - protein, 355 aa, Phytophthora palmivora
MGLCASQMSDSDRQAMAKSREIEAKNEEAHRVEHEKVKLLLLGAGESGKSTVFKHMKILYGASLTEEEKRHCTPIIYNNVVTSMKMLIEQCTEMKLKGEVVCAQDFEDIRTLSDEAEVNPVVGQKIKNLWTDPGIVATWNRRAEFQIIESVKYNSNDLDRIMRDDYAATQQDMLYARVRTSGIVEERYQIDGATFVMYDVGGQRNERKKWIHCFEDVTAVIFVAALSEYDQSLYEDASTNRMIEAITLFDEIINNKFFLNSAMILFLNKKDLFQDKIKKVDPKTVDVFKDFPGGIGDYELGVQYFLGKFMEMNRQPEKEIYHHVTCATDSQNVQVVFNACKDITLKQNIKGSGFM

SEQ ID NO: 7777 - protein, 201 aa, Mucor racemosus
TILKQDEGWIHDGGFTPEEKEAYKEIIFSNSVQSIHVLLEAMEILDIPLDDASNQGYFDYIMEQYQKMDYFSMPPELVKAIKQLWQDKGVQEAHSRRNEFQLNDSASYYFDSIDRIGDPNYLPTDQDVLRSRVKTTGIAESKFTFGTLTYRMFDVGGQRSERKKWIHCFEDVTAIIFLVAISEYDQVLIEDESVNRMQEAF

SEQ ID NO: 7778 - protein, 191 aa, Mucor racemosus
TILKQMKLIHDGGYTRNERESFKEVIFSNTMQSMRVTLEAMNNLGIAFDNPENEGHKRLVLEAPPQIDYLGHELVEAIASLWDDQGVQECVQRSNEFQLNDSARYYFDSILRIGQSNYMPSDQDVLRSRVKSTGITETTFVIDSLTYRMFDVGGQRSERKKWIHCFENVTALVFLVAISEYDQVLFEDESV

SEQ ID NO: 7779 - protein, 205 aa, Mucor racemosus
TILKQMKLIHDGGYSRDEREAFKEIIFSNTVQSMRVILEAMENMGVSYASSQNRLHSTVILDLPSQIERDSLPPEVTLALKSLWKDENLLSVFDRSREYQLNDSAKYYFDSIDRIGDINYIPTDQDVLRSRVKTTGITETTFVIGDLTYRMFDVGGQRSERKKWIHCFENVTAIIFLVAISEYDQVLIEDETVVNMHMQKRDDHR

SEQ ID NO: 7780 - protein, 352 aa, Suillus bovinus
MGNCVSAQDREEKARSDAIDRQIEEDSRKFRKECKILLLGSGESGKSTIVKQMKIIHQNGFNENELMTFRPTIYRNTLDSAQAIVLQMRNMNVECATPANRTFAERIVEYRVENTPDFVFSADIAQAIHELWQDPIIPKVMDCSSQFYLMDSAGYFFTEVLRIGTPDYIPTENDVLRARAKTTGITETRFNMGQLSIHMFDVGGQRSERKKWIHCFESVTSIIFCTALSEYDQVLLEEKNQNRMQESLILFESASTPAGLRTSIILFLNKIDVFKNKLPKVPIEKYFPEYTGGADINKAAKYILWKFMQANRARLSVYPHLTQATDTTNIRLVFAAVKETILQNALKDSGIL

SEQ ID NO: 7781 - protein, 354 aa, Schizosaccharomyces pombe
MTIFNGLSESGESKKLNSKIEKQIENASKKDKKIYKVLLLGASDSGKSTISKQIKILNKNGFSQEEIMTFIPVIRRNLLESAKTLVKIIVQKGINLDPLGTHNCEIIEKFNPTPGELINANIGQAITSLWSANSVRSCTYGNDSVLIDSAPYFFSRADEICSRHYVPTIDDILRSRNSTLGISEISFTLDHLQIRMFDVGGQRTERRKWIYCFENVNSIIFCVSLNDYDKKLYERAAPERNRLVESISLFDSIINSQWFMHSSIILFLNKFDLFRKKLEHVPFQDYFPQYEGKNSVKSITRYILWLFVNPSINRAKHNIYPHITTAVDTSNIKVVFSAVKETILQHSLKEAGMF

SEQ ID NO: 7782 - protein, 354 aa, Schizosaccharomyces pombe
MTIFNGLSESGESKKLNSKIEKQIENASKKDKKIYKVLLLGASDSGKSTISKQIKILNKNGFSQEEIMTFIPVIRRNLLESAKTLVKIIVQKGINLDPLGTHNCEIIEKFNPTPGELINANIGQAITSLWSANSVRSCTYGNDSVLIDSAPYFFSRADEICSRHYVPTIDDILRSRNSTLGISEISFTLDHLQIRMFDVGGQRTERRKWIYCFENVNSIIFCVSLNDYDKKLYERAAPERMRLVESISLFDSIINSQWFMHSSIILFLNKFDLFRKKLEMVPFQDYFPQYEGKNSVKSITRYILWLFVNPSINRAKHNIYPNITTAVDTSNIKVVFSAVKETILQHSLKEAGMF

SEQ ID NO: 7783 - protein, 407 aa, Schizosaccharomyces pombe
MGCMSSKYADTSGGEVIQKKLSDTQTSNSSTTGSQNARVPVLENWLNIVLRGKPQNVESSGVRVKGNSTSGGNDIKVLLLGAGDSGKTTIMKQMRLLYSPGFSQVVRKQYRVMIFENIISSLCLLLEAMDNSNVSLLPENEKYRAVILRKHTSQPNEPFSPEIYEAVHALTLDTKLRTVQSCGTNLSLLDNFYYYQDHIDRIFDPQYIPSDQDILHCRIKTTGISEETFLLNRHHYRFFDVGGQRSERRKWIHCFENVTALLFLVSLAGYDQCLVEDNSGNQMQEALLLWDSICNSSWFSESAMILFLNKLDLFKRKVHISPIQKHFPDYQEVGSTPTFVQTQCPLADNAVRSGMYYFYLKFESLNRIASRSCYCHFTTATDTSLLQRVMVSVQDTIMSNNLQSLMF

SEQ ID NO: 7784 - protein, 407 aa, Schizosaccharomyces pombe
MGCMSSKYADTSGGEVIQKKLSDTQTSNSSTTGSQNARVPVLENWLNIVLRGKPQNVESSGVRVKGNSTSGGNDIKVLLLGAGDSGKTTIMKQMRLLYSPGFSQVVRKQYRVMIFENIISSLCLLLEAMDNSNVSLLPENEKYRAVILRKHTSQPNEPFSPEIYEAVHALTLDTKLRTVQSCGTNLSLLDNFYYYQDHIDRIFDPQYIPSDQDILHCRIKTTGISEETFLLNRHHYRFFDVGGQRSERRKWIHCFENVTALLFLVSLAGYDQCLVEDNSGNQMQEALLLWDSICNSSWFSESAMILFLNKLDLFKRKGSHFPIQKHFPDYQEVGSTPTFVQTQCPLADNAVRSGMYYFYLKFESLNRIASRSCYCHFTTATDTSLLQRVMVSVQDTIMSNNLQSLMF

SEQ ID NO: 7785 - protein, 449 aa, Saccharomyces cerevisiae
MGLCASSEKNGSTPDTQTASAGSDNVGKAKVPPKQEPQKTVRTVNTANQQEKQQQRQQQPSPHNVKDRKEQNGSINNAISPTATANTSGSQQINIDSALRDRSSNVAAQPSLSDASSGSNDKELKVLLLGAGESGKSTVLQQLKILHQNGFSEQEIKEYIPLIYQNLLEIGRNLIQARTRFNVNLEPECELTQQDLSRTMSYEMPNNYTGQFPEDIAGVISTLWALPSTQDLVNGPNASKFYLMDSTPYFMENFTRITSPNYRPTQQDILRSRQMTSGIFDTVIDMGSDIKMHIYDVGGQRSERKKWIHCFDNVTLVIFCVSLSEYDQTLMEDKNQNRFQESLVLFDNIVNSRWFARTSVVLFLNKIDLFAEKLRKVPMENYFPDYTGGSDINKAAKYILWRFVQLNRANLSIYPHVTQATDTSNIRLVFAAIKETILENTLKDSGVLQ

SEQ ID NO: 7786 - protein, 449 aa, Saccharomyces cerevisiae
MGLCASSEKNGSTPDTQTASAGSDNVGKAKVPPKQEPQKTVRTVNTANQQEKQQQRQQQPSPHNVKDRKEQNGSINNAISPTATANTSGSQQINIDSALRDRSSNVAAQPSLSDASSGSNDKELKVLLLGAGESGKSTVLQQLKILHQNGFSEQEIKEYIPLIYQNLLEIGRNLIQARTRFNVNLEPECELTQQDLSRTMSYEMPNNYTGQFPEDIAGVISTLWALPSTQDLVNGPNASKFYLMDSTPYFMENFTRITSPNYRPTQQDILRSRQMTSGIFDTVIDMGSDIKMHIYDVGGQRSERKKWIHCFDNVTLVIFCVSLSEYDQTLMEDKNQNRFQESLVLFDNIVNSRWFARTSVVLFLNKIDLFAEKLSKVPMENYFPDYTGGSDINKAAKYILWRFVQLNRANLSIYPHVTQATDTSNIRLVFAAIKETILENTLKDSGVLQ

SEQ ID NO: 7787 - protein, 472 aa, Saccharomyces cerevisiae
MGCTVSTQTIGDESDPFLQNKRANDVIEQSLQLEKQRDKNEIKLLLLGAGESGKSTVLKQLKLLHQGGFSHQERLQYAQVIWADAIQSMKILIIQARKLGIQLDCDDPINNKDLFACKRILLKAKALDYINASVAGGSDFLNDYVLKYSERYETRRRVQSTGRAKAAFDEDGNISNVKSDTDRDAETVTQNEDADRNNSSRINLQDICKDLNQEGDDQMFVRKTSREIQGQNRRNLIHEDIAKAIKQLWNNDKGIKQCFARSNEFQLEGSAAYYFDNIEKFASPNYVCTDEDILKGRIKTTGITETEFNIGSSKFKVLDAGGQRSERKKWIHCFEGITAVLFVLAMSEYDQMLFEDERVNRMHESIMLFDTLLNSKWFKDTPFILFLNKIDLFEEKVKSMPIRKYFPDYQGRVGDAEAGLKYFEKIFLSLNKTNKPIYVKRTCATDTQTMKFVLSAVTDLIIQQNLKKIGII

SEQ ID NO: 7788 - protein, 472 aa, Saccharomyces cerevisiae
MGCTVSTQTIGDESDPFLQNKRANDVIEQSLQLEKQRDKNEIKLLLLGAGESGKSTVLKQLKLLHQGGFSHQERLQYAQVIRADAIQSMKILIIQARKLGIQLDCDDPINNKDLFACKRILLKAKALDYINASVAGGSDFLNDYVLKYSERYETRRRVQSTGRAKAAFDEDGNISNVKSDTDRDAETVTQNEDVDRNNSSRINLQDICKDLNQEGDDQMFVRKTSKEIQGQNRRNLIHEDIAKAIRQLWNNDKGIKQCFARSNEFQLEGSAAYYFDNIEKFASPNYVCTDEDILKGRIKTTGITETEFNIGSSKFKVLDAGGQRSERKKWIHCFEGITAVLFVLAMSEYDQMLFEDERVNRMHESIMLFDTLLNSKWFKDTPFILFLNKIDLFEEKVKSMPIRKYFPDYQGRVGDAEAGLKYFEKIFLSLNKTNKPIYVKRTCATDTQTMKFVLSAVTDLIIQQNLKKSGII

SEQ ID NO: 7789 - protein, 353 aa, Cochliobolus heterostrophus
MGCGMSTEEKEGKQRNEEIENQLKRDKLMQRNEIKMLLLGAGESGKSTILKQMKLIHEGGYSRDERESFKEIIFSNTVQSMRVILEAMESLELPLDDQRAEYHVQTIFMQPAQIEGDSLPPEVGNAISVLWKDAGVQQCFQRSREYQLNDSAKYYFDSIDRIAAPDYIPNDQDVLRSRVKTTGITETTFIIGDLTYRMFDVGGQRSERKKWIHCFENVTTILFLVAISEYDQLLFEDETVNRMQEALTLFDSICNSRWFVKTSIILFLNKIDRFKEKLPVSPMKNYFPDYEGGPDYAAACDYILNRFVSLNQHETKQIYTHFTCATDTMQIRFVMAAVNDIIIQENLRLCGLI

SEQ ID NO: 7790 - protein, 353 aa, Leptosphaeria maculans
MGCGMSTEEKEGKQRNEEIENQLKRDKMMQRNEIKMLLLGAGESGKSTILKQMKLIHEGGYSRDERESFKEIIFSNTVQSMRVILEAMESLELPLDDQRAEYHVQTIFMQPAQIEGDSLPPEVGNAISVLWKDAGVQQCFQRSREYQLNDSAKYYFDSIDRIAAPDYIPNDQDVLRSRVKTTGITETTFIIGDLTYRMFDVGGQRSERKKWIHCFENVTTILFLVAISEYDQLLFEDETVNRMQEALTLFDSICNSRWFVKTSIILFLNKIDRFKEKLPVSPMKNYFPDYEGGADYAAACDYILNRFVSLNQHETKQIYTHFTCATDTMQIRFVMAAVNDIIIQENLRLCGLI

SEQ ID NO: 7791 - protein, 353 aa, Aspergillus fumigatus
MGCGMSTEDKEGKARNEEIENQLKRDKMMQRNEIKMLLLGAGESGKSTILKQMKLIHEGGYSRDERESFKEIIYSNTVQSMRVILEAMESLELPLEDARNEYHVQTIFMQPAQIEGDSLPPEVGNAIGALWRDTGVQECFKRSREYQLNDSAKYYFDAIDRIAQPDYLPTDQDVLRSRVKTTGITETTFIIGDLTYRMFDVGGQRSERKKWIHCFENVTTILFLVAISEYDQLLFEDETVNRMQEALTLFDSICNSRWFVKTSIILFLNKIDRFKEKLPVSPMKNYFPDYEGGADYAAACDYILNRFVSLNQAEQKQIYTHFTCATDTTQIRFVMAAVNDIIIQENLRLCGLI

SEQ ID NO: 7792 - protein, 356 aa, Aspergillus fumigatus
MGSCFSTESPGDAEQKKRSQAIDRRLEEDSRRLRRECKILLLGSGESGKSTIVKQMKIIHQNGYTVEELALYRLTIYKNLLDCAKALIGAYHQFNLQPTSPKVREFIEFLSEYNIDPDPNTPLDPRIGDAVTYLWNDPCTSTALEHQNEFYLMDSAPYFFEEAKRIAAPDYIPNVADVLRARTKTTGIYETRFTMGQLSIHMFDVGGQRSERKKWIHCFENVTSIIFCVALSEYDQVLLEESNQNRMMESLVLFDSVVNSRWFMRTSIILFLNKVDLFRQKLPRSPLSNYFPDYSGGNDVNRAAKYLLWRFNQVNRAHLNLYPHLTQATDTTNIRLVFAAVKETILQNALKDSGIL

SEQ ID NO: 7793 - protein, 353 aa, Cryphonectria parasitica
MGCGMSTEEKEGKARNEEIENQLKRDRMQQRNEIKMLLLGAGESGKSTILKQMKLIHEGGYSRDERESFKEIIFSNTVQSMRVILEAMESLELPLEDQRMEYHVQTIFMQPAQIEGDVLPPEVGSAIEALWKDRGVQECFKRSREYQLNDSARYYFDNIARIAAPDYMPNDQDVLRSRVKTTGITETTFIIGDLTYRMFDVGGQRSERKKWIHCFENVTTILFLVAISEYDQLLFEDETVNRMQEALTLFDSICNSRWFIKTSIILFLNKIDRFKEKLPVSPMKNYFPDYEGGDDYAAACDYILNRFVSLNQHETKQIYTHFTCATDTTQIRFVMAAVNDIIIQENLRLCGLI

SEQ ID NO: 7794 - protein, 355 aa, Cryphonectria parasitica
MGACMSSSSEETEQKKRSQKIDKDLEEDSKRLRRECKILLLGSGESGKSTIVKQMKIIHLKGYSDEELYNYRPTVFKNLIECAKAVVNAMRQFDIEPEKEETKTLCDFLLEYSVDSGPQVLIDTRVGEAIQAIWNDPARKQLMDRQTEFYLMDSAEYFFEQAQRIVRQDYLPNEMDVLRARTKTTGIYETRFQMGQLSIHMFDVGGQRSERKKWIHCFENVTSIIFCVALSEYDQVLLEESSQNRMMESLLLFDSVVNSRWFVRTSIILFLNKVDIFKQKLGRSPLSNYFPDYSGGNDVNKAAKYLLWRFNQVNRAHLNLYPHLTQATDTSNIRLVFAAVKETILNNALKDSGIL

SEQ ID NO: 7795 - protein, 354 aa, Cryphonectria parasitica
MCFGSRKKEEADAMRSRELDKIIKADEKRMAKEVKLLLLGAGESGKSTVLKQMKLIYATGFSKTEKLEWKPVVFNNIVQSFRMIYDAMKEFDIPFEKPQSEKDMEQVLVDYELSPNDQFPEQYLQPLKDLWLDEGVKKAIAKGNEYALHDNLDYFCDDLDRFWDRTYIPTDQDLLRSRLRTTGITETIFDLSQLTYRMFDVGGQRSERKKWIHCFENVNCLLFLVAISGYDQCLVEDKDGNQMNEALMLWESIANSHWFLKSALILFLNKMDLFKEKLKKSPITQHGFTDYHGEPDDWKQASKYFMDKFRALNRNPEKEIYGHFTNATDTNLLKITMGSVQDMIIQRNLKQLIL

SEQ ID NO: 7796 - protein, 353 aa, Gibberella fujikuroi
MGCGMSTEEKEGKARNEEIENQLKRDKMMQRNEIKMLLLGAGESGKSTILKQMKLIHEGGYSRDERESFKEIIFSNTVQSMRVILEAMESLELPLEDQRMEYHVQTIFMQPAQIEGDVLPPEVGSAIEALWKDRGVQECFKRSREYQLNDSARYYFDNIARIAAPDYMPNDQDVLRSRVKTTGITETTFIIGDLTYRMFDVGGQRSERKKWIHCFENVTTILFLVAISEYDQLLFEDETVNRMQEALTLFDSICNSRWFIKTSIILFLNKIDRFKEKLPVSPMKNYFPDYEGGDDYAAACDYILNRFVSLNQHETKQIYTHFTCATDTTQIRFVMAAVNDIIIQENLRLCGLI

SEQ ID NO: 7797 - protein, 353 aa, Neurospora crassa
MGCGMSTEEKEGKARNEEIENQLKRDRMQQRNEIKMLLLGAGESGKSTILKQMKLIHEGGYSRDERESFKEIIFSNTVQSMRVILEAMESLELPLADQRVEYHVQTIFMQPAQIEGDVLPPEVGNAIEALWRDAGVQSCFKRSREYQLNDSARYYFDNIARIAAPDYMPNDQDVLRSRVKTTGITETTFIIGDLTYRMFDVGGQRSERKKWIHCFENVTTILFLVAISEYDQLLFEDETVNRMQEALTLFDSICNSRWFIKTSIILFLNKIDRFKEKLPVSPMKNYFPDYEGGDDYAAACDYILNRFVSLNQHETKQIYTHFTCATDTTQIRFVMAAVNDIIIQENLRLCGLI

SEQ ID NO: 7798 - protein, 353 aa, Neurospora crassa
MGCGMSTEEKEGKARNEEIENQLKRDRMQQRNEIKMLLLGAGESGKSTILKQMKLIHEGGYSRDGAESFKEIIFSNTVQSMRVILEAMESLELPLADQRVEYHVQTIFMQPAQIEGDVLPPEVGNAIEALWRDAGVQSCFKRSREYQLNDSARYYFDNIARIAAPDYMPNDQDVLRSRVKTTGITETTFIIGDLTYRMFDVGGQRSERKKWIHCFENVTTILFLVAISEYDQLLFEDETVNRMQEALTLFDSICNSRWFIKTSIILFLNKIDRFKEKLPVSPMKNYFPDYEGGDDYAAACDYILNRFVSLNQHETKQIYTHFTCATDTTQIRFVMAAVNDIIIQENLRLCGLI

SEQ ID NO: 7799 - protein, 356 aa, Neurospora crassa
MGACMSKNDEETEQKKRSQKIDRDLEEDSKKLRKECKILLLGSGESGKSTIVKQMKIIHLKGYSDEELTNYRPTVYKNLLECAKAVVNAMHQFDIQPADPSLRPYVEFLQDYNMEGCPPGQSIDPKVGTAIQALWNDPAKEQLMERQTEFYLMDSAEYFFTEVMRIVAEDYRPNEMDVLRARTKTTGIYETRFKMGQLSIHMFDVGGQRSERKKWIHCFENVTSIIFCVALSEYDQVLLEESSQNRMMESLLLFDSVVNSRWFMRTSIILFLNKVDIFKQKLGRSPLGNYFPDYSGGNDVNKAAKYLLWRFNQVNRAHLNLYPHLTQATDTSNIRLVFAAVKETILNNALKDSGIL

SEQ ID NO: 7800 - protein, 355 aa, Neurospora crassa
MCFGGRGKDDEAEASRSRDVDKQIRADEKRLSKEVKLLLLGAGESGKSTILKQMKLIYAQGFSKNEKLEWRPVIFANILQSFRLIFDAMNEFNIKLEDEDNEKNMVQMMVDYEMRGDEPLPLEYFEPAKKLWQDSGVRQAIEKGNEFALHDNLQYFCSDLDRLWDRNYVPSDQDLLRSRLRTTGITETVFDLGQLTYRMFDVGGQRSERKKWIHCFENVNCLLFLVAISGYDQCLVEDKDGNQMNEALMLWESIANSHWFTKSALILFLNKIDLFKEKLPRSPITNHGFTDYHGPPDDSKQASKYFMDKFRALNRNPDKEIYGHFTNATDTNLLKITMGSVQDMIIQRNLKQLIL

SEQ ID NO: 7801 - protein, 355 aa, Neurospora crassa
MCFGGRGKDDEAEASRSRELDKQIRADEKRLSKEVKLLLLGAGESGKSTILKQMKLIYAQGFSKNEKLEWRPVIFANILQSFRLIFDAMNEFNIKLEDEDNEKNMVQMMVDYEMRGDEPLPLEYFEPAKKLWQDSGVRQAIEKGNEFALHDNLQYFCSDLDRLWDRNYVPSDQDLLRSRLRTTGITETVFDLGQLTYRMFDVGGQRSERKKWIHCFENVNCLLFLVAISGYDQCLVEDKDGNQMNEALMLWESIANSHWFTKSALILFLNKIDLFKEKLPRSPITNHGFTDYHGPPDDSKQASKYFMDKFRALNRNPDKEIYGHFTNATDTNLLKITMGSVQDMIIQRNLKQLIL

SEQ ID NO: 7802 - protein, 313 aa, Neurospora crassa
MCFGGRGKDDEAEASRSRELDKQIRADEKRLSKEVKLLLLGAGESGKSTILKQMKLIYAQGFSKNEKLEWRPVIFANILQSFRLIFDAMNEFNIKLEDEDNEASLIQWTLISAPAKKLWQDSGVRQAIEKGNEFALHDNLQYFCSDLDRLWDRNYVPSDQDLLRSRLRTTGITETVFDLGQLTYPISGYDQCLVEDKDGNQMNEALMLWESIANSHWFTKSALILFLNKIDLFKEKLPRSPITNHGFTDYHGPPDDSKQASKYFMDKFRALNRNPDKEIYGHFTNATDTNLLKITMGSVQDMIIQRNLKQLIL

SEQ ID NO: 7803 - protein, 354 aa, Podospora anserina
MGSCMSTSGEESEQRKRSNKIDRDLEEDSKRLRRECKILLLGSGESGKSTIVKQMKIIHLKGYSHEELKNYRPTVFKNLLECAKSVASAMRQFDIEPVLDENKRHLDFLIDYSLDTNPQTIDAKVSVAIQSLWNDPAKEQLMERQTEFYLMDSAEYFFDEAARIAHKEYIPNEMDVLRARTKTTGIYETRFKMGQLSIHMFDVGGQRSERKKWIHCFENVTSIIFCVALSEYDQVLLEESSQNRMMESLLLFDSVVNSRWFMRTSIILFLNKVDIFKQKLGRSPLSNYFPDYSGGNDVNKAAKYLLWRFNQVNRAHLNLYPHLTQATDTSNIRLVFAAVKETILNNALKDSGIL

SEQ ID NO: 7804 - protein, 355 aa, Sclerotinia sclerotiorum
MGACMSSNVEDTEQRKRSQRIDKTLEEDSKRLRRECKILLLGSGESGKSTIVKQMKIIHQNGYTVDELALYRLTIYKNLIDCAKALVGAMRQMEIEPTNPANKEYGSFLLEYIVDPDPHTPLNPRVGTAVASVWKDGSMERLLARQSEFYLMDSAPYFFEEAGRIAAHDYIPTEADVLRARTKTTGIYETRFTMGSLSIHMFDVGGQRSERKKWIHCFENVTSIIFCVALSEYDQVLLEESNQNRMMESLVLFDSVVNSRWFMRTSIILFLNKVDLFKQKLGRSPLENYFPDYSGGNDLNRAAKYLLWRFNQVNRAHLNLYPHLTQATDTSNIRLVFAAVKETILQNALKDSGIL

SEQ ID NO: 7805 - protein, 433 aa, Filobasidiella neoformans
MGGCMSTPEAPKKTAETKQVPSTSTSSRPPQASTSATATAAGAGTSAANGTANGIKGDTTATNRVGTSGGQGLAAALASTEPPGAQDSKGNKDRSNQIDRQLEDDQKKFRKECKILLLGSGESGKSTIVKQMKIIHQNGYSKDELLSFRGVIYKNVLDSAQALIMAMRKIGVDPEDANNRSYADRILEYRMDAGLDAVIPSEILYNIESLWHDPVIPSVMDRSSEFYLMDSATYFFANIRKIAGPDYVPDEADVLRARTKTTGISETRFNMGQLSIHMFDVGGQRSERKKWIHCFEAVTSIIFCVALSEYDQVLLEESGQNRMQESLVLFESVINSRWFLRTSVILFLNKIDLFKQKLPKVPLVQYFPEYTGMRRNINKAAKYILWRFTQTNRARLSVYPHLTQATDTSNIRLVFAAVKETILQNALRDSGIL

SEQ ID NO: 7806 - protein, 353 aa, Ustilago maydis
MGCGASKVDKEGQARNDAIDAQLKKDRLAQKNEIKMLLLGAGESGKSTILKQMKLINHGSYSAEERESYKEIIFSNTVQSMRVLLDAMERLDIPLADATNAPRAEIILGLSPSIESSVLPRQVADAIHALWGDAGVQACFGRSREYQLNDSAKYYFDSIQRMAEPSYLPTDQDVLRSRVKTTGITETHFKIGELNYKLFDVGGQRSERKKWIHCFENVTAIIFLVAISEYDQLLYEDENVNRMQEALTLFDSICNSRWFVKTSIILFLNKIDLFKQKLPISPMADYFSDYTGGADYNSASEYIVNRFVSLNQSDAKTIYTHFTCATDTSQIKFVMSAVNDIIIQVNLRDCGLL

SEQ ID NO: 7807 - protein, 354 aa, Ustilago maydis
MGNCLSSSDQKEAKDRSVAIDKQIEEDSRKFKKECKILLLGSGESGKSTIVKQMKIIHQNGYTKDELLLYRLTVIKNLVDSAQAMVLALRKFKMEPEMPENRENVDAILQYRVDADPGATLDHAMARKVDSLWKDPIVPAIMERSSEFYLMDSAAYFFDNVNRIGQSDYVPNENDVLRARSKTTGISETRFNMGQLSIHLFDVGGQRSERKKWIHCFEAVTSIIFCVALSEYDQVLLEESGQNRMAESLVLFESVVNSRWFLRTSVILFLNKIDIFKQKIPKQPLSKYFPEYSGGPDINKAAKYILWRFTQTNRARLSIYPHLTQATDTSNIRLVFAAVKETILTNALKDSGIL

SEQ ID NO: 7808 - protein, 356 aa, Ustilago maydis
MGACLSAEQSHDTPEYKRSKALDRRIKEDEKNLSREVKLLLLGAGESGKSTILKSMRIIHHIPFTDEERENFRRLVFLNLVQGMKTILDVMEEWSIDFQDDSNIDHLLLFVSYPDISEDEPFPTNYLVALKDLWLDQGVQSVYRRGNEAAVPDNMSYYYTDLDRLFSPSYIPSEDDILRCRNKTTGIIETTFPLQDHVYRIFDVGGQRSERKKWIHCFENVTAVLFCVALSGYDSCLVEDKDSNQMQEALMLFDSICNSKWFARTSMILFLNKVDVFRQKIAYSSIKHYFPDYDGDDQDFNAARSYFKARFCRLNRSVNKEIYPSFTNATDVSLLKIVMASVTDIILTNNLRDIVL

SEQ ID NO: 7809 - protein, 580 aa, Ustilago maydis
MSPSVSSPQLRHTKSNRAISRIDRTDPLALALQPPANEAPADKYARLHQEKLAKQRSDEIDKFLKQHQEDRATHGLASSPSTSVDGANFKKGRVYKMVLLGQAGAGKTTVLKQMRLLYDPPAHERERRGWTKIVLLNLTSSVRVLLETLSLYHDQRLERKSSELSRLESSTSASTSTSASASSPKHVDTESQPNDATRLELAKQLGTTKKINTSSLPWLTHIPSVVQLERALRTELGAFGEEAVLSASSDEAAITNQKVRTRLDAQGSSSIRGEKSPLVLRPGWQERLFTYARRSLSLTQNGRAAAARRETDGGDSQSESEKDNSETLKLLRAIRPEVLALWNDDAGCRALRKRGLFLDGQSDAATSYFLDNYSRITDAAYRPTDEDILHSRVRTLGVTEDVFRVDRSLIYRIYDVGGSRSQRAAWAPFLDDIESIIFLAPLSAFDQPLVEDCSTNRLADTFTLFNQIVTNPLLEHATMILFLNKIDLLEKKLRQGVQLHKYWPEYVGDNDFEAVWRWFRAKFRDALRRAEDEVNLDQTSRRRLYVHTTVATSTVQIRAILMSVKDSILRENLKLTGLVG

SEQ ID NO: 7810 - protein, 354 aa, Schizophyllum commune
MGCVQSSGVDEEAKARNDEIESQLKKDRMMAKNEIKMLLLGAGESGKSTVLKQMKLIHHGGYNEQERDSYKEIIFSNTIQSMRAILEAMPQLDIPLTPQNDARRAVIMSMPMQIEADVLPPDVVDAIRSLWKDPGVRQAVQRSREFQLNDSAVYYFNSIDRMAAPNYMPTDQDILRSRVKTTGITETTFKVGELTYKLFDVGGQRSERKKWIHCFENVTALVFLVSLSEYDQMLYEDESVNRMQEALTLFDSICNSRWFVKTSIILFLNKIDLFAEKLPRSPLGDYFPDYTGGDNYDAACDYLLHRFVSLNQSAATKQIYAHYTCATDTQQIKFVLSAIQDILLQLHLRECGLL

SEQ ID NO: 7811 - protein, 355 aa, Schizophyllum commune
MGGCASKPVDLEAKARSDDIDKMIEEDGKRLKKECKILLLGSGESGKSTIVKQMKIIHQDGFSQDELIAYRPIIHRNVLDSAKAILVHMKKLSVECEDFKNRPLQDKILDYQLDETTNLTISPDIAEAIDAFWKDPAVTRIIDEQTSHFYLMDSATYFFTEVLRIGEPNYIPTETDVLRARAKTTSITETRFTMGPLSIHMFDVGGQRSERKKWIHCFESVTSIIFCTALSEYDQSLLEEKNQNRMAESLVLFESIINSRWFLRTSIIIFLNKIDVFKLKVHKVPLERYFPEYTGGKDPNKAAKFILWKFMQANRAGLSVYPHLTQATDTSNIRLVFAAVKETILQNALKDSGIL

SEQ ID NO: 7812 - protein, 352 aa, Schizophyllum commune
MGACVSSSSQPVADVQAKERSDEIDSQIKADSERLKKECKILLLGSGESGKSTIVKQMKIIHKNGFSPQELASFRPTVYRNVIDSAQAVAQIIKKANPESPNLALLDKIIDYDANGIVTPDLADAIRRITSDPATPKIIDEHANEFYLMDNAAYFFENVVRIGAEKYLPTETDILRARVKTTSIKETRFACGPLTIHMFDVGGQRSERKKWIHCFESVTSIIFCTALSEYDQVLLEEKNQNRMAESLTLFESVINSRWFLRTSIILFLNKTDVFKIKLPKVPLDRYFPEYTGGNDINKAAKFILWKFMQANRARLSVYPHLTQATDTKNVRHVFAAVKETILHNALKDSGIL

SEQ ID NO: 7813 - protein, 352 aa, Schizophyllum commune
MGGCASKPVDLEAKARSDDIDKMIEEDGKRLKKECKILLLGSGESGKSTIVKQMKIIHQDGFSQDELIAFRPSSTANVLDSAKAILSHEKLNVECEDFKNRPLQDKILDYQLDETNLPFPRHLPNHKPFWKDPAVTRIIDEQTSHFYLMDSATYFFTEVLRIGEPNYIPTETDVLRARAKTTSITETRFTMGPLSIHMFDVGGQRSERKKWIHCFESVTSIIFCTALSEYDQSLLEEKNQNRMAESLVLFESIINSRWFLRTSIIIFLNKIDVFKLKVHKVPLERYFPEYTGGKDPNKAAKFILWKFMQANRAGLSVYPHLTQATDTSNIRLVFAAVKETILQNALKDSGIL

SEQ ID NO: 7814 - protein, 351 aa, Schizophyllum commune
MGACVSSSSQPVADVQAKERSDEIDSQIKADSERLKKECKILLLGSGESGKSTIVKQMKIIHKNGFSPQELASFRPTVYRNVIDSAQAVAQIIKKANPESPNLALLDKIIDYDANGIVTPDLADAIRRITSDPATPKIIDEHANEFYLMDNAAFFENVVRIGAEKYVPTETDILRARVKTTSISETRFACGPLTIHMFDVGGQRSERKKWIHCFESVTSIIFCTALSEYDQVLLEEKNQNRMAESLTLFESVINSRWFLRTSIILFLNKTDVFKIKLPKVPLDRYFPEYTGGNDINKAAKFILWKFMQANRARLSVYPHLTQATDTKNVRHVFAAVKETILHNALKDSGIL

SEQ ID NO: 7815 - protein, 353 aa, Coprinellus congregatus
MGCVQSTGVDDEAKARNDEIENQLKRDRVMAKNEIKMLLLGAGESGKSTVLKQMKLIHHGGYSDQEKDSYKEIIFSNTVQSMRAILDALPALDLALQPANDARRATILAVPGQIEAEVLPRDIADAIRQLWADPGLKEAVRRSREFQLNDSAVYYFNSIDRMSAPGYLPTDQDILRSRVKTTGITETTFKVGELTYKLFDVGGQRSERKKWIHCFENVTALVFLVSLSEYDQMLYEDESVNRMQEALTLFDSICNSRWFVKTSIILFLNKIDLFAEKLPARRSTYFPDFTGGDNYDAACDYLLHRFVSLNQSAATKQIYAHYTCATDTQQIKFVLSAIQDILLQLHLRECGLL

SEQ ID NO: 7816 - protein, 354 aa, Lentinula edodes
MGCAQSSGIDDEAKARNDEIENQLRRDRMMAKNEIKMLLLGAGESGKSTVLKQMKLIHHGGYNDSERDSYKEIIFSNTIQSMRAILDAMPSLDLFLNPSNDARRATILSLPVQLEVDVMPRDVGDSIRGLWSDPAVKEAVKRSREFQLNGSAVYYFNSIDRMSGPGYMPSDQDILRSRVKTTGITETTFQVGELTYKLFDVGGQRSERKKWIHCFENVTALVFLVSLSEYDQMLYEDESVNRMQEALTLFDSICNSRWFVKTSIILFLNKIDLFAEKLPRSPLGDYFPDYTGGNNYDAACEYLLRRFVSLNQSAATKQVYAHYTCATDTQQIKFVLSAIQDILLQLHLREAGLL

SEQ ID NO: 7817 - protein, 353 aa, Helicobasidium mompa
MGACFSSEGGGQHDISYAIDRQIEEDARKFKKECKILLLGSGESGKSTIVKQMKIIHQNGYTRDELVLFKATVFKNVVDSAQAIVLALRKFRMDPVEPVNRMYADRIMEYRVDLDMGIGLSQDVVRSIESLWHDPIIPSVLDRGSEFYLMDSAPYFFDDVQRIGSPDYIPNETDVLMARTKTTGISETKFRSGQLSIHMFDVGGQRSERKKWIHCFEAVTSIIFCVALSEYDQVLLEESNQNRMAESLVLFESVINSRWFLRTSIILFLNKIDLFKAKLPKVPLERYFAEYTGGDDVNKAAKYILWRFTQLNRARLSIYPHLTQATDTSNIRLVFAAVKETILQNALRDSGIL

SEQ ID NO: 7818 - protein, 353 aa, Colletotrichum trifolii
MGCGMSTEDKEGKARNEEIENQLKRDKMMQRNEIKMLLLGAGESGKSTILKQMKLIHEGGYSRDERESFKEIIFSNTVQSMRVILEAMESLELPLEDQRMEYHVQTIFMQPAQIEGDVLPPEVGSAIEAVWKDRGVQDCFKRSREYQLNDSARYYFDNIARIAAPDYMPNDQDVLRSRVKTTGITETTFIIGDLTYRMFDVGGQRSERKKWIHCFENVTTILFLVAISEYDQLLFEDETVNRMQEALTLFDSICNSRWFIKTSIILFLNKIDRFKEKLPVSPMKNYFPDYEGGDDYAAACDYILNRFVSLNQHETKQIYTHFTCATDTTQIRFVMAAVNDIIIQENLRLCGLI

SEQ ID NO: 7819 - protein, 429 aa, Candida albicans
MGCGASVPVDDDEIDPFLQDKRINDAIEQSLQLRQQNSKKGVKLLLLGAGESGKSTVLKQLKLLHKGGFTQQERRQYSHVIWCDVIQSMKVLIIQARKLKIKLDCDQPNNSLIPYKQIILRSDPLKQIDASVAGGTDFLNDFVVKYSEENKNKRRLKSTGTTDIWGKDDDSNINSDAINQALELSLNKDSEQFTRLSIAEAIHKLWKLDSGIKKCFDRSNEFQLEGSADYYFDNVVNFADTNYLSTDLDILKGRIKTTGITETDFLIKSFQFKVLDAGGQRSVRKKWIHCFEDITAVLFVLAISEYDQNLFEDERVNRMHESIVLFDSLCNSKWFANTPFILFLNKIDIFENKIKKNPLKNYFPDYDGKPDDTNEAIKFFETNFLKINQTNKPIYVHRTCATDSKSMKFVLSAVTDMIVQQNLKKSGIM

SEQ ID NO: 7820 - protein, 429 aa, Candida albicans
MGCGASVPVDDDEIDPFLQDKRINDAIEQSLQLRQQNSKKGVKLLLLGAGESGKSTVLKQLKLLHKGGFTQQERRQYSHVIWCDVIQSMKVLIIQARKLKIKLDCDQPNNSLIPYKQIILRSDPLKQIDASVAGGTDFLNDFVVKYSEENKNKRRLKSTGTTDIWGKDDDSNINSDAINQALESSLNKDSEQFTRLSIAEAIHKLWKLDSGIKKCFDRSNEFQLEGSADYYFDNVVNFADTNYLSTDLDILKGRIKTTGITETDFLIKSFQFKVLDAGGQRSVRKKWIHCFEDITAVLFVLAISEYDQNLFEDERVNRMHESIVLFDSLCNSKWFANTPFILFLNKIDIFENKIKKNPLKNYFPDYDGKPDDTNEAIKFFETNFLKINQTNKPIYVHRTCATDSKSMKFVLSAVTDMIVQQNLKKSGIM

SEQ ID NO: 7821 - protein, 353 aa, Mamestra brassicae
MECCMSEEAKEQKRINQEIERQLRKDKRDARRELKLLLLGTGESGKSTFIKQMRIIHGSGYSDDDKRGFIKLVYQNIFMAMQSMIRAMELLTIQYGNPSNSEKAELISSIDFESVTTFESPYVEAIKALWADAGIQECYDRRREYQLTDSAKYYLQEIDRVAAPNYLPTEQDILRVRVLTTGIIEYPFDLEEIRFRMVDVGGQRSERRKWIHCFENVTSIIFLVALSEYDQILFESENENRMEESKALFKTIITYPWFQHSSVILFLNKKDLLEEKIMYSHLVDYFPEYDGPQRDANTAREFILRTFVDLNPDAEKIIYSHFTCATDTENIKLVFCAVKDTIMQSALKEFNLA

SEQ ID NO: 7822 - protein, 327 aa, Trichoderma viride
  unsure (1)..(327): unsure at all Xaa locations
ENQLKRDKXMQRNEIKMLLLGAGESGKSTILKXMKLIHEGGYSRDERESFKEIIFSNTXQSMRVILEAMESLELPLQDXRMEYHVQTIFIQPAQIEGDVLPPEVGGAIEALWKDHGVXECFKRSREYXLNDSARYYXDXIVXIAGXXYMPXDQDVLRSRVKTTGITETTFIIGDLTYXMFDVGGQRSEXKKWIHCFENVTTILFLVAISEYDQLLFEDETVNRMQEALTLFXSICNSRWFIKTSIILFLNKIDRFKEKLPVSPMKNYFPDYEGGDDYXAACXYILNRFVSLNQHETKQIYTHFTCATDTXXIRFVMAAVNXXIXXDN

SEQ ID NO: 7823 - protein, 402 aa, Trichomonas vaginalis
MGCSASKPSEPSNAKLPSAPVPKKVEQVPEPKPEPQPQPEPQPQPEPPKPAEPAPAPAPAPEPQKPAEPAPKVVAVEDDTNEAYGLLLCGAGESGKTTFTRQLKLRYLNGFNEKDCRDFLRTIRGNLVETMQLLLVWLEHNNIEIEDSELSSMAQDIIDVDPQDCEFNEELVEKLKALWENEQIKKAFEHKDETAVPDHMPYFFAKIDELAGEDYIPSNEDVLRARIRSIGIEAITFDLQGARIRIFDVGGQKSERSKWANVMNQVEGVIFCVSFAEFDKPMFEDQNVLRINDSLEIFGNITHQEKFSNSPIFLVCNKFDVFTEKIKNTDAFVKIFPEFSGDSHNPEACADYLIQRFLDKAAPLSEDRPIIQYKIVALNGDQVVETADAICKFISDKYYQDA

SEQ ID NO: 7824 - protein, 147 aa, Stentor coeruleus
MRILSHVNGFSTQEKLSKLEDIKRNIRDAILTICDAMEKLNVSLENEQLRPKLDWIIDHASETKFLISPEFWEYTEELWKDKGIQQCYERSNEYQLIDCAKYFLDKVKLIISPGYVPDEQDILRCRVHTSGIFETTFTVDKVCFYMF

SEQ ID NO: 7825 - protein, 359 aa, Geodia cydonium
  unsure (1)..(359): unsure at all Xaa locations
MGGCVSATPEEREAKTRSSVIDRQQRQDARQYENTIKILLLGAGESGKSTVVKQMKIIHGDGYSQTEXRSFKSVIYGNLAASMRVVLNAMEKLGIPYGNQASQEQARVILSLSNSLSSYESFPPDVTSAFISLWRDAGVQECFSRAYEYQLNDSAPYYFQNMDRLLREDYVPDEQDVLRSRVQTTGIIETSFRVKQLTYRVVDVGGQRSERRKWIQCFDDVRAVLFVCALSGYDMTLFEDGKTNRLEESLNLFQAICNNKFFVKTSMILFLNKADLFRDKITNSDRHLRLYFTQYTGPDRDVEAASRFIQSEFMERNLNKQKIIYPHLTTATDTTNIKVVFGVVLDTIIRENLEAANLL

SEQ ID NO: 7826 - protein, 355 aa, Geodia cydonium
MSCLLSEEERLQKRINTRINRELQRDHKDAKKEIKLLLLGTGESGKSTFIKQMRIIHGKGYSKQDCLEYKNLVFRNILMSMHSMLQATAELKIAYIDPDAQRHVQLLMALRPETAQSLGGETCEAIRKLWQDAGVQECYQRRNEYQLSDSTKYYLDDLPRISSNDYVPTTQDVLRVRVPTTGINEYPFTINKIIFKMVDVGGQRSERRKWIHCFDHVTSVMFLVAISEYDQILVEADSRVNRMVESLHLFNTIISYPWFNKSSIILFLNKKDLLEEKVMHSHLIDYFEEYDGPKCDHVSARESIAKMFISINDMRSADIYPHFTCATDTENIKFVFDVVKNHILQQHITEVVPGL

SEQ ID NO: 7827 - protein, 381 aa, Geodia cydonium
MSCFGGGVEDDRTKEQKRQNKLIDQQLKKDKKAYRALHRLLLLGAGESGKSTVVKQMKILHKDGFSDEERKEKLVDIKSNIRDIVVTVTKAMSELDPPVSLGSPENEEHLQYLWSDEVTRKDYDYPEKFFEAVSKVWNDSGVQTCSARSNEYQLIDSAAYFMASEKQAQLKEPNYIPNDQDILRCRVLTSGIFETRFVVDKVHFYMFGVGGQRIERRKWIQCFNDVTAIIFVVACSSFNMVIREDLYTNRLRESLDLFEQIWNNRWLRTVSIILFLNKQDILKEKIDAGKRVENYFLEFNSYRPPDNLDLSKEPPGSSSTFLKARYFFRDMFLRITNKSHDGRHFCYPHFTTAVDTENIRRVFDSCRDIIQRMHLQKYELL

SEQ ID NO: 7828 - protein, 305 aa, Hydra magnipapillata
RIIHGQGYTEDDRRGYTNLVFLNIYQAMQALTRAMRNLKISYSNPANEENARLILDVDLSEDKSRTTITLSPQYASAIESLWKDSGIQEVYDRRREYQLSDSAKYYLSDLKRICAPNFVPTMQDVLRARAPTTGIIEYPFDLDTIIFRMVDVGGQRSERRKWIHCFENVTSIMFLVALSEYDQVLFESQSENRMDESKALFKTIITYPWFLQSSIILFLNKTDLLEEKIQKSDLQTYFPEYDGAKGDAKAAKEFILKMFVDLNPDTDKIIYSHFTCATDTENIRFVFAAVRDTILQLNLKEYNLV

SEQ ID NO: 7829 - protein, 301 aa, Hydra magnipapillata
KIIHESGYTSDECFQYKPVVYSNTIQSMLAIIRALGTLNIEFSNPDRQEDARQLFSLASGVEDGSFTPELIAIMKRLWRDEGVQQCFQRSREYQLNDSAGFYLSDLDRIGAPDYVPTQQDVLRTRVKTTGIVETHFVFKELHFKMFDVGGQRSERKKWIHCFEGVTAIIFCVALSGYDLLLAEDEETNRMHESMKLFDSICNNKWFMDTSIILFLNKKDLFAEKIKKSPLTTCFPEYMGANTYDEAGSYIQLQFENLNSRKGEKEIYTHFTCATDTNNIQFVFDAVTDVIIKNNLKDCGLF

SEQ ID NO: 7830 - protein, 305 aa, Hydra magnipapillata
RIIHGKDYSEESLLEFKPIIYSNVLKGMKVLADARRKLDIPWGDPNSELYGEYILNIDHQTSTFDTAFFLEHVEAIRHLWNDTGIQTAFKRRNEFQLGDSTSYFLDSLDRVGRKDFMPSKQDMLHSRKATKGIQEYEFDLKGVPFVMVDVGGQRSQRTKWFQCFDNVTSILFMVSSSAYDQVIMEDRRTNCLIESCMIFETIVNNKCFTKVSIILFLNKTDLLEQKIRNRHNSIKDFFPQFQGDPYNLSDVQNFILQMFDSRRRERSKALFHHFTTAIDTENIKFVFHAVKDTILQDNLKSLMLQ

SEQ ID NO: 7831 - protein, 321 aa, Hydra magnipapillata
RILHVDGFNETEKKEKIEDIKKNIKEGILTITGAMKTIVPPVKLENPANQWRIDWLHDNATVDDNDFTYPEEFYNHVEVLWKDKGVQECFERSNEYQLIDCAQYFLDRTADVRKPIYSPSNQDLLRCRVLTRGIIETRFQVDRVNFHMFDVGGQRDERRKWIQCFNDVTAIIFVVACSSYNLVLREDPTTNRLRESLTLFTGIWNNRFLKTISVILFLNKQDLLREKVLAQKSKIEDYFADYARYRTPEDAVKEASEEEEVTRAKYFIRDEFLRISTATGEGKHYCYPHFTCAVDTENIRRVFNDCRDIIQRMHLRQYELL

SEQ ID NO: 7832 - protein, 328 aa, Schistosoma mansoni
  unsure (1)..(328): unsure at all Xaa locations
MQAAKDVKLLLLGAGESGKSTIVKQMKIIHEGGFTQEDNKQYKPVVYSNTIQSMVAILRAMNTLGIQFGDSEQGAEDARIVCDVIQAMEDTKPFSEDLLDAMKRLWADSGVQECFARSNEYQLNDSAKYFLDDLDRLGAKDYMPTEQDILRTRVKTTGIVEVHFQFKNMNFKLFDVGGQRSERKKWIHCFEDVTAIIFCVAMSEYDQVLHEDETTNRMQESLKLFDSICNNKWFTDTSIILFLNKKDLFEEKIKRSPLTICFPEYPGKQTYEEAAIYIQASFEXKNRSPNKEIYCHQTCATDTNNIQFVFDAVTDVIIANNLKGCGLY

SEQ ID NO: 7833 - protein, 379 aa, Schistosoma mansoni
MVIGCCTLNNISEDAKTRSDANKQIEKLIEKEKKNFKSTHRLLLLGAGESGKSTIVKQMRILHIDGFSEREKKEKIDAIRKNLRDAICSIAGAMGSLKPPVKLELSENRKLRDYILETASKPDFDYPPEFFTYCAKLWKDGGIQETFERSNEYQLIDCAKYFLDKALEVGAPNYIPSEQDILRCRVLTSGIFETKFSVDKVNFHMFDVGGQREERRKWIQCFNDVTAIIFVAACSSYNMVLREDPSQNRVKESLELLASIWNNRWLRNISVILFLNKQDLLTEKVLAGKSKIEVYFPHYATYQAPADTLAEYRHENSEVVRARFFFRDEFLKVTSNNNGGRHYCYPHLTCAVDTENIRRVFNDCRDIIQRMHLRQYELL

SEQ ID NO: 7834 - protein, 356 aa, Caenorhabditis briggsae
MGSCQSNENSEGNARNKEIEKQLNADKRAGSSIVKLLLLGAGECGKSTVLKQMQILHSNGFTEEEVNEKRAIVYNNTVSAMCTILRAMDGVLHLPLENGQKEAEKAIVMKVQENGEEGEALTEEVSRAIQSLWADPGVKKAFEMRSEYQLPDSAKYFLDNCQRISEPGYRPNDQDILYSRVATTGVVEVKFKIKELDFRVFDVGGQRSERRKWIHCFDNVESIIFITAISEYDQVLFEDETTNRMIESMQLFNSICNSTWFLSTAMILFMNKKDLFMEKIQRVNITTAFPDYEGGQNYEEAVAFIKQKFAELNLNPDKKTIYMHETCATDTNQVQLVISSVIDTIIQKNLQKAGMM

SEQ ID NO: 7835 - protein, 333 aa, Caenorhabditis briggsae
MGSCQSNENSEGNARNKEIEKQLNADKRAGSSIVKLLLLGAGECGKSTVLKQMQILHSNGFTEEEVNEKRAIVYNNTVSAMCTILRAMDGVLHLPLENGQKEAEKAIVMKVQENGEEGEALTEEVSRAIQSLWADPGVKKAFEMRSEYQLPDSAKYFLDNCQRISEPGYRPNDQDILYSRVATTGVVEVKFKIKELDFRVFDVGGQRSERRKWIHCFDNVESIIFITAISEYDQVLFEDETTNRMIESMQLFNSICNSTWFLSTAMILFMNKKDLFMEKIQRVNITTAFPDYEGGQNYEEAVAFIKQKFAELNLNPDKKTIYMHETCATDTNQ

SEQ ID NO: 7836 - protein, 354 aa, Caenorhabditis elegans
MGCTMSQEERAALERSRMIEKNLKEDGMQAAKDIKLLLLGAGESGKSTIVKQMKIIHESGFTAEDYKQYKPVVYSNTVQSLVAILRAMSNLGVSFGSADREVDAKLVMDVVARMEDTEPFSEELLSSMKRLWGDAGVQDCFSRSNEYQLNDSAKYFLDDLERLGEAIYQPTEQDILRTRVKTTGIVEVHFTFKNLNFKLFDVGGQRSERKKWIHCFEDVTAIIFCVAMSEYDQVLHEDETTNRMHESLKLFDSICNNKWFTDTSIILFLNKKDLFEEKIKKSPLTICFPEYSGRQDYHEASAYIQAQFEAKNKSANKEIYCHMTCATDTTNIQFVFDAVTDVIIANNLRGCGLY

SEQ ID NO: 7837 - protein, 354 aa, Caenorhabditis elegans
MGCTMSQEERAALERSRMIEKNLKEDGMQAAKDIKLLLLGAGESGKSTIVKQMKIIHESGFTAEDYKQYKPVVYSNTVQSLVAILRAMSNLGVSFGSADREVDAKLVMDVVARMEDTEPFSEELLSSMKRLWGDAGVQDCFSRSNEYQLNDSAKYFLDDLERLGEAIYQPTEQHILRTRVKTTGIVEVHFTFKNLNFKLFDVGGQRSERKKWIHCFEDVTAIIFCVAMSEYDQLLHEDETTNRMHESLKLFDSICNNKWFTDTSIILFLNKKDLFEEKIKKSPLTICFPEYSGRQDYHEASAYIQAQFEAKNKSANKEIYCHMTCATDTTNIQFVFDAVTDVIIANNLRGCGLY

SEQ ID NO: 7838 - protein, 342 aa, Caenorhabditis elegans
MGSCQSNENSEGNARNKEIEKQLNADKRAGSSIVKLLLLGAGECGKSTVLKQMQILHSNGFTEEEVNEKRAIVYNNTVSAMCTILRAMDGVLHLPLENGQKEAEKAIVMKVQENGEEGEALTEEVSKAIQSLWADPGVKKAFEMRSEYQLPDSAKYFLDNCQRISEPGYRPNDQDILYSRVATTGVVEVKFKIKELDFRVFDVGGQRSERRKWIHCFDNVESIIFITAISEYDQVLFEDETTNRMIESMQLFNSICNSTWFLSTAMILFMNKKDLFMEKIQRVNITTAFPDYEGGQNYEEAVSFIKQKFAELNLNPDKKTIYMHETCATDTNQVQLVISSVI

SEQ ID NO: 7839 - protein, 356 aa, Caenorhabditis elegans
MGSCQSNENSEGNARNKEIEKQLNADKRAGSSIVKLLLLGAGECGKSTVLKQMQILHSNGFTEEEVNEKRAIVYNNTVSAMCTILRAMDGVLHLPLENGQKEAEKAIVMKVQENGEEGEALTEEVSKAIQSLWADPGVKKAFEMRSEYQLPDSAKYFLDNCQRISEPGYRPNDQDILYSRVATTGVVEVKFKIKELDFRVFDVGGQRSERRKWIHCFDNVESIIFITAISEYDQVLFEDETTNRMIESMQLFNSICNSTWFLSTAMILFMNKKDLFMEKIQRVNITTAFPDYEGGQNYEEAVSFIKQKFAELNLNPDKKTIYMHETCATDTNQVQLVISSVIDTIIQKNLQKAGMM

SEQ ID NO: 7840 - protein, 344 aa, Caenorhabditis elegans
MGSCQSNENSEGNARNKEIEKQLNADKRAGSSIVKLLLLGAGECGKSTVLKQMQILHSNGFTEEEVNEKRAIVYNNTVSAMCTILRAMDGVLHLPLENGQKEAEKAIVMKVQENGEEGEALTEEVSKAIQSLWADPGVKKAFEMRSEYQLPDSAKYFLDNCQRISEPGYRPNDQDILYSRVATTGVVEVKFKIKELDFRVFDVGGQRSERRKWIHCFDNVESIIFITAISEYDQVLFEDETTNRMIESMQLFNSICNSTWFLSTAMILFMNKKDLFMEKIQRVNITTAFPDYEGGQNYEEAVSFIKQKFAELNLNPDKKTIYMHETCATDTNQVQLVISSVIDT

SEQ ID NO: 7841 - protein, 346 aa, Caenorhabditis elegans
MGSCQSNENSEGNARNKEIEKQLNADKRAGSSIVKLLLLGAGECGKSTVLKQMQILHSNGFTEEEVNEKRAIVYNNTVSAMCTILRAMDGVLHLPLENGQKEAEKAIVMKVQENGEEGEALTEEVSKAIQSLWADPGVKKAFEMRSEYQLPDSAKYFLDNCQRISEPGYRPNDQDILYSRVATTGVVEVKFKIKELDFRVFDVGGQRSERRKWIHCFDNVESIIFITAISEYDQVLFEDETTNRMIESMQLFNSICNSTWFLSTAMILFMNKKDLFMEKIQRVNITTAFPDYEGGQNYEEAVSFIKQKFAELNLNPDKKTIYMHETCATDTNQVQLVISSVIDTII

SEQ ID NO: 7842 - protein, 350 aa, Caenorhabditis elegans
MGSCQSNENSEGNARNKEIEKQLNADKRAGSSIVKLLLLGAGECGKSTVLKQMQILHSNGFTEEEVNEKRAIVYNNTVSAMCTILRAMDGVLHLPLENGQKEAEKAIVMKVQENGEEGEALTEEVSKAIQSLWADPGVKKAFEMRSEYQLPDSAKYFLDNCQRISEPGYRPNDQDILYSRVATTGVVEVKFKIKELDFRVFDVGGQRSERRKWIHCFDNVESIIFITAISEYDQVLFEDETTNRMIESMQLFNSICNSTWFLSTAMILFMNKKDLFMEKIQRVNITTAFPDYEGGQNYEEAVSFIKQKFAELNLNPDKKTIYMHETCATDTNQVQLVISSVIDTIIQKNL

SEQ ID NO: 7843 - protein, 345 aa, Caenorhabditis elegans
MGSCQSNENSEGNARNKEIEKQLNADKRAGSSIVKLLLLGAGECGKSTVLKQMQILHSNGFTEEEVNEKRAIVYNNTVSAMCTILRAMDGVLHLPLENGQKEAEKAIVMKVQENGEEGEALTEEVSKAIQSLWADPGVKKAFEMRSEYQLPDSAKYFLDNCQRISEPGYRPNDQDILYSRVATTGVVEVKFKIKELDFRVFDVGGQRSERRKWIHCFDNVESIIFITAISEYDQVLFEDETTNRMIESMQLFNSICNSTWFLSTAMILFMNKKDLFMEKIQRVNITTAFPDYEGGQNYEEAVSFIKQKFAELNLNPDKKTIYMHETCATDTNQVQLVISSVIDTI

SEQ ID NO: 7844 - protein, 354 aa, Caenorhabditis elegans
MGLCQSAEDKELTLKSKAIDKEMMQNHMSQQKVVKLLLLGAGECGKSTVLKQMRILHDHGFTAEEAEQQKSVVFNNTLQAMTAILKGMEALRMTFDKPIRENDAKFVMESHKMLQEAKVFPEELANAIQALWNDKAVQQVIAKGNEFQMPESAPHFLSSLDRIKLPDYNPTEQDILLSRIKTTGIVEVKFQMKSVDFRVFDVGGQRSERKKWIHCFEDVNAIIFIAAISEYDQVLFEDETTNRMIESMRLFESICNSRWFINTSMILFLNKKDLFAEKIKRTSIKSAFPDYKGAQTYDESCRYIEEKFDGLNANPEKTIYMHQTCATDTDQVQMILDSVIDMIIQANLQGCGLY

SEQ ID NO: 7845 - protein, 354 aa, Caenorhabditis elegans
MGLCQSAEDKELTLKSKAIDKEMMQNHMSQQKVVKLLLLGAGECGKSTVLKQMRILHDHGFTAEEAEQQKSVVFNNTLQAMTAILKGMEALRMTFDKPIRENDAKFVMESHKMLQEAKVFPEELANAIQALWNDKAVQQVIAKGNEFQMPESAPHFLSSLDRIKLPDYNPTEQDILLSRIKTTGIVEVKFQMKSVDFRVLDVGGQRSERKKWIHCFEDVNAIIFIAAISEYDQVLFEDETTNRMIESMRLFESICNSRWFINTSMILFLNKKDLFAEKIKRTSIKSAFPDYKGAQTYDESCRYIEEKFDGLNANPEKTIYMHQTCATDTDQVQMILDSVIDMIIQANLQGCGLY

SEQ ID NO: 7846 - protein, 352 aa, Caenorhabditis elegans
MGHCTSKDQKEGKRLNRRIDEQIKKDQSMSLRIIKLLLLGAGESGKSTILKQMRILHKDGFSQQDLEMIRPVVYSNCIHSMLSILRAMFHLQIEYGEPDRVRDSQLVFATVHANKEELTEELAAAMQRLWHDPGVRECYRRSNEYQIDDSAKYFLDNLPRLSSPNYVPSEQDLLRTRIKTTGITEVLFELKGLTFRVIDVGGQRSERKKWIHCFDNVNAIIFISSLSEYDQTLREDNCTNRMQESLKLFDSICNSPWFADIHFILFLNKKDLFAEKIVRSPLTVCFPEYKGQQNQTECINYIQWKFEQLNRSSQREIYCHHTCATDTNNVQFVLDACLDMIIAKNLKSMGLC

SEQ ID NO: 7847 - protein, 357 aa, Caenorhabditis elegans
MGCIMSQEDEAAKRRSKKIDRLLKEDGENSMRTIKLLLLGAGESGKSTILKQMRIIHDVGYTTEERKVFRGVVYGNIILSLNAIIHAMEQLKISFTTLDHESDARKLLMFSTTGEEDELPEELVVLMKSVWSDSGIQKALERSREYQLNDSAGYYLSQLDRICAPNYIPTQDDILRTRIKTTGIVETQFVYKDRLFLVFDVGGQRSERKKWIHCFEDVTALIFCVALSEYDMVLVEDCQTNRMRESLKLFDSICNNKWFVETSIILFLNKKDLFEEKIVRSPLTHCFPEYTGANNYEEASAYIQQQFEDMNKRTTGEKNQEIYTQFTCATDTNNIRFVFDAVTDIIIRDNLRTCGLY

SEQ ID NO: 7848 - protein, 357 aa, Caenorhabditis elegans
MGNCESRELVAQAKQNKIINTELDKAKKTDENIIKLLLLGAGESGKSTVLKQMKIIHNSGFSQEEISNKRNVVCANTVQAMGALLDGMKQLQFDFSTRVCNAHEKLIRETLNDKAEYGPFSDAMFNALTELWADKGVQCAYDKREFFYLHDSAKYFLDRIARVHTPNYVPTENDILHTRVPTMGVIEVNFTIKGKFFRVFDVGGQRSQRKKWIHCFDDAKAMIYVASLSEYDQVLLEDNTTNRMHESIQLFKQVINNKYFVNTSVILFLNKIDLFEEKIVTKKRSLGIAFESFSGPSQDLNAAVAFVEKKYRSMAENKEKNIYCHHTCATDTQQVQYVLDAVLDTILSTKLKGCGLY

SEQ ID NO: 7849 - protein, 357 aa, Caenorhabditis elegans
MGNCESRELVAQAKQNKIINTELDKAKKTDENIIKLLLLGAGESGKSTVLKQMKIIHNSGFSQEEISNKRNVVCANTVQAMGALLDGMKQLQFDFSTRVCNAHEKLIRETLNDKAEYGPFSDAMFNALTELWADKGVQCAYDKREFFYLHDSAKYFFDAIARVHTPNYVPTENDILHTRVPTMGVIEVNFTIKGKFFRVFDVGGQRSQRKKWIHCFDDAKAMIYVASLSEYDQVLLEDNTTNRMHESIQLFKQVINNKYFVNTSVILFLNKIDLFEEKIVTKKRSLGIAFESFSGPSQDLNAAVAFVEKKYRSMAENKEKNIYCHHTCATDTQQVQYVLDAVLDTILSTKLKGCGLY

SEQ ID NO: 7850 - protein, 356 aa, Caenorhabditis elegans
MGSTCSTPESKEQKRINSVIDKQIRKDEDDEIGNQKLLLLGTGECGKSTILKQINILHSSGFSKADLKNVAGTVYSNIIQGVATLLKAKDHFYYELSTPELDADAQHILSLADSSKDAMPFIPLTFNAIKRLWHDPVVQKTFERRAEFQMMDTLVYFMNELDRINNADYIPTVDDMLRIRIPTMGVVQQTIEIKGTKFRIYDVGGQRSERRKWIHLFDNVNATIFISAINEFNQKLNEDGQTNRMKESIKLFETICNSRWFVQAAMILFLNKRDLFEQKLKTTSINVLFSTYQGSNDYAECVAYIQMRFERLNKYSDIKKIYTHVTCATDTNQIQLVIDSVVDMVIGRNLRGTGME

SEQ ID NO: 7851 - protein, 359 aa, Caenorhabditis elegans
MGCFHSTGSEAKKRSKLIDEQLRHDHERCVGEIKLLLLGAGESGKSTIVRQMRILHETGFNKQEQMAYRPVVFSNMVQSMLAILKAMQPLNISFTDAAREEDARMFISHFLHVNNAELSEAFSLELSDLMKQLWMDEGVKKCVKRAHEYQLNDSAEYYFNALDRISSSSYLPTQDDILRARVKSTGIVETTFMYKDLCFKMFDVGGQRSERKKWIHCFDSVTAVIFCVALSEYDLRLAEDQTMNRMHESMQLFDSIVNNCWFTETSIILFLNKMDIFEERIRYTPLTVCFPEYQGGMTITETSTFIQSRFEILNKRQTPAQKEIYSHFTCATDTNNIRFVFDAVTDIIIRNNLYLCGLY

SEQ ID NO: 7852 - protein, 329 aa, Caenorhabditis elegans
MGCFHSTGSEAKKRSKLIDEQLRHDHERCVGEIKLLLLGAGESGKSTIVRQMRILHETGFNKQEQMAYRPVVFSNMVQSMLAILKAMQPLNISFTDAAREEDARMFISHFLHVNNAELSEAFSLELSDLMKQLWMDEGVKKCVKRAHEYQLNDSAEYYFNALDRISSSSYLPTQDDILRARVKSTGIVETTFMYKDLCFKMFDVGGQRSERKKWIHCFDSVTAVIFCVALSEYDLRLAEDQTMNRMHESMQLFDSIVNNCWFTETSIILFLNKMDIFEERIRYTPLTVCFPEYQGGMTITETSTFIQSRFEILNKRQTPAQKASCKALI

SEQ ID NO: 7853 - protein, 356 aa, Caenorhabditis elegans
MGLCQSEEEKVGTLKSRAIDKEIKQLQTSEERTVKLLLLGAGECGKSTVLKQMRLLTSKQYTDEELLTQAKLVYTNIVIEMDHLVKAMPAAGLNFSDPMREHDVHMLTLYIKDMQHKNFQQDAADHVEKLWKDPVVKRLYAERKELNIRDIGDNTEYFFENLPRISKEDYHPNATDTLLLRTKTTGIVEVGFEIKKVKFRVFDVGGQRSERKKWIHCFEDVNAIIFIAALSEYNEVLFEDETTNRMIESMRLFESICNSRWFHNTNIILFLNKKDLFEEKIKKENIHKAFPEYRGEQNYAETVAFIKTKFEALSNNPKKTFYVHETCATDTNQVQKILDSVISMIIQSNLHKSGLY

SEQ ID NO: 7854 - protein, 375 aa, Caenorhabditis elegans
MGSTCSTPESKEQKRINSVIDKQIRKDEDDEIGNQKLLLLGTGECGKSTILKQINILHSSGFSKADLKNVAGTVYSNIIQGVATLLKAKDHFYYELSTPELDADAQHILSLADSSKDAMPFIPLTFNAIKRLWHDPVVQKTFERRAEFQMMDTLVYFMNELDRINNADYIPTVDDMLRIRIPTMGVVQQTIEIKGTKFRWSSVNGIFNGRPHNLDLVRIYDVGGQRSERRKWIHLFDNVNATIFISAINEFNQKLNEDGQTNRMKESIKLFETICNSRWFVQAAMILFLNKRDLFEQKLKTTSINVLFSTYQGSNDYAECVAYIQMRFERLNKYSDIKKIYTHVTCATDTNQIQLVIDSVVDMVIGRNLRGTGME

SEQ ID NO: 7855 - protein, 355 aa, Caenorhabditis elegans
MACCLSEEAREQKRINQEIEKQLQRDKRNARRELKLLLLGTGESGKSTFIKQMRIIHGQGYSEEDKRAHIRLVYQNVFMAIQSMIRAMDTLDIKFGNESEELQEKAAVVREVDFESVTSFEEPYVSYIKELWEDSGIQECYDRRREYQLTDSAKYYLSDLRRLAVPDYLPTEQDILRVRVPTTGIIEYPFDLEQIIFRMVDVGGQRSERRKWIHCFENVTSIMFLVALSEYDQVLVECDNENRMEESKALFRTIITYPWFTNSSVILFLNKKDLLEEKILYSHLADYFPEYDGPPRDPIAAREFILKMFVDLNPDADKIIYSHFTCATDTENIRFVFAAVKDTILQHNLKEYNLV

SEQ ID NO: 7856 - protein, 364 aa, Caenorhabditis elegans
MGAGATGLRGARLSPEERANSSKSRAIDRALSKDHTDDLNRFKILLLGTAESGKSTIFKQMRVLHLDGYAKEDALEYLSIIHSNCMEALTQLVDACTAFGINHDITVQEDVNRFEDFKRKLRDPEGLVIPVVIGRCMDRVWHSPSLQLCYDTRRFRFALLDSAKYFMDNIVRLTEDNYVPSIQDIVHCRISTTGINELAFNYKKMDFKMVDVGGQRSERRKWIHCFDNVDMILFIVSMSDYDQLDPEDNKYNRMKQSYEIFKTIVHSDLFRHASIVLFLNKYDVFVEKLKTSPLRRSFKNYEGDNSEESAREFIKKLFRRCITDRHKFFVFETTATDTGNIDLVFGSAVAHIVNENLRSAGLHE

SEQ ID NO: 7857 - protein, 355 aa, Caenorhabditis elegans
MVCCFGKKDERTKTIEKELHKERKIMRRQINLLLLGSGESGKSTFVKQMHIIHGAGEFTADEVRAYRQQIYQNAISAMRVLLDARNKLGIAWEDPKRQVEVEKVMRFSVGDLLKGIDFTTFVEVAPIISDFWNDAAIRKTYEQRNLFQISDSCQYFFEHIPRIAMPDFYPTNRDILFCRKATRGISEHIFEINKIPFRFIDVGGQRSQRQKWFQCFTDITSILFMVASNEYDQVILEDRRTNRVVESRSVFETIVNNRAFSNVSIILFMNKNDLLQEKVPKSDIRQYFTDFTGDHTLVRDVQFFLVDKFEASRRDRARPFFYHFTTAVDTENIRRVFRDVRESILEQNLKTLMMQ

SEQ ID NO: 7858 - protein, 356 aa, Caenorhabditis elegans
MGVCQSFVLTDEMKDQIKVNKEIEKQLEKKKNMQLEQTVLLLGPGESGKSTVMKQMRAMTGNYTKTELHERKVLIIQNLCQFSEMLLEYVREYILEMTEDDDKRYTVMCEELKMAVIHDGIMRPELADTLKEFWGNSAIQDAYSKRDTFHLTDSAKYFFDNIDRIKLPGFEPTNQDIVHIRVPTTGVAQVEVIMNNIKLMICDCGGQRSERRKWYHFFDEADAVLFVAAISEFDQKLAEDEETNRMHESIRLFWTVFNGKFFKKAAVILFLNKIDLFEEKVKHVKIKDYFPKFEGANTVSEGTKFFRRQFREGIHPDFKKRMYTHETCAISDQVQIIINTVIDTVIQDNLKDTGMI

SEQ ID NO: 7859 - protein, 364 aa, Caenorhabditis elegans
MGALCSSETYMLDKEEYKKQVEHNKSIENDLEKDRKIKILKLLILGPGESGKSTTIKQIKIIHDEGYSAEEKMVRKHGIYMNILEGIEEIHLSVGRENKSYKNPLSFDHINEVRMFTENFKKADDSEKLLGPEVINAIQKYIKDETIAMMLRDKTVYNIDDSTIYFLENFSRIIQKDYLPTEEDILKSRVPTSGVIQYKIMLKNFNFRIFDVGGQRAQRRKWLHVFDDVQAVLFITSLSEYDQVLREDATVNRMKESLNLFEKICNGRYFLNTAMILFLNKIDLFKIKIKHTNITVALTSYKGPQECDSALDYIRKRFISLNKNKKRSIYEHVTCATDTEQIQVVIDSVIDVVIQHTMQKVGIQ

SEQ ID NO: 7860 - protein, 363 aa, Caenorhabditis elegans
MSAADMARKNSLINRQLEKEKIDSKKMLKILLLGGPECGKSTIFKQMKIIHMNGFSDLDYVNFRYLIYSNIMQSMDQLLEAAEFFHFPPDDSPSIRRALNHYKSYKVRYSTSEVELNRELADSLSKLYNAEFIKSVLNRKNELKLLDSAVYFLDDIDRISAHEYKPTEMDVLRARVPTTGITEIEFPFKQASLRMVDVGGQRSEQRKWIHCFDNVNGVLFIAAISGYNLYDEDEENRKDDGTPTKTNRLRYSMELFKRIANHQCFSKKTAMILFLNKIDIFKEKIGKYPLTTCFKNYKGVNAFEPACKYVTDRFSRLVSGDIQHEKPLYTHITNATDTRNIDRVFDSCMDVIFKISMEKVGFM

SEQ ID NO: 7861 - protein, 422 aa, Caenorhabditis elegans
MLEFSQKLAAGTPGPHSSTHNIESSAFATADITLGFLLCGRLSFTTQVNNRVNVCGGTEMSAADMARKNSLINRQLEKEKIDSKKMLKILLLGGPECGKSTIFKQMKIIHMNGFSDLDYVNFRYLIYSNIMQSMDQLLEAAEFFHFPPDDSPSIRRALNHYKSYKVRYSTSEVELNRELADSLSKLYNAEFIKSVLNRKNELKLLDSAVYFLDDIDRISAHEYKPTEMDVLRARVPTTGITEIEFPFKQASLRMVDVGGQRSEQRKWIHCFDNVNGVLFIAAISGYNLYDEDEENRKDDGTPTKTNRLRYSMELFKRIANHQCFSKKTAMILFLNKIDIFKEKIGKYPLTTCFKNYKGVNAFEPACKYVTDRFSRLVSGDIQHEKPLYTHITNATDTRNIDRVFDSCMDVIFKISMEKVGFM

SEQ ID NO: 7862 - protein, 343 aa, Caenorhabditis elegans
MPLPPCIVLATSSPVSTINLLLLGSGESGKSTFVKQMHIIHGAGEFTADEVRAYRQQIYQNAISAMRVLLDARNKLGIAWEDPKRQVEVEKVMRFSVGDLLKGIDFTTFVEVAPIISDFWNDAAIRKTYEQRNLFQISDSCQYFFEHIPRIAMPDFYPTNRDILFCRKATRGISEHIFEINKIPFRFIDVGGQRSQRQKWFQCFTDITSILFMVASNEYDQVILEDRRTNRVVESRSVFETIVNNRAFSNVSIILFMNKNDLLQEKVPKSDIRQYFTDFTGDHTLVRDVQFFLVDKFEASRRDRARPFFYHFTTAVDTENIRRVFRDVRESILEQNLKTLMMQ

SEQ ID NO: 7863 - protein, 348 aa, Caenorhabditis elegans
MGCNFSSQSKLQVPEIRASRSITPASQKSEDPYSHIRLLLLGSAESGKTTVLEQVRLLYKQHFTESEYFHRRAFIYHNIFKSIKALCRAMRMSDIQFADPINMGRAQSIIADEHGHYGLFSKDLAEKIKHIWNDKSMQKLYARRSQFNLNDSASYFLNNIDKINMVDYKPSERDLIMAYVPTCGVQNVIFTACNQSFQLFDIGGQKIDRRKWALQYEGIDAIFFCIAISEYDQVMSEDMVTNRLDDALNLLQSISEDPAFATTPIYLFLNEIDVFCEKLSVIPLSKYKPDFKGGDQDDAIDFMENLACEALGKRDRSLYRVYRCIAIDTQMMAELLSTVFKDIAKRKK

SEQ ID NO: 7864 - protein, 375 aa, Caenorhabditis elegans
MGCVGAGADAEGREARKVNKQIEEQLAKDKQVMRATHRLLLLGAGESGKSTIVKQMRILHINGFNEAEKREKITDIRRNVRDAMQVILRAMDEIVPKVSLDDPSTAISRDYILRITNDPEDNYPSEFYDHILTCWKDKGVMACYERSSEYQLIDCAQYFLDKVDVVRQNNYDPSEQDILRCRVMTTGIFETKFEVDKVRFHMFDVGGQRDERRKWIQCFNDVTAIIFVCASSSYNLVLWEDNTQNRLRESLALFKNIWNNRWLKTISVILFLNKQDLLSEKIKAKRYLLESFFPEFEGYNLPNDAVFDNQEDKDVVRAKYFIRGEFLRISTANSDGRHHCYPHFTCAVDTENIRRVFNDCRDIIQRIHLRQYELL

SEQ ID NO: 7865 - protein, 378 aa, Caenorhabditis elegans
MRLMGCVGAGADAEGREARKVNKQIEEQLAKDKQVMRATHRLLLLGAGESGKSTIVKQMRILHINGFNEAEKREKITDIRRNVRDAMQVILRAMDEIVPKVSLDDPSTAISRDYILRITNDPEDNYPSEFYDHILTCWKDKGVMACYERSSEYQLIDCAQYFLDKVDVVRQNNYDPSEQDILRCRVMTTGIFETKFEVDKVRFHMFDVGGQRDERRKWIQCFNDVTAIIFVCASSSYNLVLWEDNTQNRLRESLALFKNIWNNRWLKTISVILFLNKQDLLSEKIKAKRYLLESFFPEFEGYNLPNDAVFDNQEDKDVVRAKYFIRGEFLRISTANSDGRHHCYPHFTCAVDTENIRRVFNDCRDIIQRIHLRQYELL

SEQ ID NO: 7866 - protein, 356 aa, Caenorhabditis elegans
MGCNFSSQSKLQVPEIRASRSITPASQKSEDPYSHIRLLLLGSAESGKTTVLEQVRLLYKQHFTESEYFHRRAFIYHNIFKSIKALCRAMRMSDIQFADPINMGRAQSIIADEHGHYGLFSKDLAEKIKHIWNDKSMQKLYARRSQFNLNDSASYFLNNIDKINMVDYKPSERDLIMAYVPTCGVQNVIFTACNQSFQLFDIGGQKIDRRKWALQYEGIDAIFFCIAISEYDQVMSEDMVTNRLDDALNLLQSISEDPAFATTPIYLFLNEIDVFCEKLSVIPLSKYKPDFKGGDQDDAIDFMENLACEALGKRDRSLYRVYRCIAIDTQMMAELLSTCFLKKERRLIRYANNIPV

SEQ ID NO: 7867 - protein, 385 aa, Caenorhabditis elegans
MRLMGCVGAGADAEGREARKVNKQIEEQLAKDKQVMRATHRLLLLGAGESGKSTIVKQMRILHINGFNEAEKREKITDIRRNVRDAMQVSEKDSRVILRAMDEIVPKVSLDDPSTAISRDYILRITNDPEDNYPSEFYDHILTCWKDKGVMACYERSSEYQLIDCAQYFLDKVDVVRQNNYDPSEQDILRCRVMTTGIFETKFEVDKVRFHMFDVGGQRDERRKWIQCFNDVTAIIFVCASSSYNLVLWEDNTQNRLRESLALFKNIWNNRWLKTISVILFLNKQDLLSEKIKAKRYLLESFFPEFEGYNLPNDAVFDNQEDKDVVRAKYFIRGEFLRISTANSDGRHHCYPHFTCAVDTENIRRVFNDCRDIIQRIHLRQYELL

SEQ ID NO: 7868 - protein, 303 aa, Caenorhabditis elegans
MRIIHGQGYSEEDKRAHIRLVYQNVFMAIQSMIRAMDTLDIKFGNESEELQEKAAVVREVDFESVTSFEEPYVSYIKELWEDSGIQECYDRRREYQLTDSAKYYLSDLRRLAVPDYLPTEQDILRVRVPTTGIIEYPFDLEQIIFRMVDVGGQRSERRKWIHCFENVTSIMFLVALSEYDQVLVECDNENRMEESKALFRTIITYPWFTNSSVILFLNKKDLLEEKILYSHLADYFPEYDGPPRDPIAAREFILKMFVDLNPDADKIIYSHFTCATDTENIRFVFAAVKDTILQHNLKEYNLV

SEQ ID NO: 7869 - protein, 381 aa, Caenorhabditis elegans
MGVCQSFVLTDEMKDQIKVNKEIEKQLEKKKNMQLEQTVLLLGPGESGKSTVMKQMRAMTGNYTKTELHERKVLIIQNLCQFSEMLLEYVREYILEMTEDDDKRYTVMCEELKMAVIHDGIMRPELADTLKEFWGNSAIQDAYSKRDTFHLTDSAKKMFQLIQKHVSKMSEMFLKIFFYVTHFFDNIDRIKLPGFEPTNQDIVHIRVPTTGVAQVEVIMNNIKLMICDCGGQRSERRKWYHFFDEADAVLFVAAISEFDQKLAEDEETNRMHESIRLFWTVFNGKFFKKAAVILFLNKIDLFEEKVKHVKIKDYFPKFEGANTVSEGTKFFRRQFREGIHPDFKKRMYTHETCAISDQVQIIINTVIDTVIQDNLKDTGMI

SEQ ID NO: 7870 - protein, 385 aa, Caenorhabditis elegans
MGLVTCKQEREAELQNRQIDTQIRIENQANKRKIKMLLLGVTDSGKSTIVKQMRVNYLDGFNETEVVNAIFVIRNNIIDAFKNICNIILHSDITVTQEEKVLVKLFAYESGKIELMQEVDELNVINAVSGYECIKQFFERFAFHPMVPDHIHYFYPNLDRIASSNYVPTAEDLIHMRQTTLGVHEISFDYTKHIIRLIDVGGQKTERRKWIHFFEGVTAVMFVCSLASFNQTTEEEPKAFVWESSLNKVQNKVLVRSAGKAKVEKPGLINRLDESVDLFKSIRENSFLKMSNFMLFLNKKDLLTKKLTKVVFSDYFPDYKKWITNDNSDVSVAEFIENMFREGLEPEKRMYAHLTQATVTANIEGTFALCCDVIFGKNYEDTNLE

SEQ ID NO: 7871 - protein, 390 aa, Caenorhabditis elegans
MFSAESNLRNRWRLSKTLSENIFLKIDENLKIETQILEERKKKALKLLIIGPGESGKSTIVKQVRILHCGGYSVEEKRALKHGIYINILEGIDEIHWAIMWRQLIYENPSSIECLNQIRIFTKQFNKTGETENVLCKDIIKSIQMYIKDETVAMMLRNKTVYNIEDSTIQQVKRWVLFSLIIIISSFIENLARVIGKEYLPTGEDILKTRVPTLGIAQYEANIKHLTFKFIFFDIGGQRAQRRKITHLSGHVLDDSHAILFITSLSEYNQVLREDAFVSRIEESLHLFNEICNGMYFHSTAIILFLNKIDLFEIKITHTNITVAFPDYEGPRERDCALEYIRVQFISLNNNKNRKIYQHVTSATDTARIQVVIDMLFDIIISASLKMVGV

SEQ ID NO: 7872 - protein, 368 aa, Caenorhabditis elegans
MVPSRNGEGTELRGHMEIEKELALEKKTYGSHIKILILGGPLSGKSTIFKQMQIIHVDGFKTDQELIQYRGLIDNNIRDIYLQLIAGSRVVGIPLDPIEHITYEIDEIYAPMSDAFSVRTISELLEPLTEFWNSKQIQEIYKRRCEFELLDSTKYYLENLTRIADPTYLPNQEDIVHSRKATMSINSIVFEYTGVSLLMIDVGGQRSERKKWLHLFDDAKVVLFVIDLTGYAKRSEESRMELSRFPKFFRDVGSNAYDMKVALKIFNEVAAASALANAVFLLFFNKVDLFKEILSQVNLQPCFSKFDGENTYEETSKYICEKFIRAASSKKSVFPHFTTATNTENVKLVFRACMESVFKANAKATGLS

SEQ ID NO: 7873 - protein, 420 aa, Caenorhabditis elegans
MVPSRNGEGTELYAHSEELEAKLRELARRGHMEIEKELALEKKTYGSHIKILILGGPLSGKSTIFKQMQIIHVDGFKTDQELIQYRGLIDNNIRDIYLQLIAGSRVVGIPLDPIEHITYEIDEIYAPMSDAFSVRTISELLEPLTEFWNSKQIQEIYKRRCEFELLDSTKYYLENLTRIADPTYLPNQEDIVHSRKATMSINSIVFEYTGVSLLNILVKLKILDFFLFYFRMIDVGGQRSERKKWLHLFDDAKVVLFVIDLTGYAKRSEESRMEVKYFETFQFKISRTWILRILSRFPKFFRDVGSNAYDMKVALKIFNEVAAASALANAVFLLFFNKVDLFKEILSQVNLQPCFSKFDGENTYEETSKYICEKFIRAASSKKSVFPHFTTATNTENVKLVFRACMESVFKANAKATGLS

SEQ ID NO: 7874 - protein, 355 aa, Strongyloides stercoralis
MGVCQSSKEKEMQNKTKAIDKELMQGHLNQQKIVKLLLLGAGECGKSTVLKQMRILHDHGFSDEEMTDQKGVIYNNTVQAIACIIRGMGTLQINYENPEREADARIVLDTIKRGEESEPLTAELANAIERLWADKGVNTIAYSRGNEYQLPESANYFLDNVKRISQPDYKPTEQDILLSRIKTTGIVEVKFKMKNVDFRVFDVGGQRSERKKWIHCFEDVNAIIFIAAISEYDQVLFEDETTNRMLESMRLFESICNSRWFINTSMILFLNKKDLFLEKIKKTSIKVAFPEYKGGNTYEEQVKFIEDTFEGLNANPDKTLYMHQTCATDTNQVQMILDSVIDMIIQANLQGCGLY

SEQ ID NO: 7875 - protein, 355 aa, Strongyloides stercoralis
MGICHSEEEKEQGMVNKEIDKKLKESKMLGEKTIKLLLLGAGECGKSTIMKQMKILHSNGFTDDELNQQKSVVYSNTINSMVLLIKAMNTYKVGYSNIQCEAEARVILDVVKRNEESEPFTKEVYNALKILWNDTSINTIVYEKRKEYHLQDSAKYFLDSLDRIADSSYKPTETDILLTRIKTTGIVEVIFKIKSVNFRVFDVGGQRSERKKWIHCFENVNAIIFVTAVSEYDEVLFEDETTNRMTESMRLFESICNSRWFITTSMILFLNKKDLFAEKIKKISIKILFPEYSGEQNYDESISYIKGKFEELNSNPKKTIYVHQTCATDTNQVQLILDSVVSMVIQANLHKSGLY

SEQ ID NO: 7876 - protein, 353 aa, Trichoderma atroviride
MGCGMSTEDKEGKARNEEIENQLKRDKMMQRNEIKMLLLGAGESGKSTILKQMKLIHEGGYSRDERESFKEIIFSNTVQSMRVILEAMESLELPLQDQRMEYHVQTIFIQPAQIEGDVLPPEVGGAIEALWKDHGVQECFKRSREYQLNDSARYYFDNIVRIAAPDYMPNDQDVLRSRVKTTGITETTFIIGDLTYRMFDVGGQRSERKKWIHCFENVTTILFLVAISEYDQLLFEDETVNRMQEALTLFDSICNSRWFIKTSIILFLNKIDRFKEKLPVSPMKNYFPDYEGGDDYAAACDYILNRFVSLNQHETKQIYTHFTCATDTTQIRFVMAAVNDIIIQENLRLCGLI

SEQ ID NO: 7877 - protein, 355 aa, Trichoderma atroviride
MGGCMSSNNDEVEQKKRSQAIDKELDEDSKRLRKECKILLLGSGESGKSTIVKQMKIIHLKGYSEEELYNYRPTVFKNLVECAKAVITAMQQFSIELAQDDNRAHADFLIDYQAESGPQAHIDPKVGLAVQAIWSDPAKEQLMEHQTEFYLMDSAEYFFQEAMRIVAPDYLPNEMDVLRARTKTTGIYETRFQMGQLSIHMFDVGGQRSERKKWIHCFENVTSIIFCVALSEYDQVLLEESSQNRMMESLLLFDSVVNSRWFMRTSIILFLNKVDIFKQKLGRSPLSNFFPDYTGGTDVNKAAKYLLWRFNQVNRAHLNLYPHLTQATDTSNIRLVFAAVKETILNNALKDSGIL

SEQ ID NO: 7878 - protein, 354 aa, Lymnaea stagnalis
MGCTLSAEERAAMERSKAIEKNLKEDGMQAAKDIKLLLLGAGESGKSTIVKQMKIIHEGGFTSEDNKQYKPVVYSNTIQSLVAIIRAMGTLSIPFGDNERESDAKMVLDVIARMEDTEPFSEELLAAMKRLWVDSGVQECLGRANEYQLNDSAKYFLDDLDRLGAKDYMPTEQDILRTRVKTTGIVEVHFSFKNLNFKLFDVGGQRSERKKWIHCFEDVTAIIFCVAMSEYDQVLHEDETTNRMQESLKLFDSICNNKWFTETSIILFLNKKDLFEEKIKKSPLTICFPEYTGKQMYQEASAYIQAQFEAKNKSSAKEIYCHQTCATDTNNIQFVFDAVTDVIIANNLRGCGLY

SEQ ID NO: 7879 - protein, 354 aa, Lymnaea stagnalis
MGCVTSQEDKAAVERSKQIDKSLRMDGEKAAREVKLLLLGAGESGKSTIVKQMKIIHEKGYSQEECLQYKPVVYSNAIQSMIAIIKAMGQLKIQFGHPDRAEDARQFFALAGHADEGEMSAELSGIMKRLWKDVGVQECFSRSREYQLNDSAEYYLNALDRISAPGYIPTEQDVLRTRVKTTGIVETHFTFKDLHFKMFDVGGQRSERKKWIHCFEGVTAIIFIVAMSEYDLTLAEDQEMNRMMESMKLFDSICNNKWFTETSIILFLNKKDLFEEKIKKSPLTICFPEYTGANTYEEAAAYIQLQFENLNKKKDTKEIYSHFTCATDTNNVQFVFDAVTDVIIKNNLKDCGLF

SEQ ID NO: 7880 - protein, 353 aa, Lymnaea stagnalis
MACCIPDELKEQKRINQEIERQLKRDKRDARRELKLLLLGTGESGKSTFIKQMRIIHGAGYSDEDKRSHIKIVYQNIFMAMHAMIRAMDTLNIQYINPANRENGNMIRQIDYETVTTFDKPCVDAIISLWNDDGIQECYDRRREYQLTDSAKYYLDSVERISQQDYLPTLQDILRVRVPTTGIIEYPFDLDSIIFRMVDVGGQRSERRKWIHCFENVTSIMFLVALSEYDQVLVESDNENRMEESKALFRTIITYPWFQNSSVILFLNKKDLLEEKIMHSHLVDYFPEFDGPKKEASTAREFILKMFVELNPDPDKIIYSHFTCATDTENIRFVFAAVKDTILQLNLKEYNLV

SEQ ID NO: 7881 - protein, 376 aa, Lymnaea stagnalis
MGCFRQTRDDEDDKLRKEANKKIEKQLAKDKLLYRGTHRLLLLGAGESGKSTIVKQMRILHVNGFSPEERKQKIEDIKRNVRDAILTITGAMSTLNPPVQLEHPQNKAKVDYIQDKASQAEFDYPPIFYEYTEILWKDKGVQAAFERSNEYQLIDCAQYFLDRVHIIRQAEYTPSEQDILRCRVLTSGIFETKFSVDKVNFHMFDVGGQRDERRKWIQCFNDVTAIIFVTACSGYNMVLREDATQNRLKESLDLFKSIWNNRWLRTISVILFLNKQDLLAEKVKAGKSKIEDYFPEYARYQVPPDASSEPGEDTEVVRAKYFIRDEFLRISTASGDGRHYCYPHFTCAVDTENIRRVFDDCRDIIQRMHLRQYELL

SEQ ID NO: 7882 - protein, 376 aa, Lymnaea stagnalis
MGCFRQTRDDEDDKLRKEANKKIEKQLAKDKLLYRGTHRLLLLGAGESGKSTIVKQMRILHVNGLSPEERKQKIEDIKRNVRDAILTITGAMSNLNPPVQLEHPQNKAKVDYIQDKASQAEFDYPPIFYEYTEILWKDKGVQAAFERSNEYQLIDCAQYFLDRVHIIRQAEYTPSEQDILRCRVLTSGIFETKFSVDKVNFHMFDVGGQRDERRKWIQCFNDVTAIIFVTACSGYNMVLREDATQNRLKESLDLFKSIWNNRWLRTISVILFLNKQDLLAEKVKAGKSKIEDYFPEYARYQVPPDASSEPGEDTEVVRAKYFIRDEFLRISTASGDGRHYCYPHFTCAVDTENIRRVFNDCRDIIQRMHLRQYELL

SEQ ID NO: 7883 - protein, 386 aa, Lymnaea stagnalis
MSKGGRAAVARSRSIDHQLDEERERREKEVQILIIGGPGAGKSTFIKQLRLHYGDQFPPNERRLFHDQILQNVAMGLVHLIEHMERMGLQFETPEVQDLSREFRKKHPRISIVTLIKKFKEENEKAEEICPVTTRAELTKRLSSFDVYNPEVPNVDDMHTLWADPAMQICFEKRNKFETDKLTHSSEYFLLHIGRICSKEYLASVQDILLIRWPTLGVQEHKFMVDGLLYRMIDVAGQRSLRKKWIHFFDEVAAVAFFVNLTAYDEFTEEDPTVNSLQDSLQAFAEISHSQFLDKTDFILFLNKKDLFANKLKTSSIATCFPDYKGPNTVDASLKYIKEQFLQSKPAQKQVYSHATCAIDVPHMKDLLATVVDCIVDINVKRSKNY

SEQ ID NO: 7884 - protein, 357 aa, Mizuhopecten yessoensis
MGCTMSAEDRAAAERSRDIEKKLKEDGIQAAKDIKLLLLGAGESGKSTIVKQMKIIHEGGFTSEDNKQYKPVVYSNTIQSLVAIVRAMSTLNIPYGDNEREEIKSDAKIVLDVIARMEDTEPFSEELLAAMKRLWTDTGVQECFGRSNEYQLNDSAKYFLDDLDRLGSKDYMPTEQDILRTRVKTTGIVEVHFSFKNLNFKLFDVGGQRSERKKWIHCFEDVTAIIFCVAMSEYDQVLHEDETTNRMQESLKLFDNICNNKWFTDTSIILFLNKKDLFEEKIKKSSLTICFNEYTGNQTYEEAAAYIQAQFEAKNKSSSKEIYCHQTCATDTNNIQFVFDAVTDVIIANNLRGCGLY

SEQ ID NO: 7885 - protein, 353 aa, Mizuhopecten yessoensis
MACCLSEEAKEQKRINCEIEKELRKAKRDARRELKLLLLGTGESGKSTFIKQMRIIHGTGYSEEDKRGFIKIVYQNIFMAMHSMIRAMDTIKISFEVADNEENAIMIRQVDYETVTTLDSQSVEAILSLWADAGIQECYDRRREYQLTDSAKYYLDAVDRIAEPNYLPTLQDILRVRVPTTGIIEYPFDLDSIIFRMVDVGGQRSERRKWIHCFENVTSIMFLVALSEYDQVLVESDNENRMEESKALFRTIITYPWFQNSSVILFLNKKDLLEEKIMHSHLVDYFPEFDGQKKDAQGAREFILRMFVDLNPDPDKIIYSHFTCATDTENIRFVFAAVKDTILQLNLKEYNLV

SEQ ID NO: 7886 - protein, 354 aa, Loligo forbesi
MACCLSEEAKEQKRINQEIEKQLRRDKRDARRELKLLLLGTGESGKSTFIKQMRIIHGSGYSEEDRKGFEKIVYQNIFSAIQTLIAAMETLSLEYKDPSNNEHAEFLNSIDADSADIFEDGHVTAIKGCWTDPGMQECYDRRREYQLTDSAKYYLDDVERIHEPGYIPTLQDILRVRVPTTGIIEYPFDLYSIIFRMVDVGGQRSERRKWIHCFENVTSIMFLVALSEYDQVLVESDNEENRMEESKALFRTIITYPWFQNSSVILFLNKKDLLEEKIMTSHLADYFPDYDGPKCDYEAAREFMMDSYMDLNEDKEKMLYYHYTCATDTENIRFVFAAVKDTILQLNLKEYNLV

SEQ ID NO: 7887 - protein, 354 aa, Loligo pealei
MACCLSEEAKEQKRINQEIEKQLRRDKRDARRELKLLLLGTGESGKSTFIKQMRIIHGAGYSEEDRKGFEKIVYQNIFSAIQTLIAAMETLSLEYKDPANNEHAEFLNSIDADAADTFEQAHVDAIQGCWKDPGMQECYDRRREYQLTDSAKYYLDDVERIHEPGYIPTLQDILRVRVPTTGIIEYPFDLDSIIFRMVDVGGQRSERRKWIHCFENVTSIMFLVALSEYDQVLVESDNEENRMEESKALFRTIITYPWFQNSSVILFLNKKDLLEEKIMTSHLVDYFPEYDGPKCDYEAAREFMCDSYMDLNEDKEKMLYYHYTCATDTENIRFVFAAVKDTILQLNLKEYNLV

SEQ ID NO: 7888 - protein, 354 aa, Octopus vulgaris
MGCTMSAEERLALERSKAIEKNLKEDGIQAAKDIKLLLLGAGESGKSTIVKQMKIIHEGGFTSEDNKQYKPVVYSNTIQSLVAIIRAMGTLDIPFGDNERECDAKMVLDVIGRMEDTEPFSDELLQAMKRLWADTGVQECFGRSNEYQLNDSAKYFLDDLDRLGAKDYMPTVQDILRTRVKTTGIVEVHFAFKTLNFKLFDVGGQRSERKKWIHCFEDVTAIIFCVAMSEYDQVLHEDETTNRMQESLKLFDSICNNKWFTDTSIILFLNKKDLFEEKIKKSPLTICFPEYTGRQTYEEAAAYIQAQFEAKNKSATKEIYCHQTCATDTNNIQFVFDAVTDVIIANNLRGCGLY

SEQ ID NO: 7889 - protein, 354 aa, Octopus vulgaris
MGCAVSSVDKAGAERSKAIDKSLRAEGERSAREVKLLLLGAGESGKSTIVKQMKIIHEKGYTQEECLQYKPVVYSNIMQSMMAIIRAMGLLKINFGSSEGENDAKTLFEISQNSDECDMTPELSALYMRLWSDPGVMSCVARSREYQLNDSAQYYLHALERISQPYYIPNVQDVLRTRVKTTGIVETHFTFKELRFKMFDVGGQRSERKKWIHCFEGVTAIIFIVAMSEYDLMLAEDQEMNRMMESMKLFDSICNNKWFLDTSIMLFLNKKDLFEDKIKNSPLTTCFPEYEGGNTYEESAAYIQLQFENLNKRKEEKEIYTHFTCATDTNNVQFVFDVVTDVIIKNNLKDCGLF

SEQ ID NO: 7890 - protein, 353 aa, Octopus vulgaris
MACCLSEEAKEQKRINQEIERQLRRDKRDARRELKLLLLGTGESGKSTFIKQMRIIHGAGYSEEDRKGFEKIVYQNIFSAIQTLIAAMETLSLEYKTSGNNENAEFIDSIDADSADTFDQSHVDAIKSLWTDEGMQECYDRRREYQLTDSAKYYLDDTERLHEPGHSPTLQDILRVRVPTTGIIEYPPDLDSTILRMADVGGQRSERRKWIHCFENVTSIMFLVALSEYDQVLVESDNENRMEESKALFRTIITYPWFQNSSVILFLNKKDLLEEKIMTSHLADYFPDYDGPKKDAQAAREFILRMFVDLNPDPDKIIYSHFTCATDTENIRFVFAAVKDTILQLNLKEYNLV

SEQ ID NO: 7891 - protein, 377 aa, Octopus vulgaris
MGCFRRTREDEDDKLRKEQNKKIEKQLQKDKQVYRSTHRLLLLGAGESGKSTIVKQMRILHVDGGFGPEERKLKIEDIKRNIRDAILTITGAMSTLNPPVELDDSSLMHHVNYIQEIASQQDFDYPAEFYEHTEILWRDKGVQTCYERSNEYQLIDCAQYFLDRVHIVKSADYTPTEQDILRCRVLTSGIFETRFIVDKVNFHMFDVGGQRDERRKWIQCFNDVTAIIFVTACSSYNLVLREDNTQNRLKESLELFQSIWNNRWLRSISVILFLNKQDLLAEKVKAGKSKIETYFADFERYVTPVDAHTEPGDDPEVVRAKYFIRDEFLRISTATRDGRHYCYPHFTCAVDTENIRRVFNDCRDIIQRMHLRQYELL

SEQ ID NO: 7892 - protein, 355 aa, Homarus americanus
MGCAMSNAADKEAAERSKKIDKDLRLAGERAAREVKLLLLGAGESGKSTIVKQMKIIHETGYSREECEQYRPVVYSNTIQSLMAIIRAMGQLKIDFRDSSRADDARHFFTLASAADEGELTPELANIMKRLWNESGVQHCRNRSREYQLNDTAAYYLNALDRIARPGYIPTQQDVLRTRVKTTGIVETNFSFKNLNFKLFDVGGQRSERKKWIHCFEGVTAIIFVVALSGYDLVLAEDEEMNRMIESMKLFDSICNNKWFVETSIILFLNKKDLFEQKITKSPLTICFPEYQGSNVYEDSANYIRMKFENLNKRKDQKEIYTHFTCATDTNNIQFVFDAVTDVIIKNNLKDCGLF

SEQ ID NO: 7893 - protein, 339 aa, Homarus americanus
MGCAMSNAADKEAAERSKKIDKDLRLAGERAAREVKLLLLGAGESGKSTIVKQMKIIHETGYSREECEQYRPVVYSNTIQSLMAIIRAMGQLKIDFRDSSRADDARHFFTLASAADEGELTPELANIMKRLWNESGVQHCFNRSREYQLNDTAAYYLNALDRIARPGYIPTQQDVLRTRVKTTGIVETNFSFKNLNFKLFDVGGQRSERKKWIHCFEGVTAIIFVVALSGYDLVLAEDEEMNRMIESMKLFDSICNNKWFVETSIILFLNKKDLFEQKITKSPLTICFPEYQGSNVYEDSANYIRMKFTCATDTNNIQFVFDAVTDVIIKNNLKDCGLF

SEQ ID NO: 7894 - protein, 353 aa, Homarus americanus
MACCLSEEAKEQKRINQEIERQLRKDKRDARRELKLLLLGTGESGKSTFIKQMRIIHGAGYSDEDKRGFIKLVFQNIFMAMQSMIRAMDLLQISYGDSANIEHADLVRSVDYESVTTFEEPYVTAMNSLWQDTGIQHCYDRRREYQLTDSAKYYLTDLDRIAAKDYVSTLQDILRVRAPTTGIIEYPFDLEEIRFRMVDVGGQRSERRKWIHCFENVTSIIFLVALSEYDQILFESDNENRMEESKALFKTIITYPWFQHSSVILFLNKKDLLEEKIMYSHLVDYFPEYDGPRKDAIAAREFILRMFVELNPDPEKIIYSHFTCATDTENIRFVFAAVKDTILQLNLKEYNLV

SEQ ID NO: 7895 - protein, 379 aa, Homarus americanus
MGCFGSAGAKGDAEENKKRKEANKNINKQIQKDKQVYRATHRLLLLGAGESGKSTIVKQMRILHVDGFSEEEKREKIHAIRCNIRDAILTITGNMSTLTPPIALENPAHQFRVDYIQDVASQKDFDYPEEFYEHTEMLWKDKGVQACYERANEYQLIDCAKYFLDRVHIVRQTDYTPTEQDILRCRVLTLGIFETRFQVDKVNFHMFDVGGQRDERRKWIQCFNDVTAIIFVTACSSYNMVLREDPSQNRLRESLDLFKSIWNNRWLRTISVILFLNKQDLLAEKIRAGKSKLEDYFPDFARYQTPLDATVEPGEDPEVVRAKYFIRDEFLRISTASGDGKHYCYPHFTCAVDTENIRRVFNDCRDIIQRMHLRQYELL

SEQ ID NO: 7896 - protein, 353 aa, Panulirus argus
MACCLSEEAKEQKRINQEIERQLRKDKRDARRELKLLLLGTGESGKSTFIKQMRIIHGAGYSDEDKRGFIKLVFQNIFMAMQSMIRAMDLLQISYGDSANIEHADLVRGVDYESVTTFEEPYVTAMKSLWQDTGIQHCYDRRREYQLTDSAKYYLTDLDRIAATDYVSTLQDILRVRAPTTGIIEYPFDLEEIRFRMVDVGGQRSERRKWIHCFENVTSIIFLVALSEYDQILFESDNENRMEESKALFKTIITYPWFQHSSVILFLNKKDLLEEKIMYSHLVDYFPEYDGPRKDAIAAREFILRMFVELNPDPEKIIYSHFTCATDTENIRFVFAAVKDTILQLNLKEYNLV

SEQ ID NO: 7897 - protein, 353 aa, Limulus polyphemus
MACCLSEEGKEQKRINQEIERQLRKDKRDARRELKLLLLGTGESGKSTFIKQMRIIHGQGYSDDDKKSYIKLVYQNIIMAMQSMNKAMEMLKISYKDRNNIENAELVLSVDYETVTTFDSPYVEAIKSLWVDPGIQECYDRRREYQLTDSAKYYLNDIDRIAVPNYLPTQQDILRVRVPTTGIIEYPFILDSIIFRMVDVGGQRSERRKWIHCFENVTSIIFLVALSEYDQILFESDNENRMEESKALFKTIITYPWFLNSSVILFLNKKDLLEEKIMFSHLVDYFPEYDGPKKDAVQGREFILKMFVDLNPDSEKIIYSHFTCATDTENIRFVFAAVKDTILQLNLKEYNLV

SEQ ID NO: 7898 - protein, 354 aa, Locusta migratoria
MGCAMSAEERAALARSKQIEKNLKEDGLQAAKDIKLLLLGAGESGKSTIVKQMKIIHESGFTAEDFKQYRPVVYSNTIQSLVAILRAMPNLGISFCNNERETDAKMVFDVIQRMEDTEPFSEELLAAMKRLWADSGVQECFGRSNEYQLNDSAKYFLDDLDRLGAKDYQPTEQDILRTRVKTTGIVEVHFSFKNLNFKLFDVGGQRSERKKWIHCFEDVTAIIFCVAMSEYDQVLHEDETTNRMQESLKLFDSICNNKWFTDTSIILFLNKKDLFEEKIKKSPLTICFPEYAGAQEYGEAAAYIQAQFEAKNKSTTKEIYCHMTCATDTNNIQFVFDAVTDVIIANNLRGCGLY

SEQ ID NO: 7899 - protein, 355 aa, Manduca sexta
MGCASSAEERAAPSAQQADREKLKEDGIQAAKDIKLLLLGAGESGKSTIVKQMKIIHESGFTNEDFKQYRPVVYSNTIQSLVAILRAMPTLGITYANKDRESDGKMVFDVIQRMEDTEPFSEELLAAMKRLWADAGVQECFGRSNEYQLNDSAKYFLDDLDRLGARDYQPTEEDILRTRVKTTGIVEVHFSFKNLNFKLFDVGRGQRSERKKWIHCFEDVTAIIFCVAMSEYDQVLHEDETTNRMQESLKLFDSICNNKWFTDTSIILFLNKKDLFEEKIRKSPLTICFPEYTRAYQEYGEAAAYIRSQFEAKNNSTTKEIYCHMTATDTNNNQFVFDAVTDVIIANNLRGCGLY

SEQ ID NO: 7900 - protein, 354 aa, Drosophila melanogaster
MGCAQSAEERAAAARSRLIERNLKEDGIQAAKDIKLLLLGAGESGKSTIVKQMKIIHESGFTAEDFKQYRPVVYSNTIQSLVAILRAIPTLSIQYSNNERESDAKMVFDVCQRMHDTEPFSEELLAAMKRLWQDAGVQECFSRSNEYQLNDSAKYFLDDLDRLGAKDYQPTEQDILRTRVKTTGIVEVHFSFKNLNFKLFDVGGQRSERKKWIHCFEDVTAIIFCVAMSEYDQVLHEDETTNRMQESLKLFDSICNNKWFTDTSIILFLNKKDLFEEKIRKSPLTICFPEYTGGQEYGEAAAYIQAQFEAKNKSTSKEIYCHMTCATDTNNIQFVFDAVTDVIIANNLRGCGLY

SEQ ID NO: 7901 - protein, 354 aa, Drosophila melanogaster
MGCAQSAEERAAAARSRLIERNLKEDGIQAAKDIKLLLLGAGESGKSTIVKQMKIIHESGFTAEDFKQYRPVVYSNTIQSLVAILRAMPTLSIQYSNNERESDAKMVFDVCQRMHDTEPFSEELLAAMKRLWQDAGVQECFSRSNEYQLNDSAKYFLDDLDRLGAKDYQPTEQDILRTRVKTTGIVEVHFSFKNLNFKLFDVGGQRSERKKWIHCFEDVTAIIFCVAMSEYDQVLHEDETTNRMQESLKLFDSICNNKWFTDTSIILFLNKKDLFEEKIRKSPLTICFPEYTGGQEYGEAAAYIQAQFEAKNKSTSKEIYCHMTCATDTNNIQFVFDAVTDVIIANNLRGCGLY

SEQ ID NO: 7902 - protein, 355 aa, Drosophila melanogaster
MGCAVSTARDKEAIERSKNIDRALRAEGERAASEVKLLLLGAGESGKSTIVKQMKIIHDTGYSQEECEEYRRVVFSNTVQSLMVIIRAMGRLKIEFADPSRTDIARQFFTHASAADEGILLPEIVLLMKKLWADGGVQQTFARSREYQLNDSAGYYLNSLDRIAQPNYIPTQQDVLRTRVKTTGIIETHFSCKQLHFKLFDVGGQRSERKKWIHCFEGVTAIIFCVALSGYDLVLAEDEEMNRMIESLKLFDSICNSKWFVETSIILFLNKKDLFEEKIKRSPLTICFPEYTGTNTFEEAANYIRMKFENLNKRKDQKEIYTHLTCATDTNNVKFVFDAVTDVIIKNNLKQIGLF

SEQ ID NO: 7903 - protein, 354 aa, Drosophila melanogaster
MGCTTSAEERAAIQRSKQIEKNLKEDGIQAAKDIKLLLLGAGESGKSTIVKQMKIIHESGFTAEDFKQYRPVVYSNTIQSLVAILRAMPTLSIQYSNNERESDAKMVFDVCQRMHDTEPFSEELLAAMKRLWQDAGVQECFSRSNEYQLNDSAKYFLDDLDRLGAKDYQPTEQDILRTRVKTTGIVEVHFSFKNLNFKLFDVGGQRSERKKWIHCFEDVTAIIFCVAMSEYDQVLHEDETTNRMQESLKLFDSICNNKWFTDTSIILFLNKKDLFEEKIRKSPLTICFPEYTGGQEYGEAAAYIQAQFEAKNKSTSKEIYCHMTCATDTNNIQFVFDAVTDVIIANNLRGCGLY

SEQ ID NO: 7904 - protein, 355 aa, Drosophila melanogaster
MGCAVSTARDKEAIERSKNIDRALRAEGERAASEVKLLLLGAGESGKSTIVKQMKIIHDTGYSQEECEEYRRVVFSNTVQSLMVIIRAMGRLKIEFADPSRTDIARQFFTHASAADEGILLPEIVLLMKKLWADGGVQQSFARSREYQLNDSAGYYLNSLDRIAQPNYIPTQQDVLRTRVKTTGIIETHFSCKQLHFKLFDVGGQRSERKKWIHCFEGVTAIIFCVALSGYDLVLAEDEEMNRMIESLKLFDSICNSKWFVETSIILFLNKKDLFEEKIKRSPLTICFPEYTGTNTFEEAANYIRMKFENLNKRKDQKEIYTHLTCATDTNNVKFVFDAVTDVIIKNNLKQIGLF

SEQ ID NO: 7905 - protein, 360 aa, Drosophila melanogaster
MECCLSEEAKEQKRINQEIEKQLRRDKRDARRELKLLLLGTGESGKSTFIKQMRIIHGSGYSDEDKRGYIKLVFQNIFMAMQSMIKAMDMLKISYGQGEHSELADLVMSIDYETVTTFEDPYLNAIKTLWDDAGIQECYDRRREYQLTDSAKYYLSDLARIEQADYLPTEQDILRARVPTTGILEYPFDLDGIVFRMVDVGGQRSERRKWIHCFENVTSIIFLVALSEYDQILFESDNENRMEESKALFRTIITYPWFQNSSVILFLNKKDLLEEKIDLLEEKIMYSHLVDYFPEYDGPKQDHAAAKQFVLKKYLACNPDPERQCYSHFTTATDTENIKLVFCAVKDTIMQNALKEFNLG

SEQ ID NO: 7906 - protein, 353 aa, Drosophila melanogaster
MECCLSEEAKEQKRINQEIEKQLRRDKRDARRELKLLLLGTGESGKSTFIKQMRIIHGSGYSDEDKRGYIKLVFQNIFMAMQSMIKAMDMLKISYGQGEHSELADLVMSIDYETVTTFEDPYLNAIKTLWDDAGIQECYDRRREYQLTDSAKYYLSDLARIEQADYLPTEQDILRARVPTTGILEYPFDLDGIVFRMVDVGGQRSERRKWIHCFENVTSIIFLVALSEYDQILFESDNENRMEESKALFRTIITYPWFQNSSVILFLNKKDLLEEKIMYSHLVDYFPEYDGPKQDHAAAKQFVLKKYLACNPDPERQCYSHFTTATDTENIKLVFCAVKDTIMQNALKEFNLG

SEQ ID NO: 7907 - protein, 302 aa, Drosophila melanogaster
MKIIHESGFTAEDFKQYRPVVYSNTIQSLVAILRAMPTLSIQYSNNERESDAKMVFDVCQRMHDTEPFSEELLAAMKRLWQDAGVQECFSRSNEYQLNDSAKYFLDDLDRLGAKDYQPTEQDILRTRVKTTGIVEVHFSFKNLNFKLFDVGGQRSERKKWIHCFEDVTAIIFCVAMSEYDQVLHEDETTNRMQESLKLFDSICNNKWFTDTSIILFLNKKDLFEEKIRKSPLTICFPEYTGGQEYGEAAAYIQAQFEAKNKSTSKEIYCHMTCATDTNNIQFVFDAVTDVIIANNLRGCGLY

SEQ ID NO: 7908 - protein, 353 aa, Drosophila melanogaster
MECCLSEEAKEQKRINQEIEKQLRRDKRDARRELKLLLLGTGESGKSTFIKQMRIIHGSGYSDEDKRGYIKLVFQNIFMAMQSMIKAMDMLKISYGQGEHSELADLVMSIDYETVTTFEDPYLNAIKTLWDDAGIQECYDRRREYQLTDSAKYYLKDLDRVAQPAYLPTEQDILRVRVPTTGIIEYPFDLEEIRFRMVDVGGQRSERRKWIHCFENVTSIIFLVALSEYDQILFESDNENRMEESKALFRTIITYPWFQNSSVILFLNKKDLLEEKIMYSHLVDYFPEYDGPQRDAITAREFILRMFVDLNPDSEKIIYSHFTCATDTENIRFVFAAVKDTILQSNLKEYNLV

SEQ ID NO: 7909 - protein, 353 aa, Drosophila melanogaster
MDCCLSDQACEERRISREIDKFLKAEKKKARRELKLLVLGTGESGKTTFIKQMRIIHGKGFLDKERKQFTKNVFQNIFMAIQSMISAMDTLRIPYGQQEHSKLADLVKSIDYKTVTRLEAPYLNAIKTLWKDAGIKECYNRRREYQLTDSTEYFLNDIARIERSDYQATDQDILHVRAPTTNIVEYPFNLDGFLIRLVDVAGQRTERRKWIHCFSNVTSIMFLVAMSEFDLSLAESENDNRMKESKALFHNIISFSWFQHSSVILFLNKEDLFKKKILSTHLADYFPEYNGPKKDAKAAREFILYMFTSVNPDPYKCIYPHFTVATNTENIKFVFTAVKDTILELHLSETNLL

SEQ ID NO: 7910 - protein, 399 aa, Drosophila melanogaster
MKLRLLRCLRQQPAKPAAVMTHKEDQYPVSLDHHVLKDMAKGVRDTTVKILLLGTAESGKTTIIKQMRILHINGFTDDERREKIPEIYQNIHESILQLVGQMGVLGIDFGSCTSERSADYILSLPGSAPEYMNEEYCDHVTTLWNDVGIRACYDRSNEFPLLDSAKYFLDNFVRISDAEYIPSTEDILHSRKITTGISQITFRVPIPKSMGGGEQQFQMYDVGGQRDQRNKWIQVFEGIQAVLFLISCSEFDQNLREDPSQNRLQEALKLFRAVWQNRFLASAGLIVFLNKYDIMERKIRAGKHIVDYFPEYEDFCKRPQQDNCFGESDWTKMFIKQKLVDITQEPFKRHSRNQVDLGTSERECYYHFTVATDTRCIRDVFCDVQKMILSENVSSMGLF

SEQ ID NO: 7911 - protein, 385 aa, Drosophila melanogaster
MGCFGSPTSKQSDVNSEDSKSQKRRSDAISRQLQKDKQLYRATHRLLLLGAGESGKSTIVKQMRILHVDGFSDSEKKQKIDDIKKNIRDAILTITGAMSTLNPPVALEKKENEPRVEYIQDYASSPDFNYPPEFYEHTEELWKDKGVLQTYERSNEYQLIDCAKYFLDRVSTIKNPNYTPNEQDILRCRVLTSGIFETRFQVDKVNFHMFDVGGQRDERRKWIQCFNDVTAIIFVTACSSYNMVLREDPTQNRLRESLDLFKSIWNNRWLRTISIILFLNKQDLLAEKIKAGKSKLSEYFSEFNKYQTPIDTGDAIMESNDDPEVIRAKYFIRDEFLRISTASGDGKHYCYPHFTCAVDTENIKRVFNDCRDIIQRMHLRQYELL

SEQ ID NO: 7912 - protein, 382 aa, Drosophila melanogaster
MGCFGSPTSKQSDVNSEDSKSQKRRSDAISRQLQKDKQLYRATHRLLLLGAGESGKSTIVKQMRILHVDGFSDSEKKQKIDDIKKNIRDAILTITGAMSTLNPPVALEKKENEPRVEYIQDYASSPDFNYPPEFYEHTEELWKDKGVLQTYERSNEYQLIDCAKYFLDRVSTIKNPNYTPNEQDILRCRVLTSGIFETRFQVDKVNFHMFDVGGQRDERRKWIQCFNDVTAIIFVTACSSYNMVLREDPTQNRLRESLDLFKSIWNNRWLRTISIILFLNKQDLLAEKIKAGKSKLSEYFSEFNKYQTPSDAIMESNDDPEVIRAKYFIRDEFLRISTASGDGKHYCYPHFTCAVDTENIKRVFNDCRDIIQRMHLRQYELL

SEQ ID NO: 7913 - protein, 457 aa, Drosophila melanogaster
MSGITLTKLTQERISIPNNNVITNGVENNIDSDTLSGTLTHLMEEHRTRVGAVTGPEAATTSTDGLISNGAERLRLQGSRLQTSRFACFRCCGNIITYLVRLRSTPEELEQRYKSKEIDKFLEKEKHTFRRQVKLLLLGAGESGKSTFLKQMRIIHGVNFDYELLLEYQSVIYQNVIRGMQVLLDAREKLNIAWGSDGREQDAYDAKLMECNSLDVPKFMEYAPPISRLWQDRGIRRAFERRREFQISDSVSYFLDEIQRLATPDYVPTHKDILHCRKATKGVYEFCVKVQNIPFVFVDVGGQRTQRQKWTRCFDSSVTSIIFLVSSSEFDQVLAEDRKTNRLEESKNIFDTIVNNATFKGISIILFLNKTDLLEQKVCNPETDIRWYYPHFNGNPHSVLDVQNFILQMFMSVRRSSSISRIYHHFTTAIDTRNINVVFNSVKDTILQRNLNALMLQ

SEQ ID NO: 7914 - protein, 340 aa, Drosophila melanogaster
MRKLTNSCALRKKDLNGNSNYCYWVRGVGCIGMYQGYNVRISTGACESGKSTFIKQMRIIHGSGYSDEDKRGYIKLVFQNIFMAMQSMIKAMDMLKISYGQGEHSELADLVMSIDYETVTTFEDPYLNAIKTLWHDAGIQECYDRRREYQLTDSTEYFLGDIGRIEQADYLPTNQDILRAREPTFNITVYPFELDGYVLSMVDVAGQRTERRKWIHFFSNVTSIIFLAALSEYDQFMMESENDNRLEESKALFHTIITFEWFKNASIILFLNKMDVLEEKIMYSHLVDYFPEYDGPKQDAYAAREYVLRMFQSISLDTYKKIYSHFTCATGKCIVLIYLA

SEQ ID NO: 7915 - protein, 321 aa, Drosophila melanogaster
MRKLTNSCALRKKDLNGNSNYCYWVRGVGCIGMYQGYNVRISTGACESGKSTFIKQMRIIHGSGYSDEDKRGYIKLVFQNIFMAMQSMIKAMDMLKISYGQGEHSELADLVMSIDYETVTTFEDPYLNAIKTLWHDAGIQECYDRRREYQLTDSTEYFLGDIGRIEQADYLPTNQDILRAREPTFNITVYPFELDGYVLSMVDVAGQRTERRKWIHFFSNVTSIIFLAALSEYDQFMMESENDNRLEESKALFHTIITFEWFKNASIILFLNKMDVLEEKIMYSHLVDYFPEYDDTENIKFVFAAVKDTILQCNLKESNLF

SEQ ID NO: 7916 - protein, 199 aa, Drosophila melanogaster
FLDDLDRLGAKDYQPTEQDILRTRVKTTGIVEVHFSFKNLNFKLFDVGGQRSERKKWIHCFEDVTAIIFCVAMSEYDQVLHEDETTNRMQESLKLFDSICNNKWFTDTSIILFLNKKDLFEEKIRKSPLTICFPEYTGGQEYGEAAAYIQAQFEAKNKSTSKEIYCHMTCATDTNNIQFVFDAVTDVIIANNLRGCGLY

SEQ ID NO: 7917 - protein, 333 aa, Drosophila melanogaster
MDCCLSDQACEERRISREIDKFLKAEKKKARRELKLLVLGFLDKERKQFTKNVFQNIFMAIQSMISAMDTLRIPYGQQEHSKLADLVKSIDYKTVTRLEAPYLNAIKTLWKDAGIKECYNRRREYQLTDSTEYFLNDIARIERSDYQATDQDILHVRAPTTNIVEYPFNLDGFLIRLVDVAGQRTERRKWIHCFSNVTSIMFLVAMSEFDLSLAESENDNRMKESKALFHNIISFSWFQHSSVILFLNKEDLFKKKILSTHLADYFPEYNGPKKDAKAAREFILYMFTSVNPDPYKCIYPHFTVATNTENIKFVFTAVKDTILELHLSETNLL

SEQ ID NO: 7918 - protein, 305 aa, Drosophila melanogaster
MSGITLTKLTQERISIPNNNVITNGVENNIDSDTLSGTLTHLMEEHRTRVGAVTGPEAATTSTDGLISNGAERLRLQGSRLQTSRFACFRCCGNIITYLVRLRSTPEELEQRYKSKEIDKFLEKEKHTFRRQVRVKLLLLGAGESGKSTFLKQMRIIHGVNFDYELLLEYQSVIYQNVIIGMQVLLDAREKLNIAWGSDGREQDAYDAKLMECNSLDVPKFMEYAPPISRLWQDRGIRRAFERRREFQISDSVSYFLDEIQRLATPDYVPTHKDILHCRKATKGVYEFCVKVQKNQSSRRVKEYI

SEQ ID NO: 7919 - protein, 156 aa, Drosophila sp.
FQNIFMAMQSMIKAMDMLKISYGQGEHSELADLVMSIDYETVTTFEDPYLNAIKTLWDDAGIQECYDRRREYQLTDSAKYYLSDLARIEQADYLPTEQDILRARVPTTGILEYPFDLDGIVFRMVDVGGQRSERRKWIHCFENVTSIIFLVALSEY

SEQ ID NO: 7920 - protein, 353 aa, Calliphora vicina
MECCLSEEAKEQKRINQEIERQLRRDKRDARRELKLLLLGTGESGKSTFIKQMRIIHGSGYSDDDKRGYIKLVFQNIFMAMQSMIKAMDMLRISYGARDHAELAELVMSIDYETVTSFEDPYLSAIKTLWADTGIQECYDRRREYQLTDSAKYYLSDLERIEQADYLPSEQDILRARVPTTGILEYPFDLDGIVFRMVDVGGQRSERRKWIHCFENVTSIIFLVALSEYDQILFESDNENRMEESKALFRTIITYPWFQNSSVILFLNKKDLLEEKIMYSHLVDYFPEYDGPKCDHAAAKQFVLKKYLAANPDPERQCYSHFTTATDTENIKLVFCAVKDTIMQNALKEFNLG

SEQ ID NO: 7921 - protein, 354 aa, Asterina pectinifera
MGCATSAEDKAAAERSKAIDRNLRIDGEKAAREVKLLLLGAGESGKSTIVKQMKIIHEEGYSEEDCKQYKPVVYSNTIQSMIAIIRAMGSLKVDFGDGDRTDDARQLFALAGQAEEGELSPELAAVMKRLWADGGVQGCFSRSREYQLNDSASYYLNALDRLAAPGYIPTQQDVLRTRVKTTGIVETHFTFKDLHFKMFDVGGQRSERKKWIHCFEGVTAIIFCVALSAYDLVLAEDEEMNRMHESMKLFDSICNNKWFTETSIILFLNKKDLFEEKITKSPLTICFPEYTGSNTYEEAAAYIQMQFEDLNKRKDQKEIYTHFTCATDTNNIQFVFDAVTDVIIKNNLKDCGLF

SEQ ID NO: 7922 - protein, 353 aa, Rosellinia necatrix
MGCGMSTEEKEGKARNEEIENQLKRDKMMQRNEIKMLLLGAGESGKSTILKQMKLIHEGGYSRDERESFKEIIFSNTVQSMRVILEAMESLELPLEEPRMEYHVQTIFMQPAQIEGDVLPPEVGGAIEALWKDHGVQECFKRSREYQLNDSARYYFDNIVRIATPDYMPNDQDVLRSRVKTTGITETTFIIGDLTYRMFDVGGQRSERKKWIHCFENVTTILFLVAISEYDQLLFEDETVNRMQEALTLFDSICNSRWFIKTSIILFLNKIDRFKEKLPVSPMKNYFPDYEGGDDYAAACDYILNRFVSLNQHETKQIYTHFTCATDTTQIRFVMAAVNDIIIQENLRLCGLI

SEQ ID NO: 7923 - protein, 356 aa, Rosellinia necatrix
MMGACMSSNKEDEEQKKRSQAIDRALDEDSKRLRRECKILLLGSGESGKSTIVKQMKIIHLKGYSEEELYNYRATVFKNLIECAKAVIIAMDQFEIEPSSEGTTDYCDYLRNYTVESGPSARIEAKVGIAVQALWNDPCIDRLMQHATEFYLMDSAGYFFDEVHRICAPDYLPNEMDVLRARTKTTGIYETKFQMGALNIHMFDVGGQRSERKKWIHCFENVTSIIFCVALSEYDQVLLEESSQNRMMESLLLFDSVVNSRWFMRTSIILFLNKVDIFKAKLPRSPLGNYFPDYSGGNDVNKAAKYLLWRFNQVNRAHLNLYPHLTQATDTSNIRLVFAAVKETILNNALKDSGIL

SEQ ID NO: 7924 - protein, 354 aa, Rosellinia necatrix
MCFGSRKTDEAGDARSRELDKIIKQDEKRMLKEVKLLLLGAGESGKSTVLKQMKLIYAQGFSKTEKLEWKPVVLINVIQSLRLIFDAMEDYNIEFERKENEKNKELVLLDVEIGPNDPLPQDYLQPIKSLWADSGVQKAILKGNEYALHDNIAYFCDDVDRLWDKNYIPTDQDLLRTRLRTTGITETVFDLGQLTYRMFDVGGQRSERKKWIHCFENVHCLLFLVAISGYDQCLVEDKDGNQMNEALMLWESIANSHWFAKSALILFLNKMDLFKEKLVSSPITSYGFTDYRGPADDHKLASKYFMDKFKALNRNPEKEIYGHFTNATDTNLLKITMTSVQDMIIQRNLKQLIL

SEQ ID NO: 7925 - protein, 354 aa, Ciona intestinalis
MGCTVSTDDKAANERSRAIDRNLRVDGDKQSREVKLLLLGAGESGKSTIVKQMKIIHEDGYSEEECLQYKAVVYSNTLQSLITIVRAMGNLKIDFGSSDRADDARQLFSLAGSLEDGEMTQELGDCMKRMWGDKGVQVCFNRSREFQLNDSAQYYLDSLDRLTEPRYVPTQQDVLRTRVKTTGIVEVDFNFKGLTFKMFDVGGQRSERKKWIHCFEGVTAIIFCVALSAYDLVLAEDEEMNRMHESMKLFDSICNNKWFTETSIILFLNKKDLFEVKILKSPLSICFPEYPGQNTYAEAAAYIQLQFEDLNKRKDSKEIYTHFTCATDTTNIQFVFDAVTDVIIKNNLKDCGLF

SEQ ID NO: 7926 - protein, 354 aa, Ciona intestinalis
MGCTVSTDDKAANERSRAIDRNLRVDGDKQSREVKLLLLGAGESGKSTIVKQMKIIHEDGYSEEECLQYKAVVYSNTLQSLITIVRAMGNLKIDFGSSDRADDARQLFSLAGSLEDGEMTQELGDCMKRMWGDKGVQVCFNRSREFQLNDSAQYYLDSLDRLVASDYVPTEQDVLRSRVKTTGIVETQFEHKDLHFKMFDVGGQRSERKKWIHCFEGVTAIIFCVALSAYDLVLAEDEEMNRMHESMKLFDSICNNKWFTETSIILFLNKKDLFEVKILKSPLSICFPEYPGQNTYAEAAAYIQLQFEDLNKRKDSKEIYTHFTCATDTTNIQFVFDAVTDVIIKNNLKDCGLF

SEQ ID NO: 7927 - protein, 103 aa, Ciona intestinalis
GDCMKRMWGDKGVQVCFNRSREFQLNDSAQYYLDSLDRLTEPRYVPTQQDVLRTRVKTTGIVEVDFNFKGLTFKMFDVGGQRSERKKWIHCFEGVTAIIFCVA

SEQ ID NO: 7928 - protein, 165 aa, Ciona intestinalis
KQMRIIHESGYSEDECIQYKPVVYSNTIQSMLAIIRAMGTLSIEFANPERQDDARQLFSLAGSVEDGSFTPELISIMKRLWQDDTLQQCFQRAREYQLNDSAGYYLFALERIGAPDYVPTQQDVLRTRVKTTGIVETHFVFKDLHFKMFDVGGQRSERKKWIHCF

SEQ ID NO: 7929 - protein, 103 aa, Ciona intestinalis
GDCMKRMWGDKGVQVCFNRSREFQLNDSAQYYLDSLDRLVASDYVPTEQDVLRSRVKTTGIVETQFEHKDLHFKMFDVGGQRSERKKWIHCFEGVTAIIFCVA

SEQ ID NO: 7930 - protein, 164 aa, Ciona intestinalis
KQMRIIHGTGYSHEELAGHIPLIYQNINFSIKTLATAMLELGIPYELEANKDFGEVSIELPRECENSLDTTRVLGIMLFWKDEGVQQCYLRRNEFHLLDSAAYYLNNLTRISSASYLPTLQDVLRSRRPTLGITEYLFKIDKFMFGIVDVGGQKSERRKWIHCF

SEQ ID NO: 7931 - protein, 165 aa, Ciona intestinalis
KQMKIIHGAGYSDEDKRSFIKLVYQNIVTSIQNMSAAMQTLNLEYEIEENNEHAEEIREVQVDKISSYDDFITNISYIECLWKDTGIQKCYDRRREYQLSDSTYYYLSDLDRIKKPDFLPTQQDILRVRIPTTGIIEYPFDLDQIIFRMVDVGGQRSERRKWIHC

SEQ ID NO: 7932 - protein, 357 aa, Halocynthia roretzi
MGCAPSKSENDKDAVSKSKEIDKQLKKDAENARKEVKLLLLGAGESGKSTIAKQMKILHQDGFSEEERKNFAPVVYTNTIQSMVAIVKAMESLGIDYEDNEREEDGRKIRAASQTMEEIDITADIGAALKRLWMDKGVQACVARSREYQLNDSATYYLDALDRLCSPDYIPTEQDVLRTRVKTTGIIETTFQYKNLNFTLIDVGGQRSERKKWIHCFQDVTAIIFCVAMSAYDQVLAEDEETNRMIESLKLFQSICNNPFFAKTSMILFLNKKDLFEEKIKKSPLNTCFKEYEGENSYADASEHIKEQFEAANKNNCMKEIYTHFTCATDTGNVRFVFDAVSDVLMRKIIDNVFGSG

SEQ ID NO: 7933 - protein, 354 aa, Halocynthia roretzi
MGCAVSSEDKAAQERSKAIDRNLKMDGEKASREVKLLLLGAGESGKSTIVKQMKIIHEDGYSEDECIQYKAVVYSNTLQSLITIVRAMGNLKIDFGHPDRADDARQLFSLASSLEDGEMTSELGDCMKRLWNDKGVQVCFSRSREYQLNDSAQYYLDALDRLVQQDYIPSEQDVLRSRVKTTGIVETHFEFKDLHFKMFDVGGQRSERKKWIHCFEGVTAIIFCVALSAYDLVLAEDEEMNRMHESMKLFDSICNNKWFTDTSIILFLNKKDLFEQKISKSSLTICFPEYTGANTYEEAAAYIQLKFEDLNKRKDTKEIYTHFTCATDTNNIQFVFDAVTDVIIKNNLKDCGLF

SEQ ID NO: 7934 - protein, 360 aa, Halocynthia roretzi
MLEIMEFCCKSEEQREAKRINAEIERELRRHKRDARRELKLLLLGTGESGKSTFIKQMRIIHGKGYSDNDRREFCKLVHQNILTSMQNMIRAMETLHIQYSDPQNEQNSYDFLELDVERVAEQNGFPEYCTAIEALWTDKGIHDCYDRRREYQLSDSTSYYLNSLDRIRMPDYLPTEQDVLRVRVPTTGISEYPFDLDSIIFRMVDVGGQRSERRKWIHCFENVTSIMFLVALSEYDQVLVESNNENRMEESKALFRTIIMYPWFQNSSVILFLNKKDLLEEKIMYSHLADYFSDYDGPTQDANAAREFILSRFVELNPDADKIVYSHFTCATDTENIRFVFAAVKDTILQCNLREYNLV

SEQ ID NO: 7935 - protein, 382 aa, Halocynthia roretzi
MLMACFCSQPGGSNAEDLNNQKRINREINDILQKDKQEYRSTHRLLLLGAGESGKSTIVKQMRILHVNGFNDEEKKHKILDIKKNIRDAMVSVIGAMKNLTPPVKLQLPDNEPSVDYILSVSVNFKEEEDFNEGFFDKVLNLWIDEGVQQCFQRSNEYQLIDCAKYFLDKVHDIRNSNYSPSNQDLLRCRVLTRGIFETKFNVDRVKFHMFDVGGQRDERRKWIHCFNEVTAIIFVVASSSYDMVLREDPSQNRLKEALDLFKNIWNNRWLRTISVILFLNKQDLLTEKVLAGRSVLEHYFPDFGPYRIPHDATPDENEEPRVTRAKYFIRDEFLRLSQTGDGRHYCYPHFTCAVDTENIRRVFNDCRDIIQRMHLRQYELL

SEQ ID NO: 7936 - protein, 469 aa, Halocynthia roretzi
MSSLVSCFLGNDRTAAKEISKRIEQQIKDDKKIARTQVKLLVLGTSESGKSTFLKQMRIIHGTGYTADEKRSFIGLICQNVHTSMKILLQSMKNLNIEYDLEENSNIAMALDDGERDESRLPKSLALDFMKLWNDGGIQQCYARRNEFQLSDSTLYFMSNLDQISEEDYIPSLQDILRSRMPTTGIREYQFTIGNFVFGIVDVGGQKSERRKWIHCFENVTSIIFLARLSEYDLTIPLEEVSQDLRASLRHRQQRALQSRGKTVKGGLNYSGSGSAMNNGLAELDLSNGNNPHSTQRKLRTRPSNKKNFVATEFPRTPVIPRMSSKNSPDQNGNTRKHDSSSRQDEAYARSHINRMKESRALFKTIISCEYFINTSVILFLNKKDILAEKIHTSHLVDHFPEFDGPRADAESARAFILTKYADCFERSERQREICTPIHVSTDTRNIRYVFAAVKDIILKNYLVTYNLV

SEQ ID NO: 7937 - protein, 98 aa, Halocynthia roretzi
MGCAPSKSENDKDAVSKSKEIDKQLKKDAENARKEVKLLLLGAGESGKSTIAKQMKILHQDGFSEEERKNFAPVVYTNTIQSMVAIVKAMDRSESTMK

SEQ ID NO: 7938 - protein, 355 aa, Squalus acanthias
MGCTISAEDKAAAERSKMIDKNLREDGEKAAREVKLLLLGAGESGKSTIVKQMKIIHEDGYSEEECRQYKAVVYSNTIQSIMAIIKAMGNLKVDFGESGRADDARQLFALSGTAEEQGILPEDLANVIRRLWADAGVQACFGRSREYQLNDSAAYYLNDLERIARSDYIPTQQDVLRTRVKTTGIVETHFTFKDLHFKMFDVGGQRSERKKWIHCFEGVTAIIFCVALSAYDLVLAEDEEMNRMHESMKLFDSICNNKWFTDTSIILFLNKKDLFEEKITKSPLTICFPEYSGANEYDAAAGYIQTKFEDLNKRKDTKEIYTHFTCATDTKNVQFVFDAVTDVIIKNNLKDCGLF

SEQ ID NO: 7939 - protein, 354 aa, Danio rerio
MGSGASAEDKEMAKKSKELEKQLQEDADKEAKTVKLLLLGAGESGKSTIVKQMKILHQGGYTKEEQMEFRSIIFGNILQSALAIIRGMEMLSINFGSPSAQEDSQKLQNLSDSIEEGTMPPELADVIKRLWKDAGVQASFDRAAEYQLNDSAGYYLNEMDRICKPDYLPTEQDVLRSRVKTTGIIEEQFGCKELHFRMFDVGGQRSERKKWIHCFEGVTCIIFCGALSAYDMVLVEDDEVNRMHESLHLFNSICNHRFFATTSIVLFLNKKDLFQEKIKKVHLSICFPDYDGPNTYEDASNYIKTQFQDLNMKKGVKEIYSHMTCATDTKNVEIVFNAVTDIIIKENLKDCGLF

SEQ ID NO: 7940 - protein, 377 aa, Danio rerio
MIILYFLTLRLLKSFRSLLNFEKMGCTLSSDDKSAQERSKMIDRNLRDDGEKASREVKLLLLGAGESGKSTIVKQMKIIHEAGYSEEECKQYRVVVYSNTIQSIIAIIRAMGRLRIDFADPERADDARQLFVMAGSVDEGFMTSELAGVIKRLWRDEGVRLCFHRSREYQLNDSASYYLNDLDRISNSSYVPTQQDVLRTRVKTTGIVETHFTFKDLHFKMFDVGGQRSERKKWIHCFEGVTSIIFCVSLSDYDLVLAEDEEMNRMHESMKLFDSICNNKWFTDTSIILFLNKKDLFEEKIRMSPLSICFPEYPGSDVYEEAAAYIQCQFEDLNKRKDTKEIYSHFTCATDTKNVQFVFDAVTDVIIKNNLKDCGLF

SEQ ID NO: 7941 - protein, 347 aa, Danio rerio
MGCTVSAEDKAAAERSKMIDKNLREVKLLLLGAGESGKSTIVKQMKIIHEDGYSEDECKQYRAVVYSNTIQSIMAIIKAMSNLKIDYGESARVDDARQLFALSAAAEEQGILTDDLANVIRRLWADSGVQGCFSRSREYQLNDSAAYYLNDLDRIARSDYIPTQQDVLRTRVKTTGIVETHFTFKDLHFKMFDVGGQRSERKKWIHCFEGVTAIIFCVALSAYDLVLAEDEEMNRMHESMKLFDSICNNKWFTETSIILFLNKKDLFEEKITRSPLTICFPEYSGANKYDEAASYIQTKFEDLNKKKDTKEIYTHFTCATDTKNVQFVFDAVTDVIIKNNLKDCGLF

SEQ ID NO: 7942 - protein, 350 aa, Danio rerio
MGAGASAEEKHSRELEKKLKEDADKDARTVKLLLLGAGESGKSTIVKQMKIIHKDGYSLEECLEFIVIIYSNTMQSILAVVRAMTTLNIGYGDAAAQDDARKLMHLADTIEEGTMPKELSDIILRLWKDSGIQACFDRASEYQLNDSAGYYLNDLERLIQPGYVPTEQDVLRSRVKTTGIIETQFSFKDLNFRMFDVGGQRSERKKWIHCFEGVTCIIFIAALSAYDMVLVEDDEVNRMHESLHLFNSICNHRYFATTSIVLFLNKKDVFVEKIKKAHLSMCFPEYDGPNTFEDAGNYIKVQFLDLNLRRDIKEIYSHMTCATDTENVKFVFDAVTDIIIKENLKDCGLF

SEQ ID NO: 7943 - protein, 355 aa, Oryzias latipes
MGCTVSQEDKAAADRSKMIDKNLREDGEKAAREVKLLLLGAGESGKSTIVKQMKIIHEDGYSEDECKQYRAVVYSNTVQSIMAIIKAMTILHLDYERPEREEDAKRLFKMAAEAEERGDLPEELANIIKDLWADSGIQHCLTRAREYQLNDSAAYYLKDLERISKPDYIPTQQDVLRTRVKTTGIVETHFTFKDLHFKMFDVGGQRSERKKWIHCFEGVTAIIFCVAMSAYDLVLAEDEEMNRMHESMKLFDSICNNKWFTETSIILFLNKKDLFEQKIAHSPLTICFPEYEGPNTYQEAQAYIQTKFEDLNKKKETKEIYTHFTCATDTKNVQFVFDAVTDVIIKNNLKDCGLF

SEQ ID NO: 7944 - protein, 354 aa, Oryzias latipes
MGCTLSTDDKAAQERSKMIDRNLRDDGEKAAREVKLLLLGAGESGKSTIVKQMKIIHEAGYSEEECKQYKAVVYSNTIQSIIAIIRAMGRLKIDFADQARADDARQLFILAGSTEEGFMTGELAGVIQRLWKDGGVQACFSRSREYQLNDSAAYYLNDLDRISHASYVPTQQDVLRTRVKTTGIVETHFTFKDLHFKMFDVGGQRSERKKWIHCFEGVTAIIFCVALSDYDLVLAEDEEMNGMHESMKLFDSICNNKWFTDTSIILFLNKKDLFEEKIKKSLLTICFPEYAGSNTYEEAAAYVQCQFEDLNKRKDTKEIYTHFTCATDTKNVQFVFDAVTDVIIKNNLKDCGLF

SEQ ID NO: 7945 - protein, 350 aa, Sparus aurata
MGAGASAEDKKSKELEKQLQEDADKDSKTVKLLLLGAGESGKSTIVKQMKILHQGGYTKEEQLEFRAIIYGNILQSALAIIRGMEMLGIDFGSSTGQEDAQKLQNLSDSIEEGTMPSELADVIKKLWADSGVQASFERAAEFQLNDSAGYYLNEMERICKPEYLPTEQDVLRSRVKTTGIIEEQFSCKELHFRMFDVGGQRSERKKWIHCFEGVTCIIFCGALSAYDMVLVEDDEVNRMHESLHLFNSICNHRFFALTSIVLFLNKKDLFEEKIKKVHLSICFPDYDGPNSYEDASNYIKAQFEELNMKKGVKEIYSHLTCATDTKNVQIVFNAVTDIIIKENLKDCGLF

SEQ ID NO: 7946 - protein, 350 aa, Ambystoma tigrinum
MGAGASAEAKHSRELEKKLKEDAEKDARTVKLLLLGAGESGKSTIVKQMKIIHQDGYTKEECMEFISIINSNTLQSMLAIVRAMNTLNIGYGDPARQDDSRKLMHLADTIDEGQMPKEMSDIIARLWKDSGIQACFDRASEYQLNDSASYYLNDLERLVKPGYVPTEQDVLRSRVKTTGIIETQFGLKDLNFRMFDVGGQRSERKKWIHCFEGVTCIIFIAALSAYDMVLVEDDEVNRMHESLHLFNSICNHRYFAATSIVLFLNKKDVFTEKIKKAHLSICFPDYDGPNTYEDAGNYIKQQFLELNMRRDIKEIYSHMTCATDTENVKFVFDAVTDIIIKENLKDCGLF

SEQ ID NO: 7947 - protein, 354 aa, Ambystoma tigrinum
MGSGASTEDKELAKRSKELEKRLQEDADKDAKTVKLLLLGAGESGKSTIVKQMKIIHQDGYTEQECLEFKSIIYGNILQSILSIIRAMTTLGIDYASNQRAEDGRLLCHLADSIEEGTMPKELVDVIKRLWKDEGVQACFERAAEYQLNDSAPYYLNELDRITTPTYLPNEQDVLRSRVKTTGIIETQFSFKDLHFRMFDVGGQRSERKKWIHCFEGVTCIIFCGALSAYDMVLVEDDEVNRMHESLHLFNSICNHKFFAATSIVLFLNKKDLFEQKIKKVHLSICFPDYDGPNTYDDAANYIKLQFLDLNMRKDIKEIYGHLTCATDTKNVKFVFDAVTDIVIKETLKDCGLF

SEQ ID NO: 7948 - protein, 354 aa, Xenopus laevis
MGCTLSAEDKAAVERSKMIDRNLREDGEKAAREVKLLLLGAGESGKSTIVKQMKIIHEAGYSEEECKQYKAVVYSNTIQSIIAIIRAMGRLKIDFGDPSRADDARQLFVLAGAAEEGFMTAELAGVIKRLWKDGGVQACFNRSREYQLNDSAAYYLNDLDRIAQNSYIPTQQDVLRTRVKTTGIVETHFTFKDLHFKMFDVGGQRSERKKWIHCFEGVTAIIFCVALSDYDLVLAEDEEMNRMHESMKLFDSICNNKWFTDTSIILFLNKKDLFEEKIKRSPLTICYPEYPGSNTYEEAAAYIQCQFEDLNKRKDTKEIYTHFTCATDTKNVQFVFDAVTDVIIKNNLKDCGLF

SEQ ID NO: 7949 - protein, 350 aa, Xenopus laevis
MGAGASAEEKHSRELEKKLKEDADKDARTVKLLLLGAGESGKSTIVKQMKIIHQDGYSVEECLEFIAIIYGNTLQSMIAIVKAMNTLNIQFGDPARQDDARKLMHLADTIDEGSMPKEMSDIIGRLWKDTGIQACFDRASEYQLNDSAGYYLNDLDRLVIPGYVPTEQDVLRSRVKTTGIIETQFGLKDLNFRMFDVGGQRSERKKWIHCFEGVTCIIFIAALSAYDMVLVEDDEVNRMHESLHLFNSICNHRYFATTSIVLFLNKKDVFTEKIKKAHLSICFPDYDGPNTYEDAGNYIKTQFLELNMRRDVKEIYSHMTCATDTENVKFVFDAVTDIIIKENLKDCGLF

SEQ ID NO: 7950 - protein, 354 aa, Xenopus laevis
MGCTLSAEDKEAAERSKMIDRNLREDGEKASKEVKLLLLGAGESGKSTIVKQMKIIHEDGYSEEECRQYKVVVYSNTIQSIIAIIRAMGRLRIDFGDVARADDARQLFVLASSAEEGVMSPELAGVIQRLWEDSGVQACFSRSREYQLNDSASYYLNDIERIAQGSYIPTQQDVLRTRVKTTGIVETHFTFKDLYFKMFDVGGQRSERKKWIHCFEGVTAIIFCVALSDYDLLLAEDEEMNRMHESMKLFDSICNNKWFIDTSIILFLNKKDLFEEKISRSPLTICYPEYSGSNTYEEAAAYIQCQFEDLNRRKDTKEIYTHFTCATDTKNVQFVFDAVTDVIIKSNLMECGLY

SEQ ID NO: 7951 - protein, 345 aa, Xenopus laevis
REAAERSKMIDRNLREDGEKASKEVKLLLLGAGESGKSTIVKQMKIIHEDGYSEEECRQYKVVVYSNTIQSIIAIIRAMGRLRIDFGDVARADDARQLFVLASSAEEGVMSPELAGVIQRLWEDSGVQACFSRSREYQLNDSASYYLSDIERIAQGSYIPTQQDVLRTRVKTTGIVETHFTFKDLYFKMFDVGGQRSERKKWIHCFEGVTAIIFCVALSDYDLLLAEDEEMNRMHESMKLFDSICNNKWFIDTSIILFLNKKDLFEEKISRSPLTICYPEYSGSNTYEEAAAYIQCQFEDLNRRKDTKEIYTHFTCATDTKNVQFVFDAVTDVIIKSNLMECGLY

SEQ ID NO: 7952 - protein, 350 aa, Xenopus laevis
MGCTSSAEDKAAAERSKMIDKNLREDGEKAAREVKLLLLGAGESGKSTIVKQMKIIHEDGYSEEECRQYRAVVFSNTIQSIMAIIKAMGNLKIDFGDSARADDARQLFALSCSAEEQGVLPEDLSGVIRRLWADHGVQACFNRSREYQLNDSAAYYLNDLERIARSDYLPTQQDVLRTRVKTTGIVETHFTFKDLHFKMFDVGGQRSERKKWIHCFEGVTAIIFCVALSAYDLVLAEDEEMNRMHESMKLFDSIWNNKWFTETSIILFLNKKDLFEEKITHSPLTICFPEYTGANKYDEAASYIHSKFEDLNKRKDTKEIYTHFTCATDTKNVEFVFDAVTDVIIKNNLK

SEQ ID NO: 7953 - protein, 354 aa, Xenopus laevis
MGCTLSAEERAALERSKQIEKNLKEDGVTAAKDVKLLLLGAGESGKSTIVKQMKIIHEDGFSGEDVKQYKPVVYSNTIQSLAAIVRAMDTLGIEYGDKERRADAKMVCDVVSRMEDTEPYSPELLSAMVRLWADSGIQECFNRSREYQLNDSAKYYLDSLDRIGAPDYQPTEQDILRTRVKTTGIVETHFTFKNLHFRLFDVGGQRSERKKWIHCFEDVTAIIFCVALSGYDQVLHEDETTNRMHESLMLFDSICNNKFFIDTSIILFLNKKDLFAEKIKKSPLSICFPEYTGPNTYEDAAAYIQAQFESKNRSPNKEIYCHMTCATDTNNIQVVFDAVTDIIIANNLRGCGLY

SEQ ID NO: 7954 - protein, 354 aa, Xenopus laevis
MGCTLSAEERAALERSKQIEKNLKEDGVTAAKDVKLLLLGAGESGKSTIVKQMKIIHEDGFSGEDVKQYKPVVYSNTIQSLAAIVRAMDTLGIEYGDKERRADAKMVCDVVSRMEDTEPYSPELLSAMVTLWADSGIQECFNRSREYQLNDSAKYYLDSLDRIGAPDYQPTEQDILRTRVKTTGIVETHFTFKNLHFRLFDVGGHRSERKKWIHCFEDVTAIIFCVALCGYDQVLHEDETTNRMHESLMLFDSICNNKFFIDTSIILFLNKKDLFAEKIKKSPLSICFPEYTGSNTYEDAAAYIQAQFESKNRSPNKEIYCHMTCATDTNNIQVVFDAVTDIIIATTLRGCGLY

SEQ ID NO: 7955 - protein, 354 aa, Xenopus laevis
MGCTLSAEERAALERSKQIEKNLKEDGVTAAKDVKLLLLGAGESGKSTIVKQMKIIHEDGFSGEDVKQYKPVVYSNTIQSLAAIVRAMDTLGIEYGDKERRADAKMVCDVVSRMEDTEPYSPELLSAMVRLWADSGIQECFNRSREYQLNDSAKYYLDSLDRIGAPDYQPTEQDILRTRVKTTGIVETHFTFKNLHFRLFDVGGQRSERKKWWHCFEDVTAIIFCVALTGYDQVLHEDETTNRMHESLKLFDSICNNKWFTDTSIILFLNKKDIFQEKIKSSPLTICFPEYTGPNSFTEAVAHTQHQYESRNKSENKEIYTHITCATDTQNIQFVFDAVTDVIIAYNLRGCGLY

SEQ ID NO: 7956 - protein, 354 aa, Xenopus laevis
MGCTLSAEERAAVERSKQIEKNLKEDGVTAAKDVKLLLLGAGESGKSTIVKEMKIIHEDGFSGEDVKQYKPVVYSNTIQSLRAIVRAMDTLGIEYGDKERRADAKMVCDVVSRMEDTEPYSPEVVSAMVRLWADSGIQECFNRSREYQLNDSAKYYLDSLDRIGAPDYQPTEQDILRTRVKTTGIVETHFTFKNLHSRLFDVGGQRSERKKWWHCFEDVTAIIFCVALTGYDQVLHEDETTNRMHESLKLFDSICNNKWFTDTSIILFLNKKDIFQEKIKSSPLTICFPEYTGPNSFTEAVAHTQHQYESRNKSENKEIYTHITCATDTQNIQFVFDAVTDVIIAYNLRGCGLY

SEQ ID NO: 7957 - protein, 359 aa, Xenopus laevis
MTLDSMMACCLSEEVKESKRINAEIEKQLRRDKKDSRRELKLLLLGTGESGKSTFIKQMRIIHGSGYSEEDKRGFTKLVFQNIFTAMQSMIRAMETLKILYKFEQNKANAQIVREVDVEKVCTFEQPYVNAVKNLWSDPGIQECYDRRREYQLSDSTKYYLTDVDRISKPGYLPTQQDVLRVRVPTTGIIEYPFDLENIIFRMVDVGGQRSERRKWIHCFENVTSIMFLVALSEYDQVLVESDNENRMEESKALFRTIITYPWFQNSSVILFLNKKDLLEDKIMYSHLVDYFPEFDGPQRDAATAREFILKMFVDLNPDSDKIIYSHFTCATDTENIRFVFAAVKDTILQHNLKEYNLV

SEQ ID NO: 7958 - protein, 359 aa, Xenopus laevis
MTLDSTMACCLSEEVKESKRINAEIEKQLRRDKKDSRRELKLLLLGTGESGKSTFIKQMRIIHGSGYSEEDKKGFTKLVFQNIFTAMQSMIRAMETLKILYKYEQNKANAQVVREVDVEKVCTFEQPYVNAIKNLWSDPGIQECYDRRREYQLSDSTKYYLTDVDRISKPGYLPTQQDVLRVRVPTTGIIEYPFDLENIIFRMVDVGGQRSERRKWIHCFENVTSIMFLVALSEYDQVLVESDNENRMEESKALFRTIITYPWFQNSSVILFLNKKDLLEDKIMYSHLVDYFPEFDGPQRDAATAREFILKMFVDLNPDSDKIIYSHFTCATDTENIRFVFAAVKDTILQHNLKEYNLV

SEQ ID NO: 7959 - protein, 359 aa, Xenopus laevis
MTLESIMACCLSEEAEEARRINDEIERQLRRDKRDARRELKLLLLGTGESGKSTFIKQMRIIHGSGYSDEDKRGFTKLVYQNIFSAMQAMIRAMETLKIPYKYEHNKGHALLVREVDVEKVASFENPYVDAIKYLWNDPGIQECYDRRREYQLSDSTKYYLNDLDRIATHGYLPTQQDVLRVRVPTTGIIEYPFDLQSVIFRMVDVGGQRSERRKWIHCFENVTSIMFLVALSEYDQVLVESDNENRMEESKALFRTIITYPWFQNSSVILFLNKKDLLEEKIMYSHLVDYFPEYDGPQRDAQAAREFILKMFVDLNPDSDKIIYSHFTCATDTENIRFVFAAVKDTILQLNLKEYNLV

SEQ ID NO: 7960 - protein, 353 aa, Xenopus laevis
MACCLSEEAEEARRINDEIERQLRRDKRDARRELKLLLLGTGESGKSTFIKQMRIIHGSGYSDEDKRGFTKLVYQNIFSAMQAMIRAMETLKIPYKYEHNKGHALLVREVDVEKVASFENPYVDAIKYLWNDPGIQECYDRRREYQLSDSTKYYLNDLDRIATHGYLPTQQDVLRVRVPTTGIIEYPFDLQSVIFRMVDVGGQRSERRKWIHCFENVTSIMFLVALSEYDQVLVESDNENRMEESKALFRTIITYPWFQNSSVILFLNKKDLLEEKIMYSHLVDYFPEYDGPQRDAQAAREFILKMFVDLNPDSDKIIYSHFTCATDTENIRFVFAAVKDTILQLNLKEYNLV

SEQ ID NO: 7961 - protein, 359 aa, Xenopus laevis
MTLESIMACCLSEEAKEARRINDEIERQLRRDKRDARRELKLLLLGTGESGKSTFIKQMRIIHGSGYSDEDKRGFTKLVYQNIFTAMQAMIRAMETLKIPYKYEHNKGHALLVREVDVEKVASFENPYVDAIKYLWNDPGIQECYDRRREYQLSDSTKYYLNDVDRIATQGYLPTQQDVLRVRVPTTGIIEYPFDLQSVIFRMVDVGGQRSERRKWIHCFENVTSIMFLVALSEYDQVLVESDNENRMEESKALFRTIITYPWFQNSSVILFLNKKDLLEEKIMYSHLVDYFPEYDGPQRDAQAAREFILKMFVDLNPDSDKIIYSHFTCATDTENIRFVFAAVKDTILQLNLKEYNLV

SEQ ID NO: 7962 - protein, 354 aa, Xenopus laevis
MAGCCLSAEEKESQRINAEIEKQLRRDKRDARRELKLLLLGTGESGKSTFIKQMRIIHGSGYTDEDRKGFTKLVYQNIFTSMQSMIRAMDTLRIQYTSEQNMENALVIREVEVDKVSSLERKHVEAIKKLWEDEGIQECYDRRREYQLSDSTKYYLSDIDRISNPGFIPTQQDVLRVRVPTTGIIEYPFDLENIIFRMVDVGGQRSERRKWIHCFENVTSIIFLVALSEYDQVLAECDNENRMEESKALFKTIITYPWFQNSSVILFLNKKDLLQEKIMYSHLIDYFPEFTGPKQDSQAARDFILKLYQDQNPDKEKVIYSHFTCATDTENIRFVFAAVKDTILQLNLREFNLV

SEQ ID NO: 7963 - protein, 379 aa, Xenopus laevis
MGCLGNSKTEDQRIDEKAQREANKKIEKQLQKERLAYKATHRLLLLGAGESGKSTIVKQMRILHVNGFNSEEKKQKSQDIRKNVKDAIVTIVSAMSTLIPPVPLANPENQFRIDYIKSIAPLSDFDYTQEFFDHAQKLWDDDGVKACFERSNEYQLIDCAQYFLERIDHVRQNDYTPTDQDLLRCRVLTSGIFETRFQVDKVNFHMFDVGGQRDERRKWIQCFNDVTAIIFVVASSSYNMVIREDNNTNRLREALDLFKSIWNNRWLRTISVILFLNKQDMLAEKVLAGKSKIEDYFPEYVRYTIPDDAVPDAGEDPKVTRAKFFIRDEFLRISTASGDGRHYCYPHFTCAVDTENIRRVFNDCRDIIQRMHLRQYELL

SEQ ID NO: 7964 - protein, 379 aa, Xenopus laevis
MGCLGNSKTEDQRNEEKVQRETNKKIEKQLQKDKQVYRATHRLLLLGAGESGKSSIVKQMRILHVNGFNAEEKKTKVQDIKNNIKEAIETIVTAMGNLSPPVELVNPENQFRIDYILNLPNYKDFEFSPEFYEHTKTLWQDEGVRACYERSNEYQLIDCAQYFLDKIDIVKQNDYTPSDQDLLRCRVLTSGIFETKFQVDKVNFHMFDVGGQRDERRKWIQCFNDVTAIIFVVASSSYNMVIREDNHTNRLQEALNLFKSIWNNRWLRTISVILFLNKQDLLAEKVNAGKSKIEDYFPEFARYTTPDDATPEVGEDPRVTRAKYFIRDEFLRISTASGDGRHYCYPHFTCAVDTENIRRVFNDCRDIIQRMHLRQYELL

SEQ ID NO: 7965 - protein, 353 aa, Oculimacula yallundae
MGCGMSSEEKEGKQRNEEIENQLKRDKMLQRNEIKMLLLGAGESGKSTILKQMKLIHEGGYSRDERESFKEIIFSNTVQSMRVILEAMEQLELPLDDQRTEYHVQTIFMQPAQIEGDNLPPEVGNAISALWRDIGVQECFKRSREYQLNDSAEYYFNNIDRISLPDYMPDDQDVLRSRVKTTGITETAFIIGDLTYRMFDVGGQRSERKKWIHCFENVTTILFLVAISEYDQLLFEDETVNRMQEALTLFDSICNSRWFIKTSIILFLNKIDRFKEKLPISPMKNYFPDYEGGDDYSLACDYILNRFVSLNQHETKQIYTHFTCATDTTQIRFVMAAVNDIIIQENLRLCGLI

SEQ ID NO: 7966 - protein, 353 aa, Oculimacula yallundae
MCFGGRDDGEAKRSREIDALIHRDEKVMQKVVKLLLLGAGESGKSTILKQMRLIYTKDGFTKNEKEEWRVIIFNNILDGLRMTLDAMEEFGIPFEFKNTDVHLPVILADKDLRPYEPIPVEYLRAFKDMWKDQGIQKAIKRGNEFALHDNLSYFFQDLDRLFNKEFVPTDQDVLRARLRTTGITETVFDLGSLQYRMFDVGGQRSERKKWIHCFENVNALMFLVAISGYDQCLAEDKDGNQMQEALMLWESIANSHWFKNSALILFLNKMDLFKEKIAISPITKFGFSDFQGDPRDPQQASKYFMDKFVALNRSPVREVYSHFTNATDTDLLKVTMASVQDMIIQKNLQKLIL

SEQ ID NO: 7967 - protein, 354 aa, Gallus gallus
MGCTLSAEDKAAVERSKMIDRNLREDGEKAAREVKLLLLGAGESGKSTIVKQMKIIHEAGYSEEECKQYKAVVYSNTIQSIIAIIRAMGRLKIDFGDPTRADDARQLFVLAGAAEEGFMTADVAGVIKRLWKDSGVQACFNRSREYQLNDSAAYYLNDLDRIAQTSYIPTQQDVLRTRVKTTGIVETHFTFKDLHFKMFDVGGQRSERKKWIHCFEGVTAIIFCVALSDYDLVLAEDEEMNRMHESMKLFDSICNNKWFTDTSIILFLNKKDLFEEKIKRSPLTICYPEYAGSNTYEEAAAYIQCQFEDLNKRKDTKEIYTHFTCATDTKNVQFVFDAVTDVIIKNNLKDCGLF

SEQ ID NO: 7968 - protein, 354 aa, Gallus gallus
MGSGASAEDKEMAKRSKELEKKLQEDADKEAKTVKLLLLGAGESGKSTIVKQMKIIHQDGYTPEECMEFKAVIYGNILQSILAIIRAMSTLGIDYAESGRADDGRQLFNLADSIEEGTMPPELVDCIKKLWKDGGVAGVFDRAAEYQLNDSAAYYLNQLDRITAPGYLPNEQDVLRSRVKTTGIIETKFSVKDLNFRMFDVGGQRSERKKWIHCFEGVTCIIFCGALSAYDMVLVEDDEVNRMHESLHLFNSICNHKFFAATSIILFLNKKDLFEEKIKKVHLSICFPDYDGPNTFEDAGNYIKTQFLDLNMRKDVKEIYSHMTCATDTQNVKFVFDAVTDVIIKENLKDCGLF

SEQ ID NO: 7969 - protein, 354 aa, Gallus gallus
MGCTLSAEDKAAVERSKMIDRNLREDGEKAAKEVKLLLLGAGESGKSTIVKQMKIIHEDGYSEEECKQYKVVVYSNTIQSIIAIIRAMGRLKIDFGEVARADDARQLFVLAGSAEEGVMTAELAGVIKRLWRDAGVQACFSRSREYQLNDSASYYLNDLDRISQPTYIPTQQDVLRTRVKTTGIVETHFTFKDLYFKMFDVGGQRSERKKWIHCFEGVTAIIFCVALSDYDLVLAEDEEMNRMHESMKLFDSICNNKWFTDTSIILFLNKKDLFEEKIKKSPLTICYPEYTGSNTYEEAAAYIQCQFEDLNRRKDTKEIYTHFTCATDTKNVQFVFDAVTDVIIKNNLKECGLY

SEQ ID NO: 7970 - protein, 350 aa, Gallus gallus
MGAGASAEEKHSRELEKKLKEDAEKDARTVKLLLLGAGESGKSTIVKQMKIIHQDGYSLEECLEFIAIIYSNTLQSMLAIVRAMTTLNIQYGDSARQDDARKLLHLSDTIEEGTMPKEMSDIIGRLWKDAGIQACFDRASEYQLNDSAGYYLSDLERLVTPGYVPTEQDVLRSRVKTTGIIETQFSFKDLNFRMFDVGGQRSERKKWIHCFEGVTCIIFIAALSAYDMVLVEDDEVNRMHESLHLFNSICNHRYFATTSIVLFLNKKDVFLEKIKKAHLSICFPDYDGPNTYDDAGNYIKLQFLELNMRRDVKEIYSHMTCATDTENVKFVFDAVTDIIIKENLKDCGLF

SEQ ID NO: 7971 - protein, 355 aa, Gallus gallus
MGCTVSAEDKAAAERSRMIDRNLREDGEKAAREVKLLLLGAGESGKSTIVKQMKIIHEDGYSEEECRQYKAVVYSNTIQSIMAIIKAMGNLQIDFGDSSRADDARQLFALACTAEEQGIMPEDLANVIRRLWADHGVQACFNRSREYQLNDSAAYYLNDLERIARADYIPTQQDVLRTRVKTTGIVETHFTFKDLHFKMFDVGGQRSERKKWIHCFEGVTAIIFCVALSAYDLVLAEDEEMNRMHESMKLFDSICNNKWFTDTSIILFLNKKDLFEEKIVHSPLTICFPEYTGANKYDEAAGYIQSKFEDLNKRKDTKEIYTHFTCATDTKNVQFVFDAVTDVIIKNNLKDCGLF

SEQ ID NO: 7972 - protein, 354 aa, Gallus gallus
MGCTLSAEERAALERSKAIEKNLKEDGISAAKDVKLLLLGAGESGKSTIVKQMKIIHEDGYSEEECKQYKVVVYSNTIQSIIAIIRAMGRLKIDFGEVARADDARQLFVLAGSAEEGVMTAELAGVIKRLWRDAGVQACFSRSREYQLNDSASYYLNDLDRISQPTYIPTQQDVLRTRVKTTGIVETHFTFKDLYFKMFDVGGQRSERKKWIHCFEGVTAIIFCVALSDYDLVLAEDEEMNRMHESMKLFDSICNNKWFTDTSIILFLNKKDLFEEKIKKSPLTICYPEYTGSNTYEEAAAYIQCQFEDLNRRKDTKEIYTHFTCATDTKNVQFVFDAVTDVIIKNNLKECGLY

SEQ ID NO: 7973 - protein, 359 aa, Meleagris gallopavo
MTLESMMACCLSDEVKESKRINAEIEKQLRRDKRDARRELKLLLLGTGESGKSTFIKQMRIIHGSGYSEEDKKGFTKLVYQNIFTAMQSMIRAMETLKILYKYEQNKANAVLIREVDVEKVMTFEQPYVSAIKTLWNDPGIQECYDRRREYQLSDSAKYYLSDVDRIATPGYLPTQQDVLRVRVPTTGIIEYPFDLENIIFRMVDVGGQRSERRKWIHCFENVTSIMFLVALSEYDQVLVESDNENRMEESKALFRTIITYPWFQNSSVILFLNKKDLLEDKILYSHLVDYFPEFDGPQRDAQAAREFILKMFVDLNPDSDKIIYSHFTCATDTENIRFVFAAVKDTILQLNLKEYNLV

SEQ ID NO: 7974 - protein, 354 aa, Homo sapiens
MGSGISSESKESAKRSKELEKKLQEDAERDARTVKLLLLGAGESGKSTIVKQMKIIHKNGYSEQECMEFKAVIYSNTLQSILAIVKAMTTLGIDYVNPRSAEDQRQLYAMANTLEDGGMTPQLAEVIKRLWRDPGIQACFERASEYQLNDSAAYYLNDLDRITASGYVPNEQDVLHSRVKTTGIIETQFSFKDLHFRMFDVGGQRSERKKWIHCFEGVTCIIFCAALSAYDMVLVEDEEVNRMHESLHLFNSICNHKYFSTTSIVLFLNKKDIFQEKVTKVHLSICFPEYTGPNTFEDAGNYIKNQFLDLNLKKEDKEIYSHMTCATDTQNVKFVFDAVTDIIIKENLKDCGLF

SEQ ID NO: 7975 - protein, 354 aa, Homo sapiens
MGCTLSAEDKAAVERSKMIDRNLREDGEKAAREVKLLLLGAGESGKSTIVKQMKIIHEAGYSEEECKQYKAVVYSNTIQSIIAIIRAMGRLKIDFGDSARADDARQLFVLAGAAEEGFMTAELAGVIKRLWKDSGVQACFNRSREYQLNDSAAYYLNDLDRIAQPNYIPTQQDVLRTRVKTTGIVETHFTFKDLHFKMFDVGGQRSERKKWIHCFEGVAAIIFCVALSDYDLVLAEDEEMNRMHESMKLFDSICNNKWFTDTSIILFLNKKDLFEEKIKKSPLTICYQEYAGSNTYEEAAAYIQCQFEDLNKRKDTKEIYTHFTCATDTKNVQFVFDAVTDVIIKNNLKDCGLF

SEQ ID NO: 7976 - protein, 354 aa, Homo sapiens
MGCTLSAEDKAAVERSKMIDRNLREDGEKAAREVKLLLLGAGESGKSTIVKQMKIIHEAGYSEEECKQYKAVVYSNTIQSIIAIIRAMGRLKIDFGDSARADDARQLFVLAGAAEEGFMTAELAGVIKRLWKDSGVQGCFNRSREYQLNDSAAYYLNDLDRIAQPNYIPTQQDVLRTRVKTTGIVETHFTFKDLHFKMFDVGGQRSERKKWIHCFEGVTAIIFCVALSDYDLVLAEDEEMNRMHESMKLFDSICNNKWFTDTSIILFLNKKDLFEEKIKKSPLTICYPEYAGSNTYEEAAAYIQCQFEDLNKRKDTKEIYTHFTCATDTKNVQFVFDAVTDVIIKNNLKDCGLF

SEQ ID NO: 7977 - protein, 349 aa, Homo sapiens
SAEDKAAVERSKMIDRNLREDGEKAAREVKLLLLGAGESGKSTIVKQMKIIHEAGYSEEECKQYKAVVYSNTIQSIIAIIRAMGRLKIDFGDSARADDARQLFVLAGAAEEGFMTAELAGVIKRLWKDSGVQACFNRSREYQLNDSAAYYLNDLDRIAQPNYIPTQQDVLRTRVKTTGIVETHFTFKDLHFKMFDVGGQRSERKKWIHCFEGVTAIIFCVALSDYDLVLAEDEEMNRMHESMKLFDSICNNKWFTDTSIILFLNKKDLFEEKIKKSPLTICYPEYAGSNTYEEAAAYIQCQFEDLNKRKDTKEIYTHFTCATDTKNVQFVFDAVTDVIIKNNLKDCGLF

SEQ ID NO: 7978 - protein, 350 aa, Homo sapiens
MGAGASAEEKHSRELEKKLKEDAEKDARTVKLLLLGAGESGKSTIVKQMKIIHQDGYSLEECLEFIAIIYGNTLQSILAIVRAMTTLNIQYGDSARQDDARKLMHMADTIEEGTMPKEMSDIIQRLWKDSGIQACFERASEYQLNDSAGYYLSDLERLVTPGYVPTEQDVLRSRVKTTGIIETQFSFKDLNFRMFDVGGQRSERKKWIHCFEGVTCIIFIAALSAYDMVLVEDDEVNRMHESLHLFNSICNHRYFATTSIVLFLNKKDVFFEKIKKAHLSICFPDYDGPNTYEDAGNYIKVQFLELNMRRDVKEIYSHMTCATDTQNVKFVFDAVTDIIIKENLKDCGLF

SEQ ID NO: 7979 - protein, 354 aa, Homo sapiens
MGSGASAEDKELAKRSKELEKKLQEDADKEAKTVKLLLLGAGESGKSTIVKQMKIIHQDGYSPEECLEFKAIIYGNVLQSILAIIRAMTTLGIDYAEPSCADDGRQLNNLADSIEEGTMPPELVEVIRRLWKDGGVQACFERAAEYQLNDSASYYLNQLERITDPEYLPSEQDVLRSRVKTTGIIETKFSVKDLNFRMFDVGGQRSERKKWIHCFEGVTCIIFCAALSAYDMVLVEDDEVNRMHESLHLFNSICNHKFFAATSIVLFLNKKDLFEEKIKKVHLSICFPEYDGNNSYDDAGNYIKSQFLDLNMRKDVKEIYSHMTCATDTQNVKFVFDAVTDIIIKENLKDCGLF

SEQ ID NO: 7980 - protein, 354 aa, Homo sapiens
MGCTLSAEDKAAVERSKMIDRNLREDGEKAAKEVKLLLLGAGESGKSTIVKQMKIIHEDGYSEDECKQYKVVVYSNTIQSIIAIIRAMGRLKIDFGEAARADDARQLFVLAGSAEEGVMTPELAGVIKRLWRDGGVQACFSRSREYQLNDSASYYLNDLDRISQSNYIPTQQDVLRTRVKTTGIVETHFTFKDLYFKMFDVGGQRSERKKWIHCFEGVTAIIFCVALSDYDLVLAEDEEMNRMHESMKLFDSICNNKWFTETSIILFLNKKDLFEEKIKRSPLTICYPEYTGSNTYEEAAAYIQCQFEDLNRRKDTKEIYTHFTCATDTKNVQFVFDAVTDVIIKNNLKECGLY

SEQ ID NO: 7981 - protein, 325 aa, Homo sapiens
GAREVKLLLLGAGESGKSTIVKQMKIIHEAGYSEEECKQYKAVVYSNTIQSIIAIIRAMGRLKIDFGDSARADDARQLFVLAGAAEEGFMTAELAGVIKRLWKDSGVQACFNRSREYQLNDSAAYYLNDLDRIAQPNYIPTQQDVLRTRVKTTGIVETHFTFKDLHFKMFDVGGQRSERKKWIHCFEGVTAIIFCVALSDYDLVLAEDEEMNRMHESMKLFDSICNNKWFTDTSIILFLNKKDLFEEKIKKSPLTICYPEYAGSNTYEEAAAYIQCQFEDLNKRKDTKEIYTHFTCATDTKNVQFVFDAVTDVIIKNNLKDCGLF

SEQ ID NO: 7982 - protein, 355 aa, Homo sapiens
  unsure (1)..(355): unsure at all Xaa locations
MGCTVSAEDKAAAERSKMIDKNLREDGEKAAREVKLLLLGAGESGKSTIVKQMKIIHEDGYSEEECRQYRAVVYSNTIQSIMAIVKAMGNLQIDFADPSRADDARQLFALSCTAEEQGVLPDDLSGVIRRLWADHGVQACFGRSREYQLNDSAAYYLNDLERIAQSDYIPTQQDVLRTRVKTTGIVETHFTFKDLHFKMFDVGGQRSERKKWIHCFEGVTAIIFCVALSAYDLVLAEDEEMNRMHESMKLFDSICNNKWFTDTSIILFLNKKDLFEEKITHSPLTICFPEYTGANKYDEAASYIQSKFEDLNKRKDTKEIYTHFTCATDTKNVQFVFDAVTDXIIKNNLKDCGLF

SEQ ID NO: 7983 - protein, 350 aa, Homo sapiens [sequence omitted]

SEQ ID NO: 7984 - protein, 355 aa, Homo sapiens
MGCTVSAEDKAAAERSKMIDKNLREDGEKAAREVKLLLLGAGESGKSTIVKQMKIIHEDGYSEEECRQYRAVVYSNTIQSIMAIVKAMGNLQIDFADPSRADDARQLFALSCTAEEQGVLPDDLSGVIRRLWADHGVQACFGRSREYQLNDSAAYYLNDLERIAQSDYIPTQQDVLRTRVKTTGIVETHFTFKDLHFKMFDVGGQRSERKKWIHCFEGVTAIIFCVALSAYDLVLAEDEEMNRMHESMKLFDSICNNKWFTDTSIILFLNKKDLFEEKITHSPLTICFPEYTGANKYDEAASYIQSKFEDLNKRKDTKEIYTHFTCATDTKNVQFVFDAVTDVIIKNNLKDCGLF

SEQ ID NO: 7985 - protein, 354 aa, Homo sapiens
MGCTLSAEERAALERSKAIEKNLKEDGISAAKDVKLLLLGAGESGKSTIVKQMKIIHEDGFSGEDVKQYKPVVYSNTIQSLAAIVRAMDTLGIEYGDKERKADAKMVCDVVSRMEDTEPFSAELLSAMMRLWGDSGIQECFNRSREYQLNDSAKYYLDSLDRIGAADYQPTEQDILRTRVKTTGIVETHFTFKNLHFRLFDVGGQRSERKKWIHCFEDVTAIIFCVALSGYDQVLHEDETTNRMHESLKLFDSICNNKWFTDTSIILFLNKKDIFEEKIKKSPLTICFPEYTGPSAFTEAVAYIQAQYESKNKSAHKEIYTHVTCATDTNNIQFVFDAVTDVIIAKNLRGCGLY

SEQ ID NO: 7986 - protein, 355 aa, Homo sapiens [sequence omitted]

SEQ ID NO: 7987 - protein, 354 aa, Homo sapiens
MGCTLSAEERAALERSKAIEKNLKEDGISAAKDVKLLLLGAGESGKSTIVKQMKIIHEDGFSGEDVKQYKPVVYSNTIQSLAAIVRAMDTLGIEYGDKERKADAKMVCDVVSRMEDTEPFSAELLSAMMRLWGDSGIQECFNRSREYQLNDSAKYYLDSLDRIGAADYQPTEQDILRTRVKTTGIVETHFTFKNLHFRLFDVGGQRSERKKWIHCFEDVTAIIFCVALSGYDQVLHEDETTNRMHESLKLFDSICNNKWFTDTSIILFLNKKDIFEEKIKKSPLTICFPEYTGPSAFTEAVAYIQAQYESKNKSAHKEIYSHVTCATDTNNIQFVFDAVTDVIIAKNLRGCGLY

SEQ ID NO: 7988 - protein, 354 aa, Homo sapiens
MGCTLSAEERAALERSKAIEKNLKEDGISAAKDVKLLLLGAGESGKSTIVKQMKIIHEDGFSGEDVKQYKPVVYSNTIQSLAAIVRAMDTLGIEYGDKERKADAKMVCDVVSRMEDTEPFSAELLSAMMRLWGDSGIQECFNRSREYQLNDSAKYYLDSLDRIGAADYQPTEQDILRTRVKTTGIVETHFTFKNLHFRLFDVGGQRSERKKWIHCFEDVTAIIFCVALSGYDQVLHEDETTNRMHESLMLFDSICNNKFFIDTSIILFLNKKDLFGEKIKKSPLTICFPEYTGPNTYEDAAAYIQAQFESKNRSPNKEIYCHMTCATDTNNIQVVFDAVTDIIIANNLRGCGLY

SEQ ID NO: 7989 - protein, 354 aa, Homo sapiens [sequence omitted]

SEQ ID NO: 7990 - protein, 355 aa, Homo sapiens
MAGCCCLSAEEKESQRISAEIERQLRRDKKDARRELKLLLLGTGESGKSTFIKQMRIIHGSGYSDEDRKGFTKLVYQNIFTAMQAMIRAMDTLRIQYVCEQNKENAQIIREVEVDKVSMLSREQVEAIKQLWQDPGIQECYDRRREYQLSDSAKYYLTDIDRIATPSFVPTQQDVLRVRVPTTGIIEYPFDLENIIFRMVDVGGQRSERRKWIHCFESVTSIIFLVALSEYDQVLAECDNENRMEESKALFKTIITYPWFLNSSVILFLNKKDLLEEKIMYSHLISYFPEYTGPKQDVRAARDFILKLYQDQNPDKEKVIYSHFTCATDTDNIRFVFAAVKDTILQLNLREFNLV

SEQ ID NO: 7991 - protein, 339 aa, Homo sapiens
MEYAGHLPASSAQGTILACTSCTGAGESGKSTIVKQMKIIHEDGYSEEECRQYRAVVYSNTIQSIMAIVKAMGNLQIDFADPSRADDARQLFALSCTAEEQGVLPDDLSGVIRRLWADHGVQACFGRSREYQLNDSAAYYLNDLERIAQSDYIPTQQDVLRTRVKTTGIVETHFTFKDLHFKMFDVGGQRSERKKWIHCFEGVTAIIFCVALSAYDLVLAEDEEMNRMHESMKLFDSICNNKWFTDTSIILFLNKKDLFEEKITHSPLTICFPEYTGANKYDEAASYIQSKFEDLNKRKDTKEIYTHFTCATDTKNVQFVFDAVTDVIIKNNLKDCGLF

SEQ ID NO: 7992 - protein, 359 aa, Homo sapiens [sequence omitted]

SEQ ID NO: 7993 - protein, 359 aa, Homo sapiens
MTLESMMACCLSDEVKESKRINAEIEKQLRRDKRDARRELKLLLLGTGESGKSTFIKQMRIIHGAGYSEEDKRGFTKLVYQNIFTAMQAMIRAMETLKILYKYEQNKANALLIREVDVEKVTTFEHQYVSAIKTLWEDPGIQECYDRRREYQLSDSAKYYLTDVDRIATLGYLPTQQDVLRVRVPTTGIIEYPFDLENIIFRMVDVGGQRSERRKWIHCFENVTSIMFLVALSEYDQVLVESDNENRMEESKALFRTIITYPWFQNSSVILFLNKKDLLEDKILYSHLVDYFPEFDGPQREPQAAREFILKMFVDLNPDSDKIIYSHFTCATDTENIRFVFAAVKDTILQLNLKEYNLV

SEQ ID NO: 7994 - protein, 359 aa, Homo sapiens
MTLESMMACCLSDEVKESKRINAEIEKQLRRDKRDARRELKLLLLGTGESGKSTFIKQMRIIHGAGYSEEDKRGFTKLVYQNIFTAMQAMIRAMETLKILYKYEQNKANALLIREVDVEKVTTFEHQYVSAIKTLWEDPGIQECYDRRREYQLSDSAKYYLTDVDRIATLGYLPTQQDVLRVRVPTTGIIEYPFDLENIIFRMVDVGGQRSERRKWIHCFENVTSIMFLVALSEYDQVLVESDNENRMEESKALFRTIITYPWFQNSSVILFLNKKDLLEDKILYSHLVDYFPEFDGPQRDAQAAREFILKMFVDLNPDSDKIIYSHFTCATDTENIRFVFAAVKDTILQLNLKEYNLV

SEQ ID NO: 7995 - protein, 359 aa, Homo sapiens [sequence omitted]

SEQ ID NO: 7996 - protein, 355 aa, Homo sapiens [sequence omitted]

SEQ ID NO: 7997 - protein, 359 aa, Homo sapiens [sequence omitted]

SEQ ID NO: 7998 - protein, 355 aa, Homo sapiens [sequence omitted]

SEQ ID NO: 7999 - protein, 353 aa, Homo sapiens
MACCLSEEAKEARRINDEIERQLRRDKRDARRELKLLLLGTGESGKSTFIKQMRIIHGSGYSDEDKRGFTKLVYQNIFTAMQAMIRAMDTLKIPYKYEHNKAHAQLVREVDVEKVSAFENPYVDAIKSLWNDPGIQECYDRRREYQLSDSTKYYLNDLDRVADPAYLPTQQDVLRVRVPTTGIIEYPFDLQSVIFRMVDVGGQRSERRKWIHCFENVTSIMFLVALSEYDQVLVESDNENRMEESKALFRTIITYPWFQNSSVILFLNKKDLLEEKIMYSHLVDYFPEYDGPQRDAQAAREFILKMFVDLNPDSDKIIYSHFTCATDTENIRFVFAAVKDTILQLNLKEYNAV

SEQ ID NO: 8000 - protein, 359 aa, Homo sapiens
MTLESIMACCLSEEAKEARRINDEIERQLRRDKRDARRELKLLLLGTGESGKSTFIKQMRIIHGSGYSDEDKRGFTKLVYQNIFTAMQAMIRAMDTLKIPYKYEHNKAHAQLVREVDVEKVSAFENPYVDAIKSLWNDPGIQECYDRRREYQLSDSTKYYLNDLDRVADPAYLPTQQDVLRVRVPTTGIIEYPFDLQSVIFRMVDVGGQRSERRKWIHCFENVTSIMFLVALSEYDQVLVESDNENRMEESKALFRTIITYPWFQNSSVILFLNKKDLLEEKIMYSHLVDYFPEYDGPQRDAQAAREFILKMFVDLNPDSDKIIYSHFTCATDTENIRFVFAAVKDTILQLNLKEYNAV

SEQ ID NO: 8001 - protein, 355 aa, Homo sapiens
MGCRQSSEEKEAARRSRRIDRHLRSESQRQRREIKLLLLGTSNSGKSTIVKQMKIIHSGGFNLEACKEYKPLIIYNAIDSLTRIIRALAALRIDFHNPDRAYDAVQLFALTGPAESKGEITPELLGVMRRLWADPGAQACFSRSSEYHLEDNAAYYLNDLERIAAADYIPTVEDILRSRDMTTGIVENKFTFKELTFKMVDVGGQRSERKKWIHCFEGVTAIIFCVELSGYDLKLYEDNQTSRMAESLRLFDSICNNNWFINTSLILFLNKKDLLAEKIRRIPLTICFPEYKGQNTYEEAAVYIQRQFEDLNRNKETKEIYSHFTCATDTSNIQFVFDAVTDVIIQNNLKYIGLC

SEQ ID NO: 8002 - protein, 359 aa, Homo sapiens
MTLESIMACCLSEEAKEARRINDEIERQLRRDKRDARRELKLLLLGTGESGKSTFIKQMRIIHGSGYSDEDKRGFTKLVYQNIFTAMQAMIRAMDTLKIPYKYEHNKAHAQLVREVDVEKVSAFENPYVDAIKSLWNDPGIQECYDRRREYQLSDSTKYYLNDLDRVADPAYLPTQQDVLRVRVPTTGIIEYPFDLQSVIFRMVDVGGQRSERRKWIHCFENVTSIMFLVALSEYDQVLVESDNENRMEESKALFRTIITYPWFQNSSVILFLNKKDLLEEKIMYSHLVDYFPEYDGPQRDAQAAREFILKMFVDLNPDSDKINYSHFTCATDTENIRFVFAAVKDTILQLNLKEYNLV

SEQ ID NO: 8003 - protein, 355 aa, Homo sapiens [sequence omitted]

SEQ ID NO: 8004 - protein, 374 aa, Homo sapiens
MARSLTWRCCPWCLTEDEKAAARVDQEINRILLEQKKQDRGELKLLLLGPGESGKSTFIKQMRIIHGAGYSEEERKGFRPLVYQNIFVSMRAMIEAMERLQIPFSRPESKHHASLVMSQDPYKVTTFEKRYAAAMQWLWRDAGIRACYERRREFHLLDSAVYYLSHLERITEEGYVPTAQDVLRSRMPTTGINEYCFSVQKTNLRIVDVGGQKSERKKWIHCFENVIALIYLASLSEYDQCLEENNQENRMKESLALFGTILELPWFKSTSVILFLNKTDILEEKIPTSHLATYFPSFQGPKQDAEAAKRFILDMYTRMYTGCVDGPEGSKKGARSRRLFSHYTCATDTQNIRKVFKDVRDSVLARYLDEINLL

SEQ ID NO: 8005 - protein, 374 aa, Homo sapiens
MARSLTWRCCPWCLTEDEKAAARVDQEINRILLEQKKQDRGELKLLLLGPGESGKSTFIKQMRIIHGAGYSEEERKGFRPLVYQNIFVSMRAMIEAMERLQIPFSRPESKHHASLVMSQDPYKVTTFEKRYAAAMQWLWRDAGIRAYYERRREFHLLDSAVYYLSHLERITEEGYVPTAQDVLRSRMPTTGINEYCFSVQKTNLRIVDVGGQKSERKKWIHCFENVIALIYLASLSEYDQCLEENNQENRMKESLALFGTILELPWFKSTSVILFLNKTDILEEKIPTSHLATYFPSFQGPKQDAEAAKRFILDMYTRMYTGCVDGPEGSKKGARSRRLFSHYTCATDTQNIRKVFKDVRDSVLARYLDEINLL

SEQ ID NO: 8006 - protein, 377 aa, Homo sapiens
MADFLPSRSVLSVCFPGCLLTSGEAEQQRKSKEIDKCLSREKTYVKRLVKILLLGAGESGKSTFLKQMRIIHGQDFDQRAREEFRPTIYSNVIKGMRVLVDAREKLHIPWGDNSNQQHGDKMMSFDTRAPMAAQGMVETRVFLQYLPAIRALWADSGIQNAYDRRREFQLGESVKYFLDNLDKLGEPDYIPSQQDILLARRPTKGIHEYDFEIKNVPFKMVDVGGQRSERKRWFECFDSVTSILFLVSSSEFDQVLMEDRLTNRLTESLNIFETIVNNRVFSNVSIILFLNKTDLLEEKVQIVSIKDYFLEFEGDPHCLRDVQKFLVECFRNKRRDQQQKPLYHHFTTAINTENIRLVFRDVKDTILHDNLKQLMLQ

SEQ ID NO: 8007 - protein, 377 aa, Homo sapiens
MADFLPSRSVLSVCFPGCLLTSGEAEQQRKSKEIDKCLSREKTYVKRLVKILLLGAGESGKSTFLKQMRIIHGQDFDQRAREEFRPTIYSNVIKGMRVLVDAREKLHIPWGDNSNQQHGDKMMSFDTRAPMAAQGMVETRVFLQYLPAIRALWADSGIQNAYDRRREFQLGESVKYFLDNLDKLGEPDYIPSQQDILLARRPTKGIHEYDFEIKNVPFKMLDVGGQRSERKRWFECFDSVTSILFLVSSSEFDQVLMEDRLTNRLTESLNIFETIVNNRVFSNVSIILFLNKTDLLEEKVQIVSIKDYFLEFEGDPHCLRDVQKFLVECFRNKRRDQQQKPLYHHFTTAINTENIRLVFRDVKDTILHDNLKQLMLQ

SEQ ID NO: 8008 - protein, 381 aa, Homo sapiens [sequence omitted]

SEQ ID NO: 8009 - protein, 381 aa, Homo sapiens
MSGVVRTLSRCLLPAEAGGARERRAGSGARDAEREARRRSRDIDALLARERRAVRRLVKILLLGAGESGKSTFLKQMRIIHGREFDQKALLEFRDTIFDNILKGSRVLVDARDKLGIPWQYSENEKHGMFLMAFENKAGLPVEPATFQLYVPALSALWRDSGIREAFSRRSEFQLGESVKYFLDNLDRIGQLNYFPSKQDILLARKATKGIVEHDFVIKKIPFKMVDVGGQRSQRQKWFQCFDGITSILFMVSSSEYDQVLMEDRRTNRLVESMNIFETIVNNKLFFNVSIILFLNKMDLLVEKVKTVSIKKHFPDFRGDPHQLEDVQRYLVQCFDRKRRNRSKPLFHHFTTAIDTENVRFVFHAVKDTILQENLKDIMLQ

SEQ ID NO: 8010 - protein, 381 aa, Homo sapiens
MSGVVRTLSRCLLPAEAGGARERRAGSGARDAEREARRRSRDIDALLARERRAVRRLVKILLLGAGESGKSTFLKQMRIIHGREFDQKALLEFRDTIFDNILKGSRVLVDARDKLGIPWQYSENEKHGMFLMAFENKAGLPVEPATFQLYVPALSALWRDSGIREAFSRRSEFQLGESVKYFLDNLDRIGQLNYFPSKQDILLARKATKGIVEHDFVIKKIPFKMVDVGGQRSQRQKWFQCFDGITSILFMVSSSEYDQVLMEDRRTNRLVESMNIFETIVNNKLFFNVSIILFLNKMDLLVEKVKTVSIKKHFPDFRGDPHRLEDVQRYLVQCFDRKRRNRSKPLFHHFTTAIDTENVRFVFHAVKDTILQENLKDIMLQ

SEQ ID NO: 8011 - protein, 458 aa, Homo sapiens
MGLCYSLRPLLFGGPGDDPCAASEPPVEDAQPAPAPALAPVRAAARDTARTLLPRGGEGSPACARPKADKPKEKRQRTEQLSAEEREAAKEREAVKEARKVSRGIDRMLRDQKRDLQQTHRLLLLGAGESGKSTIVKQMRILHVNGFNPEEKKQKILDIRKNVKDAIVTIVSAMSTIIPPVPLANPENQFRSDYIKSIAPITDFEYSQEFFDHVKKLWDDEGVKACFERSNEYQLIDCAQYFLERIDSVSLVDYTPTDQDLLRCRVLTSGIFETRFQVDKVNFHMFDVGGQRDERRKWIQCFNDVTAIIYVAACSSYNMVIREDNNTNRLRESLDLFESIWNNRWLRTISIILFLNKQDMLAEKVLAGKSKIEDYFPEYANYTVPEDATPDAGEDPKVTRAKFFIRDLFLRISTATGDGKHYCYPHFTCAVDTENIRRVFNDCRDIIQRMHLKQYELL

SEQ ID NO: 8012 - protein, 381 aa, Homo sapiens
MGCLGGNSKTTEDQGVDEKERREANKKIEKQLQKERLAYKATHRLLLLGAGESGKSTIVKQMRILHVNGFNPEEKKQKILDIRKNVKDAIVTIVSAMSTIIPPVPLANPENQFRSDYIKSIAPITDFEYSQEFFDHVKKLWDDEGVKACFERSNEYQLIDCAQYFLERIDSVSLVDYTPTDQDLLRCRVLTSGIFETRFQVDKVNFHMFDVGGQRDERRKWIQCFNDVTAIIYVAACSSYNMVIREDNNTNRLRESLDLFESIWNNRWLRTISIILFLNKQDMLAEKVLAGKSKIEDYFPEYANYTVPEDATPDAGEDPKVTRAKFFIRDLFLRISTATGDGKHYCYPHFTCAVDTENIRRVFNDCRDIIQRMHLKQYELL

SEQ ID NO: 8013 - protein, 249 aa, Homo sapiens
MVCDVVSRMEDTEPFSAELLSAMMRLWGDSGIQECFNRSREYQLNDSAKYYLDSLDRIGAADYQPTEQDILRTRVKTTGIVETHFTFKNLHFRLFDVGGQRSERKKWIHCFEDVTAIIFCVALSGYDQVLHEDETTNRMHESLMLFDSICNNKFFIDTSIILFLNKKDLFGEKIKKSPLTICFPEYTGPNTYEDAAAYIQAQFESKNRSPNKEIYCHMTCATDTNNIQVVFDAVTDIIIANNLRGCGLY

SEQ ID NO: 8014 - protein, 351 aa, Homo sapiens
MLRDQKRDLQQTHRLLLLGAGESGKSTIVKQMRILHVNGFNPEEKKQKILDIRKNVKDAIVTIVSAMSTIIPPVPLANPENQFRSDYIKSIAPITDFEYSQEFFDHVKKLWDDEGVKACFERSNEYQLIDCAQYFLERIDSVSLVDYTPTDQDLLRCRVLTSGIFETRFQVDKVNFHMFDVGGQRDERRKWIQCFNDVTAIIYVAACSSYNMVIREDNNTNRLRESLDLFESIWNNRWLRTISIILFLNKQDMLAEKVLAGKSKIEDYFPEYANYTVPEDATPDAGEDPKVTRAKFFIRDLFLRISTATGDGKHYCYPHFTCAVDTENIRRVFNDCRDIIQRMHLKQYELL

SEQ ID NO: 8015 - protein, 379 aa, Homo sapiens
MGCLGNSKTEDQRNEEKAQREANKKIEKQLQKDKQVYRATHRLLLLGAGESGKSTIVKQMRILHVNGFNGDEKATKVQDIKNNLKEAIETIVAAMSNLVPPVELANPENQFRVDYILSVMNVPDFDFPPEFYEHAKALWEDEGVRACYERSNEYQLIDCAQYFLDKIDVIKQADYVPSDQDLLRCRVLTSGIFETKFQVDKVNFHMFDVGGQRDERRKWIQCFNDVTAIIFVVASSSYNMVIREDNQTNRLQEALNLFKSIWNNRWLRTISVILFLNKQDLLAEKVLAGKSKIEDYFPEFARYTTPEDATPEPGEDPRVTRAKYFIRDEFLRISTASGDGRHYCYPHFTCAVDTENIRRVFNDCRDIIQRMHLRQYELL

SEQ ID NO: 8016 - protein, 380 aa, Homo sapiens
MGCLGNSKTEDQRNEEKAQREANKKIEKQLQKDKQVYRATHRLLLLGAGESGKSTIVKQMRILHVNGFNGDSEKATKVQDIKNNLKEAIETIVAAMSNLVPPVELANPENQFRVDYILSVMNVPDFDFPPEFYEHAKALWEDEGVRACYERSNEYQLIDCAQYFLDKIDVIKQADYVPSDQDLLRCRVLTSGIFETKFQVDKVNFHMFDVGGQRDERRKWIQCFNDVTAIIFVVASSSYNMVIREDNQTNRLQEALNLFKSIWNNRWLRTISVILFLNKQDLLAEKVLAGKSKIEDYFPEFARYTTPEDATPEPGEDPRVTRAKYFIRDEFLRISTASGDGRHYCYPHFTCAVDTENIRRVFNDCRDIIQRMHLRQYELL

SEQ ID NO: 8017 - protein, 394 aa, Homo sapiens [sequence omitted]

SEQ ID NO: 8018 - protein, 342 aa, Homo sapiens
GATHRLLLLGAGESGKSTIVKQMRILHVNGFNGDEKATKVQDIKNNLKEAIETIVAAMSNLVPPVELANPENQFRVDYILSVMNVPDFDFPPEFYEHAKALWEDEGVRACYERSDEYQLIDCAQYFLDKIDVIKQADYVPSDQDLLRCRVLTSGIFETKFQVDKVNFHMFDVGGQRDERRKWIQCFNDVTAIIFVVASSSYNMVIREDNQTNRLQEALNLFKSIWNNRWLRTISVILFLNKQDLLAEKVLAGKSKIEDYFPEFARYTTPEDATPEPGEDPRVTRAKYFIRDEFLRISTASGDGRHYCYPHFTCAVDTENIRRVFNDCRDIIQRMHLRQYELL

SEQ ID NO: 8019 - protein, 394 aa, Homo sapiens
MGCLGNSKTEDQRNEEKAQREANKKIEKQLQKDKQVYRATHRLLLLGAGESGKSTIVKQMRILHVNGFNGEGGEEDPQAARSNSDGEKATKVQDIKNNLKEAIETIVAAMSNLVPPVELANPENQFRVDYILSVMNVPDFDFPPEFYEHAKALWEDEGVRACYERSNEYQLIDCAQYFLDKIDVIKQADYVPSDQDLLRCRVLTSGIFETKFQVDKVNFHMFDVGGQRDERRKWIQCFNDVTAIIFVVASSSYNMVIREDNQTNRLQEALNLFKSIWNNRWLRTISVILFLNKQDLLAEKVLAGKSKIEDYFPEFARYTTPEDATPEPGEDPRVTRAKYFIRDEFLRISTASGDGRHYCYPHFTCAVDTENIRRVFNDCRDIIQRMHLRQYELL

SEQ ID NO: 8020 - protein, 909 aa, Homo sapiens
MQALRLRPALMEPGAFSGARPGLGGYSPPPEEAMPFEFDQPAQRGCSQLLLQVPDLAPGGPGAAGVPGAPPEEPQALRPAKAGSRGGYSPPPEETMPFELDGEGFGDDSPPPGLSRVIAQVDGSSQFAAVAASSAVRLTPAANAPPLWVPGAIGSPSQEAVRPPSNFTGSSPWMEISGPPFEIGSAPAGVDDTPVNMDSPPIALDGPPIKVSGAPDKRERAERPPVEEEAAEMEGAADAAEGGKVPSPGYGSPAAGAASADTAARAAPAAPADPDSGATPEDPDSGTAPADPDSGAFAADPDSGAAPAAPADPDSGAAPDAPADPDSGAAPDAPADPDAGAAPEAPAAPAAAETRAAHVAPAAPDAGAPTAPAASATRAAQVRRAASAAPASGARRKIHLRPPSPEIQAADPPTPRPTRASAWRGKSESSRGRRVYYDEGVASSDDDSSGDESDDGTSGCLRWFQHRRNRRRRKPQRNLLRNFLVQAFGGCFGRSESPQPKASRSLKVKKVPLAEKRRQMRKEALEKRAQKRAEKKRSKLIDKQLQDEKMGYMCTHRLLLLGAGESGKSTIVKQMRILHVNGFNGEGGEEDPQAARSNSDGEKATKVQDIKNNLKEAIETIVAAMSNLVPPVELANPENQFRVDYILSVMNVPDFDFPPEFYEHAKALWEDEGVRACYERSNEYQLIDCAQYFLDKIDVIKQADYVPSDQDLLRCRVLTSGIFETKFQVDKVNFHMFDVGGQRDERRKWIQCFNDVTAIIFVVASSSYNMVIREDNQTNRLQEALNLFKSIWNNRWLRTISVILFLNKQDLLAEKVLAGKSKIEDYFPEFARYTTPEDATPEPGEDPRVTRAKYFIRDEFLRISTASGDGRHYCYPHFTCAVDTENIRRVFNDCRDIIQRMHLRQYELL

SEQ ID NO: 8021 - protein, 395 aa, Homo sapiens
MGCLGNSKTEDQRNEEKAQREANKKIEKQLQKDKQVYRATHRLLLLGAGESGKSTIVKQMRILHVNGFNGEGGEEDPQAARSNSDGSEKATKVQDIKNNLKEAIETIVAAMSNLVPPVELANPENQFRVDYILSVMNVPDFDFPPEFYEHAKALWEDEGVRACYERSNEYQLIDCAQYFLDKIDVIKQADYVPSDQDLLRCRVLTSGIFETKFQVDKVNFHMFDVGGQRDERRKWIQCFNDVTAIIFVVASSSYNMVIREDNQTNRLQEALNLFKSIWNNRWLRTISVILFLNKQDLLAEKVLAGKSKIEDYFPEFARYTTPEDATPEPGEDPRVTRAKYFIRDEFLRISTASGDGRHYCYPHFTCAVDTENIRRVFNDCRDIIQRMHLRQYELL

SEQ ID NO: 8022 - protein, 384 aa, Homo sapiens
QRNEEKAQREANKKIEKQLQKDKQVYRATHRLLLLGAGESGKSTIVKQMRILHVNGFNGEGGEEDPQAARSNSDGSEKATKVQDIKNNLKEAIETIVAAMSNLVPPVELANPENQFRVDYILSVMNVPDFDFPPEFYEHAKALWEDEGVRACYERSNEYQLIDCAQYFLDKIDVIKQADYVPSDQDLLRCRVLTSGIFETKFQVDKVNFHMFDVGGQRDQRRKWIQCFNDVTAIIFVVASSSYNMVIREDNQTNRLQEALNLFKSIWNNRWLRTISVILFLNKQDLLAEKVLAGKSKIEDYFPEFARYTTPEDATPEPGEDPRVTRAKYFIRDEFLRISTASGDGRHYCYPHFTCAVDTENIRRVFNDCRDIIQRMHLRQYELL

SEQ ID NO: 8023 - protein, 419 aa, Homo sapiens
PVRSSAPRRGHSVASAPRSGLRQVAGRRGAALPCSLAPGCGAAAGASPCPGAGRRRAAGGRCLACECTSLTCAGESGKSTIVKQMRILHVNGFNGEGGEEDPQAARSNSDGEKATKVQDIKNNLKEAIETIVAAMSNLVPPVELANPENQFRVDYILSVMNVPDFDFPPEFYEHAKALWEDEGVRACYERSNEYQLIDCAQYFLDKIDVIKQADYVPSDQDLLRCRVLTSGIFETKFQVDKVNFHMFDVGGQRDERRKWIQCFNDVTAIIFVVASSSYNMVIREDNQTNRLQEALNLFKSIWNNRWLRTISVILFLNKQDLLAEKVLAGKSKIEDYFPEFARYTTPEDATPEPGEDPRVTRAKYFIRDEFLRISTASGDGRHYCYPHFTCAVDTENIRRVFNDCRDIIQRMHLRQYELL

SEQ ID NO: 8024 - protein, 335 aa, Homo sapiens
MRILHVNGFNGEGGEEDPQAARSNSDGEKATKVQDIKNNLKEAIETIVAAMSNLVPPVEVANPENQFRVDYILSVMNVPDFDFPPEFYEHAKALWEDEGVRACYERSNEYQLIDCAQYFLDKIDVIKQADYVPSDQDLLRCRVLTSGIFETKFQVDKVNFHMFDVGGQRDERRKWIQCFNDVTAIIFVVASSSYNMVIREDNQTNRLQEALNLFKSIWNNRWLRTISVILFLNKQDLLAEKVLAGKSKIEDYFPEFARYTTPEDATPEPGEDPRVTRAKYFIRDEFLRISTASGDGRHYCYPHFTCAVDTENIRRVFNDCRDIIQRMHLRQYELL

SEQ ID NO: 8025 - protein, 308 aa, Homo sapiens
EKATKVQDIKNNLKEAIETIVAAMSNLVPPVELANPENQFRVDYILSVMNVPDFDFPPEFYEHAKALWEDEGVRACYERSNEYQLIDCAQYFLDKIDVIKQADYVPSDQDLLRCRVLTSGIFETKFQVDKVNFHMFDVGGQRDERRKWIQCFNDVTAIIFVVASSSYNMVIREDNQTNRLQEALNLFKSIWNNRWLRTISVILFLNKQDLLAEKVLAGKSKIEDYFPEFARYTTPEDATPEPGEDPRVTRAKYFIRDEFLRISTASGDGRHYCYPHFTCAVDTENIRRVFNDCRDIIQRMHLRQYELL

SEQ ID NO: 8026 - protein, 266 aa, Homo sapiens
MQAMIRAMETLKILYKLEQNKANALQIREVDVEKVTTFEHRYVSAIKTLWDDPGIHECYDRRREYQLSDSAKYCVTDVDCIATSSYLPTQQDVLRVRVPTTGVFRPGEHHLQDGGCWGTARKWIHCFENLTSIPFLVALSEYDQVLVESDNENRMEESKALFRTIIDYPWFQNSPVITFLNKKDLLEDNILYSHMVDYFPEFEGPQQDAQAAREFILKMLVDMNPDSDKIIDSHFTYATDTKNIRFVFAAVKDTILQLSLKEYNLV

SEQ ID NO: 8027 - protein, 157 aa, Homo sapiens
MFDVGGQRSERKKWIHCFEGVTAIIFCVALSAYDLVLAEDEEMNRMHESMKLFDSICNNKWFTDTSIILFLNKKDLFEEKITHSPLTICFPEYTGANKYDEAASYIQSKFEDLNKRKDTKEIYTHFTCATDTKNVQFVFDAVTDVIIKNNLKDCGLF

SEQ ID NO: 8028 - protein, 242 aa, Homo sapiens
MSGVVRTLSRCLLPAEAGGARERRAGSGARDAEREARRRSRDIDALLARERRAVRRLVKILLLGAGESGKSTFLKQMRIIHGREFDQKALLEFRDTIFDNILKGSRVLVDARDKLGIPWQYSENEKHGMFLMAFENKAGLPVEPATFQLYVPALSALWRDSGIREAFSRRSEFQLGESVKYFLDNLDRIGQLNYFPSKQDILLARKATKGIVEHDFVIKKIPFKMVDVGGQRSQRQKWFQCF

SEQ ID NO: 8029 - protein, 197 aa, Homo sapiens
MGCTVSAEDKAAAERSKMIDKNLREDGEKAAREVKLLLLGAGESGKSTIVKQMKIIHEDGYSEEECRQYRAVVYSNTIQSIMAIVKAMGNLQIDFADPSRADDARQLFALSCTAEEQGVLPDDLSGVIRRLWADHGVQACFGRSREYQLNDSAAYYLNDLERIAQSDYIPTQQDVLRTRVKTTGIVETHFTFKDLHF

SEQ ID NO: 8030 - protein, 156 aa, Homo sapiens [sequence omitted]

SEQ ID NO: 8031 - protein, 155 aa, Homo sapiens
RIIHGAGYSEEDKRGFTKLVYQNIFTAMQAMIRAMETLKILYKLEQNKANALQIREVDVEKVTTFEHRYVSAIKTLWDDPGIHECYDRRREYQLSDSAKYCVTDVDCIATSSYLPTQQDVLRVRVPTTGVIEYPFDLENIIFRMADVGGQRSAQR

SEQ ID NO: 8032 - protein, 128 aa, Homo sapiens
MQAMIRAMETLKILYKLEQNKANALQIREVDVEKVTTFEHRYVSAIKTLWDDPGIHECYDRRREYQLSDSAKYCVTDVDCIATSSYLPTQQDVLRVRVPTTGVIEYPFDLENIIFRMADVGGQRSAQR

SEQ ID NO: 8033 - protein, 101 aa, Homo sapiens
MGCTLSAEDKAAVERSKMIDRNLREDGEKAAREVKLLLLGAGESGKSTIVKQMKIIHEAGYSEEECKQYKAVVYSNTIQSIIAIIRAMGRLKIDFGDSARA

SEQ ID NO: 8034 - protein, 350 aa, Canis familiaris
MGAGASAEEKHSRELEKKLKEDAEKDARTVKLLLLGAGESGKSTIVKQMKIIHQDGYSLEECLEFIAIIYGNTLQSILAIVRAMTTLNIQYGDSARQDDARKLMHMADTIEEGTMPKEMSDIIQRLWKDSGIQACFERASEYQLNDSAGYYLSDLERLVTPGYVPTEQDVLRSRVKTTGIIETQFSFKDLNFRMFDVGGQRSERKKWIHCFEGVTCIIFIAALSAYDMVLVEDDEVNRMHESLHLFNSICNHRYFATTSIVLFLNKKDVFSEKIKKAHLSICFPDYDGPNTYEDAGNYIKVQFLELNMRRDVKEIYSHMTCATDTQNVKFVFDAVTDIIIKENLKDCGLF

SEQ ID NO: 8035 - protein, 355 aa, Canis familiaris
MGCTVSAEDKAAAERSKMIDKNLREDGEKAAREVKLLLLGAGESGKSTIVKQMKIIHEDGYSEEECRQYRAVVYSNTIQSIMAIVKAMGNLQIDFDDPSRADDARQLFALSCTAEEQGVLPEDLSCVIRRLWADNGVQACFGRSREYQLNDSAAYYLNDLERIAQSDYIPTQQDVLRTRVKTTGIVETHFTFKDLHFKMFDVGGQRSERKKWIHCFEGVTAIIFCVALSAYDLVLAEDEEMNRMHESMKLFDSICNNKWFTDTSIILFLNKKDLFEEKITHSPLTICFPEYTGANKYEEAASYIQSKFEDLNKRKDTKEIYTHFTCATDTKNVQFVFDAVTDVIIKNNLKDCGLF

SEQ ID NO: 8036 - protein, 353 aa, Canis familiaris
MACCLSEEAKEARRINDEIERQLRRDKRDARRELKLLLLGTGESGKSTFIKQMRIIHGSGYSDEDKRGFTKLVYQNIFTAMQAMIRAMDTLKIPYKYEHNKAHAQLVREVDVEKVSAFENPYVDAIKSLWNDPGIQECYDRRREYQLSDSTKYYLNDLDRVADPAYLPTQQDVLRVRVPTTGIIEYPFDLQSVIFRMVDVGGQRSERRKWIHCFENVTSIMFLVALSEYDQVLVESDNENRMEESKALFRTIITYPWFQNSSVILFLNKKDLLEEKIMYSHLVDYFPEYDGPQRDAQAAREFILKMFVDLNPDSDKIIYSHFTCATDTENIRFVFAAVKDTILQLNLKEYNLV

SEQ ID NO: 8037 - protein, 359 aa, Canis familiaris
MTLESIMACCLSEEAKEARRINDEIERQLRRDKRDARRELKLLLLGTGESGKSTFIKQMRIIHGSGYSDEDKRGFTKLVYQNIFTAMQAMIRAMDTLKIPYKYEHNKAHAQLVREVDVEKVSAFENPYVDAIKSLWNDPGIQECYDRRREYQLSDSTKYYLNDLDRVADPAYLPTQQDVLRVRVPTTGIIEYPFDLQSVIFRMVDVGGQRSERRKWIHCFENVTSIMFLVALSEYDQVLVESDNENRMEESKALFRTIITYPWFQNSSVILFLNKKDLLEEKIMYSHLVDYFPEYDGPQRDAQAAREFILKMFVDLNPDSDKIIYSHFTCATDTENIRFVFAAVKDTILQLNLKEYNLV

SEQ ID NO: 8038 - protein, 198 aa, Canis familiaris
LLGTGESGKSTFIKQMRIIHGAGYSEEDKRGFTKLVYQNIFTAMQAMIRAMETLKILYKYEQNKANALLIREVDVEKVTTFEHRYVHAIKTLWDDPGIQECYDRRREYQLSDSAKYYLADVDRIATSGYLPTQQDVLRVRVPTTGIIEYPFDLENIIFRMVDVGGQRSERRKWIHCFENVTSIMFLVALSEYDHVLVE

SEQ ID NO: 8039 - protein, 397 aa, Sus scrofa
MGCLGNSKTEDQRNEEKAQREANKKIEKQLQKDKQVYRATHRLLLLGAGESGKSTIVKQMRILHVNGFNGDEKATKVQDIKNNLKEAIETIVAAMSNLVPPVELANPENQFRVDYILSVMNVPDFDFPPEFYEHAKALWEDEGVRACYERSNEYQLIDCAQYFLDKIDVIKQDDYVPSDQDLLRCRVLTSGIFETKFQVDKVNFHMFDVGGQRDERRKWIQCFNDVTAIIFVVASSSYNMVIREDNQTNRLQEALNLFKSIWNNRWLRTISVILFLNKQDLLAEKVLAGKSKIELFVLDDRLFQERPFSFIEDYFPEFARYTTPEDATPEPGEDPRVTRAKYFIRDEFLRISTASGDGRHYCYPHFTCAVDTENIRRVFNDCRDIIQRMHLRQYELL

SEQ ID NO: 8040 - protein, 188 aa, Sus scrofa
GVQACFGRSREYQLNDSAAYYLNDLERIAQSDYIPTQQDVLRTRVKTTGIVETHFTFKDLHFKMFDVGGQRSERKKWIHCFEGVTAIIFCVALSAYDLVLAEDEEMNRMHESMKLFDSICNNKWFTDTSIILFLNKKDLFEEKITHSPLTICFPEYTGANKYDEAASYIQSKFEDLNKRKDTKEIYTH

SEQ ID NO: 8041 - protein, 209 aa, Sus scrofa
KQMKIIHEAGYSEEECKQYKAVVYSNTIQSIIAIIRAMGRLKIDFGDSARADDARQLFVLAGAAEEGFMTAELAGVIKRLWKDSGVQACFNRSREYQLNDSAAYYLNDLDRIAQPNYIPTQQDVLRTRVKTTGIVETHFTFKDLHFKMFDVGGQRSERKKWILCFEGVTAIIFCVALSDYDLVLAEDEEMNRMHESMKLFDSICNNKWF

SEQ ID NO: 8042 - protein, 133 aa, Sus scrofa
DSASYYLNDVDRISQTNYIPTQQDVLRTRVKTTGIVETHFTFKDLYFKMFDVGGQRSERKKWIHCFGGVTAIIFCVALSDYDLVLAEDEEMNRMHESMKLFDSIWYNKWFTDNSIILFLNQKDLFEEKIKRSP

SEQ ID NO: 8043 - protein, 354 aa, Bos taurus
MGCTLSAEDKAAVERSKMIDRNLREDGEKAAREVKLLLLGAGESGKSTIVKQMKIIHEAGYSEEECKQYKAVVYSNTIQSIIAIIRAMGRLKIDFGDSARADDARQLFVLAGAAEEGFMTAELAGVIKRLWKDSGVQACFNRSREYQLNDSAAYYLNDLDRIAQPNYIPTQQDVLRTRVKTTGIVETHFTFKDLHFKMFDVGGQRSERKKWIHCFEGVTAIIFCVALSDYDLVLAEDEEMNRMHESMKLFDSICNNKWFTDTSIILFLNKKDLFEEKIKKSPLTICYPEYAGSNTYEEAAAYIQCQFEDLNKRKDTKEIYTHFTCATDTKNVQFVFDAVTDVIIKNNLKDCGLF

SEQ ID NO: 8044 - protein, 350 aa, Bos taurus
MGAGASAEEKHSRELEKKLKEDAEKDARTVKLLLLGAGESGKSTIVKQMKIIHQDGYSLEECLEFIAIIYGNTLQSILAIVRAMTTLNIQYGDSARQDDARKLMHMADTIEEGTMPKEMSDIIQRLWKDSGIQACFDRASEYQLNDSAGYYLSDLERLVTPGYVPTEQDVLRSRVKTTGIIETQFSFKDLNFRMFDVGGQRSERKKWIHCFEGVTCIIFIAALSAYDMVLVEDDEVNRMHESLHLFNSICNHRYFATTSIVLFLNKKDVFSEKIKKAHLSICFPDYNGPNTYEDAGNYIKVQFLELNMRRDVKEIYSHMTCATDTQNVKFVFDAVTDIIIKENLKDCGLF

SEQ ID NO: 8045 - protein, 354 aa, Bos taurus
MGSGASAEDKELAKRSKELEKKLQEDADKEAKTVKLLLLGAGESGKSTIVKQMKIIHQDGYSPEECLEYKAIIYGNVLQSILAIIRAMPTLGIDYAEVSCVDNGRQLNNLADSIEEGTMPPELVEVIRKLWKDGGVQACFDRAAEYQLNDSASYYLNQLDRITAPDYLPNEQDVLRSRVKTTGIIETKFSVKDLNFRMFDVGGQRSERKKWIHCFEGVTCIIFCAALSAYDMVLVEDDEVNRMHESLHLFNSICNHKFFAATSIVLFLNKKDLFEEKIKKVHLSICFPEYDGNNSYEDAGNYIKSQFLDLNMRKDVKEIYSHMTCATDTQNVKFVFDAVTDIIIKENLKDCGLF

SEQ ID NO: 8046 - protein, 324 aa, Bos taurus [sequence omitted]

SEQ ID NO: 8047 - protein, 354 aa, Bos taurus
MGCTLSAEERAALERSKAIEKNLKEDGISAAKDVKLLLLGAGESGKSTIVKQMKIIHEDGFSGEDVKQYKPVVYSNTIQSLAAIVRAMDTLGIEYGDKERKADAKMVCDVVSRMEDTEPFSPELLSAMMRLWGDSGIQECFNRSREYQLNDSAKYYLDSLDRIGAADYQPTEQDILRTRVKTTGIVETHFTFKNLHFRLFDVGGQRSERKKWIHCFEDVTAIIFCVALSGYDQVLHEDETTNRMHESLMLFDFICNNKFFIDTSIILFLNKKDLFGEKIKKSPLTICFPEYTGSNTYEDAAAYIQAQFESKNRSPNKEIYCHMTCATDTNNIQVVFDAVTDIIIANNLRGCGLY

SEQ ID NO: 8048 - protein, 354 aa, Bos taurus
MGCTLSAEERAALERSKAIEKNLKEDGISAAKDVKLLLLGAGESGKSTIVKQMKIIHEDGFSGEDVKQYKPVVYSNTIQSLAAIVRAMDTLGIEYGDKERKADAKMVCDVVSRMEDTEPFSPELLSAMMRLWGDSGIQECFNRSREYQLNDSAKYYLDSLDRIGAADYQPTEQDILRTRVKTTGIVETHFTFKNLHFRLFDVGGQRSERKKWIHCFEDVTAIIFCVALSGYDQVLHEDETTNRMHESLMLFDSICNNKFFIDTSIILFLNKKDLFGEKIKKSPLTICFPEYTGSNTYEDAAAYIQAQFESKNRSPNKEIYCHMTCATDTNNIQVVFDAVTDIIIANNLRGCGLY

SEQ ID NO: 8049 - protein, 354 aa, Bos taurus
MGCTLSAEERAALERSKAIEKNLKEDGISAAKDVKLLLLGAGESGKSTIVKQMKIIHEDGFSGEDVKQYKPVVYSNTIQSLAAIVRAMDTLGIEYGDKERKADAKMVCDVVSRMEDTEPFSPELLSAMMRLWGDSGIQECFNRSREYQLNDSAKYYLDSLDRIGAADYQPTEQDILRTRVKTTGIVETHFTFKNLHFRLFDVGGQRSERKKWIHCFEDVTAIIFCVALSGYDQVLHEDETTNRMHESLMLFDSICNNKFFIDISIILFLNKKDLFGEKIKKSPLTICFPEYTGSNTYEDAAAYIQAQFESKNRSPNKEIYCHMTCATDTNNIQVVFDAVTDIIIANNLRGCGLY

SEQ ID NO: 8050 - protein, 355 aa, Bos taurus
MAGCCCLSAEEKESQRISAEIERQLRRDKKDARRELKLLLLGTGESGKSTFIKQMRIIHGSGYSDEDRKGFTKLVYQNIFTAMQAMIRAMDTLKIQYVCEQNKENAQLIREVEVDKVSTLSRDQVEAIKQLWQDPGIQECYDRRREYQLSDSAKYYLTDIDRIAMPAFVPTQQDVLRVRVPTTGIIEYPFDLENIIFRMVDVGGQRSERRKWIHCFESVTSIIFLVALSEYDQVLAECDNENRMEESKALFKTIITYPWFLNSSVILFLNKKDLLEEKIMYSHLISYFPEYTGPKQDVKAARDFILKLYQDQNPDKEKVIYSHFTCATDTENIRFVFAAVKDTILQLNLREFNLV

SEQ ID NO: 8051 - protein, 359 aa, Bos taurus
MTLESMMACCLSDEVKESKRINAEIEKQLRRDKRDARRELKLLLLGTGESGKSTFIKQMRIIHGAGYSEEDKRGFTKLVYQNIFTAMQAMIRAMETLKILYKYEQNKANALLIREVDVEKVTTFEHRYVSAIKTLWNDPGIQECYDRRREYQLSDSAKYYLTDVDRIATSGYLPTQQDVLRVRVPTTGIIEYPFDLENIIFRMVDVGGQRSERRKWIHCFENVTSIMFLVALSEYDQVLVESDNENRMEESKALFRTIVTYPWFQNSSVILFLNKKDLLEDKILHSHLVDYFPEFDGPQRDAQAAREFILKMFVDLNPDSDKIIYSHFTCATDTENIRFVFAAVKDTILQLNLKEYNLV

SEQ ID NO: 8052 - protein, 353 aa, Bos taurus
MACCLSDEVKESKRINAEIEKQLRRDKRDARRELKLLLLGTGESGKSTFIKQMRIIHGAGYSEEDKRGFTKLVYQNIFTAMQAMIRAMETLKILYKYEQNKANALLIREVDVEKVTTFEHRYVSAIKTLWNDPGIQECYDRRREYQLSDSAKYYLTDVDRIATSGYLPTQQDVLRVRVPTTGIIEYPFDLENIIFRMVDVGGQRSERRKWIHCFENVTSIMFLVALSEYDQVLVESDNENRMEESKALFRTIVTYPWFQNSSVILFLNKKDLLEDKILHSHLVDYFPEFDGPQRDAQAAREFILKMFVDLNPDSDKIIYSHFTCATDTENIRFVFAAVKDTILQLNLKEYNLV

SEQ ID NO: 8053 - protein, 249 aa, Bos taurus
QLFVLAGSAEEGFMTAELAGVIKRLWKDSGVQACFNRSREYQLNDSAAYYLNDLDRIAQPNYIPTQQDVLRTRVKTTGIVETHFTFKDLHFKMFDVGGQRSERKKWIHCFEGVTAIIFCVALSDYDLVLAEDEEMNRMHESMKLFDSICNNKWFTDTSIILFLNKKDLFEEKIKKSPLTICYPEYAGSNTYEEAAAYIQCQFEDLNKRKDTKEIYTHFTCATDTNNVQFVFEAVTDVIIKNNLKDCGLF

SEQ ID NO: 8054 - protein, 388 aa, Bos taurus
MGCLGNSKTEDQRNEEKAQREANKKIEKQLQKDKQVYRATHRLLLLGAGESGKSTIVKQMRILHVNGFNGDGEKATKVQDIKNNLKEAIETIVAAMSNLVPPVELANPENQFRVDYILSVMNVPDFDFPPEFYEHAKALWEDEGVRACYERSNEYQLIDCAQYFLDKIDVIKQDDYVPSDQDLLRCRVLTSGIFETKFQVDKVNFHMFDVGGQRDERRKWIQCFNDVTAIIFVVASSSYNMVIREDNQTNRLQEALNLFKSIWNNRWLRTISVILFLNKQDLLAEKVLAGKSKIEDYFPEFARYTTPEDATPEPGEDPRVTRAKYFIRDEFLRISTASGDGRHYCYPHFTCAVDTENIRRVFNDCRDIIQRMHLRQYELLGGHHHHHH

SEQ ID NO: 8055 - protein, 380 aa, Bos taurus
MGCLGNSKTEDQRNEEKAQREANKKIEKQLQKDKQVYRATHRLLLLGAGESGKSTIVKQMRILHVNGFNGDGEKATKVQDIKNNLKEAIETIVAAMSNLVPPVELANPENQFRVDYILSVMNVPDFDFPPEFYEHAKALWEDEGVRACYERSNEYQLIDCAQYFLDKIDVIKQDDYVPSDQDLLRCRVLTSGIFETKFQVDKVNFHMFDVGGQRDERRKWIQCFNDVTAIIFVVASSSYNMVIREDNQTNRLQEALNLFKSIWNNRWLRTISVILFLNKQDLLAEKVLAGKSKIEDYFPEFARYTTPEDATPEPGEDPRVTRAKYFIRDEFLRISTASGDGRHYCYPHFTCAVDTENIRRVFNDCRDIIQRMHLRQYELL

SEQ ID NO: 8056 - protein, 173 aa, Bos taurus
DLSGVIRRLWADHGVQACFGRSREYQLNDSAAYYLNDLERIAQSDYIPTQQDVLRTRVKTTGIVETHFTFKDLHFKMFDVGGQRSERKKWIHCFEGVTAIIFCVALSAYDLVLAEDEEMNRMHESMKLFDSICNNKWFTDTSIILFLNKKDLFEEKIIHSPLTICFPEYTGAN

SEQ ID NO: 8057 - protein, 394 aa, Bos taurus
MGCLGNSKTEDQRNEEKGQREANKKIEKQLQKDKQVYRATHRLLLLGAGESGKSTIVKQMRILHVNGFNGEGGEEDPQAARSNSSGEKATKVQDIKNNLKEAIETIVAAMSNLVPPVELANPENQFRVDYILSVMNVPDFDFPPEFYEHAKALWEDEGVRACYERSNEYQLIDCAQYFLDKIDVIKQDDYVPSDQDLLRCRVLTSGIFETKFQVDKVNFHMFDVGGQRDERRKWIQCFNDVTAIIFVVASSSYNMVIREDNQTNRLQEALNLFKSIWNNRWLRTISVILFLNKQDLLAEKVLAGKSKIEDYFPEFARYTTPEDATPEPGEDPRVTRAKYFIRDEFLRISTASGDGRHYCYPHSTCAVDTENIRRVFNDCRDIIQRMHLRQYELL

SEQ ID NO: 8058 - protein, 394 aa, Bos taurus
MGCLGNSKTEDQRNEEKAQREANKKIEKQLQKDKQVYRATHRLLLLGAGESGKSTIVKQMRILHVNGFNGEGGEEDPQAARSNSDGEKATKVQDIKNNLKEAIETIVAAMSNLVPPVELANPENQFRVDYILSVMNVPDFDFPPEFYEHAKALWEDEGVRACYERSNEYQLIDCAQYFLDKIDVIKQDDYVPSDQDLLRCRVLTSGIFETKFQVDKVNFHMFDVGGQRDERRKWIQCFNDVTAIIFVVASSSYNMVIREDNQTNRLQEALNLFKSIWNNRWLRTISVILFLNKQDLLAEKVLAGKSKIEDYFPEFARYTTPEDATPEPGEDPRVTRAKYFIRDEFLRISTASGDGRHYCYPHFTCAVDTENIRRVFNDCRDIIQRMHLRQYELL

SEQ ID NO: 8059 - protein, 402 aa, Bos taurus
MGCLGNSKTEDQRNEEKAQREANKKIEKQLQKDKQVYRATHRLLLLGAGESGKSTIVKQMRILHVNGFNGGEGGEEDPNAKSNSDGEKATKVQDIKNNLKEAIETIVAAMSNLVPPVELANPENQFRVDYILSVMNVPDFDFPPEFYEHAKALWEDEGVRACYERSNEYQLIDCAQYFLDKIDVIKQDDYVPSDQDLLRCRVLTSGIFETKFQVDKVNFHMFDVGGQRDERRKWIQCFNDVTAIIFVVASSSYNMVIREDNQTNRLQEALNLFKSIWNNRWLRTISVILFLNKQDLLAEKVLAGKSKIEDYFPEFARYTTPEDATPEPGEDPRVTRAKYFIRDEFLRISTASGDGRHYCYPHFTCAVDTENIRRVFNDCRDIIQRMHLRQYELLGGHHHHHH

SEQ ID NO: 8060 - protein, 104 aa, Bos taurus
VPANDSAAYYLNDLERIAQSDYIPTQQDVLGTRVKTTGIVKTHFTFKDLHFKMFDVGGHGSERKKWIHCFEGVTAIIFCVALSAYDLVLTDVIIKNNLRNCGLF

SEQ ID NO: 8061 - protein, 374 aa, Oryctolagus cuniculus
MARSLAWRCCPWCLSEDEKAAARVDQEITRLLLEHRRQVRGELKLLLLGTGESGKSTFIKQMRIIHGAGYSEEDRKGFRPLVFQNIFLSVQAIIEAMDRLQIPYSRPESKLHASLVMSQDPYKVNTFETRYALAVQSLWRDAGVRACYERRREFHLLDSAVYYLSHLERIAEEGYVPTAQDVLRSRMPTTGINEYCFSVQKTNLRIVDVGGQKSERRKWIHCFEDVTALIFLASLSEYDQCLEENGQENRMQESLALFGTVLALPWFRATSVILFLNKTDILEDKVRTSHLATYFPGFRGPPQDPEAAKRFILELYTRVYAGAAAGPDGASKGPRSRRLFSHYTCATDTQNIRKVFKDVRDSVLARYLDEINLL

SEQ ID NO: 8062 - protein, 386 aa, Oryctolagus cuniculus
MEDEAQRGEGQGEANKKIEKQLQKDKQVYRATHRLLLLGAGESGKSTIVKQMRILHVNGFNGEGGEEDAQAARSNSDGEKATKVQDIKNNLKEAIETIVAAMSNLVPPVDLANPENQFRVDYILSVMNVPDFDFPPEFYEHAKALWEDEGVRACYERSNEYQLIDCAQYFLDKIDVIKQADYVPSDQDLLRCRVLTSGIFETKFQVDKVNFHMFDVGGQRDERRKWIQCFNDVTAIIFVVASSSYNMVIREDNQTNRLQEALNLFKSIWNNRCLRTISVILFLNKQDLLAEKVLAGKSKIEDYFPEFARYTTPEDATPEPGEDPRVTRAKYFIRDEFLRISTASGDGRHYCYPHFTCAVDTENIRRVFNDCRDIIQRMHLRQYELL

SEQ ID NO: 8063 - protein, 335 aa, Oryctolagus cuniculus
MRILHVNGFNGEGGEEDAQAARSNSDGEKATKVQDIKNNLKEAIETIVAAMSNLVPPVDLANPENQFRVDYILSVMNVPDFDFPPEFYEHAKALWEDEGVRACYERSNEYQLIDCAQYFLDKIDVIKQADYVPSDQDLLRCRVLTSGIFETKFQVDKVNFHMFDVGGQRDERRKWIQCFNDVTAIIFVVASSSYNMVIREDNQTNRLQEALNLFKSIWNNRCLRTISVILFLNKQDLLAEKVLAGKSKIEDYFPEFARYTTPEDATPEPGEDPRVTRAKYFIRDEFLRISTASGDGRHYCYPHFTCAVDTENIRRVFNDCRDIIQRMHLRQYELL

SEQ ID NO: 8064 - protein, 100 aa, Arabidopsis thaliana
MEAGSSNSSGQLSGRVVDTRGKHRIQAELKRLEQEARFLEEELEQLEKMDNASASCKEFLDSVDSKPDPLLPETTGPVNATWDQWFEGPKEAKRCGCSIL

SEQ ID NO: 8065 - protein, 98 aa, Arabidopsis thaliana
MREETVVYEQEESVSHGGGKHRILAELARVEQEVAFLEKELKEVENTDIVSTVCEELLSVIEKGPDPLLPLTNGPLNLGWDRWFEGPNGGEGCRCLIL

SEQ ID NO: 8066 - protein, 138 aa, Arabidopsis thaliana
MEGKSRFESERERLRRQFKLVRTKTRLSLTLSDLRPASERMREETVVYEQEESVSHGGGKHRILAELARVEQEVAFLEKELKEVENTDIVSTVCEELLSVIEKGPDPLLPLTNGPLNLGWDRWFEGPNGGEGCRCLIL

SEQ ID NO: 8067 - protein, 890 aa, Streptomyces coelicolor A3(2)
MEAVSVPAVLLPVRAALPVLTRARARANGHRASVFWGAVAVEALHLVARGLLLPGLSAAEHDAWRVGPLDAEGTERVRHLAAAMPPEAHAVPVGGAGPLRLPDPEPLVRSFLDAVADTLPRSPAAELLTAGPAYASWAPRPSPELRGWALDVAAGHDTGVRLSLRVEVRGLSAAGPQNARPTFRAVPQVHSVSDPGLVADTAQVWGGTVGEAFGTRARMDALLALRRAARAWPSLTPLLSATVPDAVELTDEEITELLGAGSRALAAAGVDVHWPRELARDLTERAEVGPPDGSRASRAAGPEAGPSFLSADALLAFNWTFALGDRTLTREELDLLAEANRPLVRLRDQWVLVDPEEAHRARARQDHKVTPVDALAAALTGSAEVDGHRVEVRPTGWLASVRERLADPETQEPVAQPEALDATLRDYQRRGLNWLARMTSLGLGCCLADDMGLGKTITLIALHLHRQSDAEAAGPTLVVCPTSLMGNWQREIERFAPGTPVRRFHGPRRDLDGLADGEFVLTTYGTMRLDAERLSAVSWGMVVADEAQHVKNPYSETARRLRSIGARARVALTGTPVENNLSELWAVLDWTTPGLLGRLGSFRRHYAQAVEEGQDPAAAERLARLVRPFLLRRRKSDPGIAPELPPKTETDHPVSLTTEQTGLYEAVVREALAEIAGADHMARRGMIVKLLTNLKQICNHPAQFLKEDRPKITGRSGKLELLDELLDTILSEQASVLVFTQYVQMARLLEQHLAARGVSSLFLHGGTSVTARESLVRRFQDGDAPVFLLSLKAAGTGLNLTRAEHVVHYDRWWNPAVEAQATDRAYRIGQTRPVQVHRLIAEGTIEDRIAALLNRKRELADAVLGSGEAALTELTDAELADLVELRGGTR

SEQ ID NO: 8068 - protein, 977 aa, Streptomyces coelicolor A3(2)
MGDMAVTEAGRAGATTASVPVGLAAVFLPAPLPREGRIAFWNPDGGPVDAAEDFGGAAAGDGRGHGDGERSGGPTELTVVRRHGAGVRRGTAPALSLPLAEALPHLVRARHDRAAHPATACWGAAALHALRLTARGRLLPGLTPTGHDAWRAGPLDPDDIAHLRAVAAALPPEGHAVPLDGPGPIRLPEPEALVRAFLDAVADTLPRTPAAPHASGRPFAAREARRLPDAHDWAAEVAAGMDAGVRISLRLDLSAYDLFDREGEGAPGSGSEGVGARNAGAAVVQVHSLADPTLVADAADLWSGTADAAFGARTRVDTALAVRRAARVWPPLDRLTDQDVPDVLALSEEEVTDLLGVAAGRLAAAGVAVHWPRDLAQDLTATAVIRTAPGSATDGTGFFESEDLLQFRWQLAIGGDPLTEAEMDTLAEAHRPVVRLRDRWVLVDPALVRRARKRDLGLLDPVDALSVALTGSAETDGETVEVVPVGALAALRDRLTAGVRPAEAPPGLHATLRDYQLRGLAWLDLMTSLGLGGCLADDMGLGKTVTVIALHLRRARTEPTLVVCPASLLGNWQREINRFAPGVPVRRFHGPDRTLDDLTGGFVLTTYGTMRSAATTLAEQPWGMVVADEAQHVKNPYSATAKALRTIPSPARVALTGTPVENNLSELWALLDWTTPGLLGPLKSFRARHARAVENGEDDQAVERLARLIRPFLLRRRKSDPGIVPELPPKTETDHPVPLTREQAALYEAVVRESMLAIEEAEGIGRRGLVLKLLTSLKQICDHPALFLKEEHPPGGTDRMTARSGKLALLDELLDTVLAEDGSVLVFTQYVGMARLITSHLAARAVPVDLLHGGTPVPERERMVDRFQSGATPVLVLSLKAAGTGLNLTRAGHVVHFDRWWNPAVEEQATDRAYRIGQTQPVQVHRLITEGTVEDRIAEMLQSKRALADAILGSGESALTELTARELSDLVSLRRPS

SEQ ID NO: 8069 - protein, 800 aa, Streptomyces coelicolor A3(2)
MVPILPAVVSLGGEWLPRGSVDQQGAVNARRGPVWAVERCGEGQRGAGSVGRGERDTVARGTRLYEAAQAVVGDHARAVEAVRAALKPIHDEAVKRELDAIPVARLQDVTEGRLRLGSVEKSGLRTLGRVLEAGPYRLRQIPGVGQRTVDQILAAARRLSEAVHETVAVHIDVDRPEPRTTALVMALHVLVEAGPEARRAVDKATVLTERLGPLLADAGPAAGRVRMLLAGREKKARAWAAVAATRSLVDEAEQAGLPGLLAQASVDLLRGTASDVAAWVDFELRSAEYYSLLAEISGRPPDAAAVEGFLPDEVAERVRTQHLDDTHRRVSLRGYQAFGARFALAQRKVILGDEMGLGKTIQAIAVLAHLAAEGQSHFMVVCPASVLVNWTREIEARSALRVMVLHGPDRHYAFADWKGRGGVGVTTFDALRGFPAPGGGEVGLLVVDEAHSVKNPKAKRSQAVGLWAERCERTLFMTGTPMENRVAEFRNLVQMLDGDVADSLGERDALAGSVTFRKAVAPVYLRRNQEDVLTELPSLQQTDEWEELSASDEEAYREAVRAGNFMAMRRAAYMSSGNSAKLERLREIVQEAGENGQKTVVFSNFKDVLAVVKEALAVETTRVTPVFGPLTGGVPAQRRQEIVDDFAGVQGPAVLLGQIQAAGVGLNMQAASVVVICEPQIKPTIEHQAVARAHRMGQVRPVRVHRLLATGGVDERMVKMLEAKTRLFDAYARRSAVAEATPDAVDVSDTELARRIVEEEQARLGMTDERPTSSEWGVPRSAASPQDPLNGRRESTNANE

SEQ ID NO: 8070 - protein, 1051 aa, Mus musculus
MSSAVEPPPPPPPESAPSKPSAAGAGGSSSGNKGGPEGGAAPAAPCAAGSGPADTEMEEVFDHGSPGKQKEIQEPDPTYEEKMQTDRANRFEYLLKQTELFAHFIQPAAQKTPTSPLKMKPGRPRVKKDEKQNLLSVGDYRHRRTEQEEDEELLTESSKATNVCTRFEDSPSYVKWGKLRDYQVRGLNWLISLYENGINGILADEMGLGKTLQTISLLGYMKHYRNIPGPHMVLVPKSTLHNWMSEFKKWVPTLRSVCLIGDKEQRAAFVRDVLLPGEWDVCVTSYEMLIKEKSVFKKFNWRYLVIDEAHRIKNEKSKLSEIVREFKTTNRLLLTGTPLQNNLHELWSLLNFLLPDVFNSADDFDSWFDTNNCLGDQKLVERLHMVLRPFLLRRIKADVEKSLPPKKEVKIYVGLSKMQREWYTRILMKDIDILNSAGKMDKMRLLNILMQLRKCCNHPYLFDGAEPGPPYTTDMHLVTNSGKMVVLDKLLPKLKEQGSRVLIFSQMTRVLDILEDYCMWRNYEYCRLDGQTPHDERQDSINAYNEPNSTKFVFMLSTRAGGLGINLATADVVILYDSDWNPQVDLQAMDRAHRIGQTKTVRVFRFITDNTVEERIVERAEMKLRLDSIVIQQGRLVDQNLNKIGKDEMLQMIRHGATHVFASKESEITDEDIDGILERGAKKTAEMNEKLSKMGESSLRNFTMDTESSVYNFEGEDYREKQKIAFTEWIEPPKRERKANYAVDAYFREALRVSEPKAPKAPRPPKQPNVQDFQFFPPRLFELLEKEILYYRKTIGYKVPRSPDLPNAAQAQKEEQLKIDEAEPLNDEELEEKEKLLTQGFTNWNKRDFNQFIKANEKWGRDDIENIAREVEGKTPEEVIEYSAVFWERCNELQDIEKIMAQIERGEARIQRRISIKKALDTKIGRYKAPFHQLRISYGTNKGKNYTEEEDRFLICMLHKLGFDKENVYDELRQCIRNSPQFRFDWFLKSRTAMELQRRCNTLITLIERENMELEEKEKAEKKKRGPKPSTQKRKMDGAPDGRGRKKKLKL

SEQ ID NO: 8071 - protein, 995 aa, Mus musculus
MEEVFDHGSPGKQKEIQEPDPTYEEKMQTDRANRFEYLLKQTELFAHFIQPAAQKTPTSPLKMKPGRPRVKKDEKQNLLSVGDYRHRRTEQEEDEELLTESSKATNVCTRFEDSPSYVKWGKLRDYQVRGLNWLISLYENGINGILADEMGLGKTLQTISLLGYMKHYRNIPGPHMVLVPKSTLHNWMSEFKKWVPTLRSVCLIGDKEQRAAFVRDVLLPGEWDVCVTSYEMLIKEKSVFKKFNWRYLVIDEAHRIKNEKSKLSEIVREFKTTNRLLLTGTPLQNNLHELWSLLNFLLPDVFNSADDFDSWFDTNNCLGDQKLVERLHMVLRPFLLRRIKADVEKSLPPKKEVKIYVGLSKMQREWYTRILMKDIDILNSAGKMDKMRLLNILMQLRKCCNHPYLFDGAEPGPPYTTDMHLVTNSGKMVVLDKLLPKLKEQGSRVLIFSQMTRVLDILEDYCMWRNYEYCRLDGQTPHDERQDSINAYNEPNSTKFVFMLSTRAGGLGINLATADVVILYDSDWNPQVDLQAMDRAHRIGQTKTVRVFRFITDNTVEERIVERAEMKLRLDSIVIQQGRLVDQNLNKIGKDEMLQMIRHGATHVFASKESEITDEDIDGILERGAKKTAEMNEKLSKMGESSLRNFTMDTESSVYNFEGEDYREKQKIAFTEWIEPPKRERKANYAVDAYFREALRVSEPKAPKAPRPPKQPNVQDFQFFPPRLFELLEKEILYYRKTIGYKVPRSPDLPNAAQAQKEEQLKIDEAEPLNDEELEEKEKLLTQGFTNWNKRDFNQFIKANEKWGRDDIENIAREVEGKTPEEVIEYSAVFWERCNELQDIEKIMAQIERGEARIQRRISIKKALDTKIGRYKAPFHQLRISYGTNKGKNYTEEEDRFLICMLHKLGFDKENVYDELRQCIRNSPQFRFDWFLKSRTAMELQRRCNTLITLIERENMELEEKEKAEKKKRGPKPSTQKRKMDGAPDGRGRKKKLKL

SEQ ID NO: 8072 - protein, 1051 aa, Mus musculus
MSSAVEPPPPPPPESAPSKPSAAGAGGSSSGNKGGPEGGAAPAGSCAAGSGPADTEMEEVFDHGSPGKQKEIQEPDPTYEEKMQTDRANRFEYLLKQTELFAHFIQPAAQKTPTSPLKMKPGRPRVKKDEKQNLLSVGDYRHCRTEQEEDEELLTERSKATNVCTRFEDSPSYVKWGKLRDYQVRGLNWLISLYENGINGILADEMGLGKTLQTISLLGYMKHYRNIPGPHMVLVPKSTLHNWMSEFKRWVPTLRSVCLIGDKEQRAAFVRDVLLPGEWDVCVTSYEMLIKEKSVFKKFNWRYLVIDEAHRIKNEKSNLSEIVREFKTTNRLLLTGTPLQNNLHELWSLLNFLLPDVFNSADDFDSWFDTNNSLGDQKLVERLHMVLRPFLLRRIKADVEKSLPPKKEVKIYVGLSKMQREWYTRILMKDIDILNSAGKMDKMRLLNILMQLRKCCNHPYLFDGAEPGPPYTTDMHLVTNSGKMVVLDKLLPKLKEQSSRVLIFSQMTRVLDILEDYCMWRNYEYCRLDGQTPHDERQDSINAYNEPNSTKFVFMLSTRAGGLGINLATADVVILYDSDWNPQVDLQAMDRAHRIGQTKTVRVFRFITDNTVEERIVERAEMKLRLDSIVIQQGRLVDQNLNKIGKDEMLQMIRHGATHVFASKESEITDEDIDGILERGAKKTAEMNEKLSKMGESSLRNFTMDTESSVYNFEGEDYREKQKIAFTEWIEPPKRERKANYAVDAYFREALRVSEPKAPKAPRPPKQPNVQDFQFFPPRLFELLEKEILYYRKTIGYKVPRSPDLPNAAQAQKEEQLKIDEAEPLNDEELEEKEKLLTQGFTNWNKRDFNQFIKANEKWGRDDIENIAREVEGKTPEEVIEYSAVFWERCNELQDIEKIMAQIERGEARIQRRISIKKALDTKIGRYKAPFHQLRISYGTNKGKNYTEEEDRFLICMLHKLGFDKENVYDELRQCIRNSPQFRFDWFLKSRTAMELQRRCNTLITLIERENMELEEKEKAEKKKRGPKPSTQKRKMDGAPDGRGRKKKLKL

SEQ ID NO: 8073 - protein, 1064 aa, Mus musculus
MEPDTATEAATVAVSDARATVVVVEDEQPGPSTFKEEGAAAAATEGTTATEKAEKKEKITFSISTQTCLLKLSKSEKEMDPEYEEKMVNMPLKAARAKRFEFLLKQTELFAHFIQPSAQKSPTSPLNMKLARPRVKKDDKQSLISVGDYRHRRTEQEEDEELLSESRKTSNVCVRFEVSPSYVKGGPLRDYQIRGLNWLISLYENGVNGILADEMGLGKTLQTIALLGYLKHYRNIPGPHMVLVPKSTLHNWMNEFKRWVPSLRVICFVGDKDVRAAFIRDEMMPGEWDVCVTSYEMVIKEKSVFKKFHWRYLVIDEAHRIKNEKSKLSEIVREFKSTNRLLLTGTPLQNNLHELWALLNFLLPDVFNSADDFDSWFDTKNCLGDQKLVERLHAVLKPFLLRRIKTDVEKSLPPKKEIKIYLGLSKMQREWYTKILMKDIDVLNSSGKMDKMRLLNILMQLRKCCNHPYLFDGAEPGPPYTTDEHIVGNSGKMVALDKLLARIKEQGSRVLIFSQMTRLLDILEDYCMWRGYEYSRLDGQTPHEEREEAIDAFNAPNSSKFIFMLSTRAGGLGINLASADVVILYDSDWNPQVDLQAMDRAHRIGQKKPVRVFRLITDNTVEERIVERAEIKLRLDSIVIQQGRLIDQQSNKLAKEEMLQMIRHGATHVFACKESELTDEDIVTILERGEKKTAEMNERMQKMGESSLRNFRMDLEQSLYKFEGEDYREKQKLGTVEWIEPPKRERKANYAVDAYFREALRVSEPKIPKAPRPPKQPNVQDFQFFPPRLFELLEKEILYYRKTIGYKVPRNPEIPNPAIAQREEQKKIDGAEPLTPQETEEKDKLLHTRFHKLGLKRDFNQFIKANEKYGRDDIDNIAREVEGKSPEEVMEYSAVFWERCNELQDIEKIMAQIERGEARIQRRISIKKALDAKIARYKAPFHQLRIQYGTSKGKNYTEEEDRFLICMLHKMGFDRENVYEELRQCVRNAPQFRFDWFIKSRTAMEFQRRCNTLISLIEKENMEIEERERAEKKKRATKTPMSQKRKAESATESSGRKDVKKVKS

SEQ ID NO: 8074 - protein, 1046 aa, Mus musculus
MEPDTATEAATVAVSDARATVVVVEDEQPGPSTFKEEGAAAAATEGTTATEKGEKKEKITSPFQLKLAAKASKSEKEMDPEYEEKMVNMPLKADRAKRFEFLLKQTELFAHFIQPSAQKSPTSPLNMKLARPRVKKDDKQSLISVGDYRHRRTEQEEDEELLSESRKTSNVCVRFEVSPSYVKGGPLRDYQIRGLNWLISLYENGVNGILADEMGLGKTLQTIALLGYLKHYRNIPGPHMVLVPKSTLHNWMNEFKRWVPSLRVICFVGDKDVRAAFIRDEMMPGEWDVCVTSYEMVIKEKSVFKKFHWRYLVIDEAHRIKNEKSKLSEIVREFKSTNRLLLTGTPLQNNLHELWALLNFLLPDVFNSADDFDSWFDTKNCLGDQKLVERLHAVLKPFLLRRIKTDVEKSLPPKKEIKIYLGLSKMQREWYTKILMKDIDVLNSSGKMDKMRLLNILMHLRKCCNHPYLFDGAEPGPPYTTDEHIVGNSGKMVALDKLLARIKEQGSRVLIFSQMTRLLDILEDYCMWRGYEYSRLDGQTPHEEREEAIDAFNAPNSSKFIFMLSTRAGGLGINLASADVVILYDSDWNPQVDLQAMDRAHRIGQKKPVRVFRLITDNTVEERIVERAEIKLRLDSIVIQQGRLIDQQSNKLAKEEMLQMIRHGATHVFACKESELTDEDIVTILERGEKKTAEMNERMQKMGESSLRNFRMDLEQSLYKFEGEDYREKQKLGTVEWIEPPKRERKANYAVDAYFREALRVSEPKIPKAPRPPKQPNVQDFQFFPPRLFELLEKEILYYRKTIGYKVPRNPEIPNPAIAQREEQKKIDGAEPLTPQETEEKDKLLTQGFTNWTKRDFNQFIKANEKYGRDDIDNIAREVEGKSPEEVMEYSAVFWERCNELQDIEKIMAQIERGEARIQRRISIKKALDAKIARYKAPFHQLRIQYGTSKGKNYTEEEDRFLICMLHKMGFDRENVYEELRQCVRNAPQFRFDWFIKSRTAMEFQRRCNTLISLIEKENMEIEERERAEKKKRATKTPMVKFSAFS

SEQ ID NO: 8075 - protein, 594 aa, Mus musculus
YKIPVPINAELRKYQQDGVNWLAFLNKYKLHGILCDDMGLGKTLQSICILAGDHCQRAQEYARSKLAECMPLPSLVVCPPTLTGHWVDEVGKFCSREYLNPLHYTGPPTERIRLQHQVKRHNLIVASYDVVRNDIDFFRNIKFNYCILDEGHVIKNGKTKLSKAVKQLTANYRIILSGTPIQNNVLELWSLFDFLMPGFLGTERQFAARYGKPILASRDARSSSREQEAGVLAMDALHRQVLPFLLRRMKEDVLQDLPPKIIQDYYCTLSPLQVQLYEDFAKSRAKCDVDETVSSAALSEETEKPKLKATGHVFQALQYLRKLCNHPALVLTPQHPEFKSTTEKLTVQNSSLHDIQHAPKLSALKQLLLDCGLGNGSSTESGTESVVAQHRILIFCQLKSMLDIVEHDLLKPHLPSVTYLRLDGSIPPGQRHSIVSRFNNDPSIDVLLLTTHVGGLGLNLTGADTVVFVEHDWNPMRDLQAMDRAHRIGQKRVVNVYRLITRGTLEEKIMGLQKFKMNIANTVISQENSSLQSMGTDQLLDLFTLDKDGKAEKADSSTSGKASMKSVLENLSDLWDAEQYDSEYNLETFMRSLE

SEQ ID NO: 8076 - protein, 1045 aa, Mus musculus
PIRKAKTKEGKGPNARRKPKGSPRVPDAKKPKPKKVAPLKIKLGGFGSKRKRSSSEDDDLDVESDFDDASINSYSVSDGSTSRSSRSRKKLRTAKKKKKGEEEVTAVDGYETDHQDYCEVCQQGGEIILCDTCPRAYHMVCLDPDMEKAPEGKWSCPHCEKEGIQWEAKEDNSEGEEILEEVGGDPEEEDDHHMEFCRVCKDGGELLCCDTCPSSYHIHCLNPPLPEIPNGEWLCPRCTCPALKGKVQKILIWKWGQPPSPTPVPRPPDADPNTPSPKPLEGRPERQFFVKWQGMSYWHCSWVSELQLELHCQVMFRNYQRKNDMDEPPSGDFGGDEEKSRKRKNKDPKFAEMEERFYRYGIKPEWMMIHRILNHSVDKKGHVHYLIKWRDLPYDQASWESEDVEIQDYDLFKQSYWNHRELMRGEEGRPGKKLKKVKLRKLERPPETPTVDPTVKYERQPEYLDATGGTLHPYQMEGLNWLRFSWAQGTDTILADEMGLGKTVQTAVFLYSLYKEGHSKGPFLVSAPLSTIINWEREFEMWAPDMYVVTYVGDKDSRAIIRENEFSFEDNAIRGGKKASRMKKEASVKFHVLLTSYELITIDMAILGSIDWACLIVDEAHRLKNNQSKFFRVLNGYSLQHKLLLTGTPLQNNLEELFHLLNFLTPERFHNLEGFLEEFADIAKEDQIKKLHDMLGPHMLRRLKADVFKNMPSKTELIVRVELSPMQKKYYKYILTRNFEALNARGGGNQVSLLNVVMDLKKCCNHPYLFPVAAMEAPKMPNGMYDGSALIRASGKLLLLQKMLKNLKEGGHRVLIFSQMTKMLDLLEDFLEHEGYKYERIDGGITGNMRQEAIDRFNAPGAQQFCFLLSTRAGGLGINLATADTVIIYDSDWNPHNDIQAFSRAHRIGQNKKVMIYRFVTRASVEERITQVAKKKMMLTHLVVRPGLGSKTGSMSKQELDDILKFGTEELFKDEATDGGGDNKEGEDSSVIHYDDKAIERLLDRNQDETEDTELQGMNEYLSSFKVAQYVVREEEMGEEEEVER

SEQ ID NO: 8077 - protein, 1617 aa, Mus musculus
MSTPDPPLGGTPRPGPSPGPGPSPGAMLGPSPGPSPGSAHSMMGPSPGPPSAGHPMPTQGPGGYPQDNMHQMHKPMESMHEKGMPDDPRYNQMKGMGMRSGAHTGMAPPPSPMDQHSQGYPSPLGGSEHASSPVPASGPSSGPQMSSGPGGAPLDGSDPQALGQQNRGPTPFNQNQLHQLRAQIMAYKMLARGQPLPDHLQMAVQGKRPMPGMQQQMPTLPPPSVSATGPGPGPGPGPGPGPGPAPPNYSRPHGMGGPNMPPPGPSGVPPGMPGQPPGGPPKPWPEGPMANAAAPTSTPQKLIPPQPTGRPSPAPPAVPPAASPVMPPQTQSPGQPAQPAPLVPLHQKQSRITPIQKPRGLDPVEILQEREYRLQARIAHRIQELENLPGSLAGDLRTKATIELKALRLLNFQRQLRQEVVVCMRRDTALETALNAKAYKRSKRQSLREARITEKLEKQQKIEQERKRRQKHQEYLNSILQHAKDFREYHRSVTGKLQKLTKAVATYHANTEREQKKENERIEKERMRRLMAEDEEGYRKLIDQKKDKRLAYLLQQTDEYVANLTELVRQHKAAQVAKEKKKKKKKKKAENAEGQTPAIGPDGEPLDETSQMSDLPVKVIHVESGKILTGTDAPKAGQLEAWLEMNPGYEVAPRSDSEESGSEEEEEEEEEEQPQPAQPPTLPVEEKKKIPDPDSDDVSEVDARHIIENAKQDVDDEYGVSQALARGLQSYYAVAHAVTERVDKQSALMVNGVLKQYQIKGLEWLVSLYNNNLNGILADEMGLGKTIQTIALITYLMEHKRINGPFLIIVPLSTLSNWAYEFDKWAPSVVKVSYKGSPAARRAFVPQLRSGKFNVLLTTYEYIIKDKHILAKIRWKYMIVDEGHRMKNHHCKLTQVLNTHYVAPRRLLLTGTPLQNKLPELWALLNFLLPTIFKSCSTFEQWFNAPFAMTGEKVDLNEEETILIIRRLHKVLRPFLLRRLKKEVEAQLPEKVEYVIKCDMSALQRVLYRHMQAKGVLLTDGSEKDKKGKGGTKTLMNTIMQLRKICNHPYMFQHIEESFSEHLGFTGGIVQGLDLYRASGKFELLDRILPKLRATNHKVLLFCQMTSLMTIMEDYFAYRGFKYLRLDGTTKAEDRGMLLKTFNEPGSEYFIFLLSTRAGGLGLNLQSADTVIIFDSDWNPHQDLQAQDRAHRIGQQNEVRVLRLCTVNSVEEKILAAAKYKLNVDQKVIQAGMFDQKSSSHERRAFLQAILEHEEQDEEEDEVPDDETVNQMIARHEEEFDLFMRMDLDRRREEARNPKRKPRLMEEDELPSWIIKDDAEVERLTCEEEEEKMFGRGSRHRKEVDYSDSLTEKQWLKTLKAIEEGTLEEIEEEVRQKKSSRKRKRDSEAGSSTPTTSTRSRDKDEESKKQKKRGRPPAEKLSPNPPNLTKKMKKIVDAVIKYKDSSSGRQLSEVFIQLPSRKELPEYYELIRKPVDFKKIKERIRNHKYRSLNDLEKDVMLLCQNAQTFNLEGSLIYEDSIVLQSVFTSVRQKIEKEDDSEGEESEEEEEGEEEGSESESRSVKVKIKLGRKEKAQDRLKGGRRRPSRGSRAKPVVSDDDSEEEQEEDRSGSGSEED

SEQ ID NO: 8078 - protein, 900 aa, Mus musculus
MASGLPRFLQALPAEHGPEPLRTRVQEPDLQQWGLTGIRLRSYQLEGVNWLVQCFHCQNGCILGDEMGLGKTCQTIALLIYLVGRLNDEGPFLVLCPLSVLSNWKEEMERFAPGLSCVTYTGDKEERARLQQDLRQESGFHVLLTTYEICLKDASFLKSFSWSVLAVDEAHRLKNQSSLLHRTLSEFSAVFRLLLTGTPIQNSLRELYSLLCVVEPDLFCREQVEDFVQRYQDIEKESKSASELHRLLQPFLLRRVKAQVATELPKKTEVVVYHGMSALQKKYYKAILMKDLDAFENETAKKVKLQNILTQLRKCVDHPYLFDGVEPEPFEVGEHLIEASGKLHLLDRLLAFLYSGGHRVLLFSQMTHMLDILQDYMDYRGYSYERVDGSVRGEERHLAIKNFGNQPIFVFLLSTRAGGVGMNLTAADTVIFVDSDFNPQNDLQAAARAHRIGQNKSVKVIRLIGRDTVEEIVYRKAASKLQLTNMVIEGGHFTPGAQKPSAEADFQLSEILKFGLDKLLSSEGSSMEDIDLKSILGETKDGQWTPDALPAAAAAGGGSLEPEEGSELESRSYENHMYLFEGRDYSKEPSKEDRKSFEQLVNLQKTLLEKTSHGGRTLRNKGSVLIPGLAEGPIKRKKILSPEELEDRRKKRQEAAAKRKRLMEEKRKEKEEAEHRKKMAWWESNGYQSFCLSSEDSELEDLEGGDESSAELAYEDLDSTSINYVSGDVTHPQAGEEDAVIVHCVDDSGRWGRGGLFTALEVRSAEPRKIYELAGKMEDLSLGDVLLFPIDDKESRDKGQDLLALVVAQHRDRTNVLSGIKMAALEEGLKKIFLAAKKKKASVHLPRIGHATKGFNWYGTERLIRKHLATRGIPTYIYYFPRSKARHSQPASSSSAPLVP

SEQ ID NO: 8079 - protein, 557 aa, Mus musculus
MGLGKTLQSICILAGDHCQRAQEYARSKLAECMPLPSLVVCPPTLTGHWVDEVGKFCSREYLNPLHYTGPPTERIRLQHQVKRHNLIVASYDVVRNDIDFFRNIKFNYCILDEGHVIKNGKTKLSKAVKQLTANYRIILSGTPIQNNVLELWSLFDFLMPGFLGTERQFAARYGKPILASRDARSSSREQEAGVLAMDALHRQVLPFLLRRMKEDVLQDLPPKIIQDYYCTLSPLQVQLYEDFAKSRAKCDVDETVSSAALSEETEKPKLKATGHVFQALQYLRKLCNHPALVLTPQHPEFKSTTEKLTVQNSSLHDIQHAPKLSALKQLLLDCGLGNGSSTESGTESVVAQHRILIFCQLKSMLDIVEHDLLKPHLPSVTYLRLDGSIPPGQRHSIVSRFNNDPSIDVLLLTTHVGGLGLNLTGADTVVFVEHDWNPMRDLQAMDRAHRIGQKRVVNVYRLITRGTLEEKIMGLQKFKMNIANTVISQENSSLQSMGTDQLLDLFTLDKDGKAEKADSSTSGKASMKSVLENLSDLWDAEQYDSEYNLETFMRSLE

SEQ ID NO: 8080 - protein, 1081 aa, Mus musculus
MNGHSDEESVRNGSGESSQSGDDCGSASGSGSGSSSGSSSDGSSSQSGSSDSDSGSDSGSQSESESDTSRENKVQAKPPKVDGAEFWKSSPSILAVQRSAMLRKQPQQAQQQRPASSNSGSEEDSSSSEDSDDSSSGAKRKKHNDEDWQMSGSGSPSQSGSDSESEEERDKSSCDGTESDYEPKNKVRSRKPQNRSKSKNGKKILGQKKRQIDSSEDEDDEDYDNDKRSSRRQATVNVSYKEDEEMKTDSDDLLEVCGEDVPQPEDEEFETIERVMDCRVGRKGATGATTTIYAVEADGDPNAGFERNKEPGDIQYLIKWKGWSHIHNTWETEETLKQQNVRGMKKLDNYKKKDQETKRWLKNASPEDVEYYNCQQELTDDLHKQYQIVERIIAHSNQKSAAGLPDYYCKWQGLPYSECSWEDGALISKKFQTCIDEYFSRNQSKTTPFKDCKVLKQRPRFVALKKQPSYIGGHEGLELRDYQLNGLNWLAHSWCKGNSCILADEMGLGKTIQTISFLNYLFHEHQLYGPFLLVVPLSTLTSWQREIQTWASQMNAVVYLGDINSRNMIRTHEWMHPQTKRLKFNILLTTYEILLKDKAFLGGLNWAFIGVDEAHRLKNDDSLLYKTLIDFKSNHRLLITGTPLQNSLKELWSLLHFIMPEKFSSWEDFEEEHGKGREYGYASLHKELEPFLLRRVKKDVEKSLPAKVEQILRMEMSALQKQYYKWILTRNYKALSKGSKGSTSGFLNIMMELKKCCNHCYLIKPPDNNEFYNKQEALQHLIRSSGKLILLDKLLIRLRERGNRVLIFSQMVRMLDILAEYLKYRQFPFQRLDGSIKGELRKQALDHFNAEGSEDFCFLLSTRAGGLGINLASADTVVIFDSDWNPQNDLQAQARAHRIGQKKQVNIYRLVTKGSVEEDILERAKKKMVLDHLVIQRMDTTGKTVLHTGSAPSSSTPFNKEELSAILKFGAEELFKEPEGEEQEPQEMDIDEILKRAETHENEPGPLSVGDELLSQFKVANFSNMDEDDIELEPERNSKNWEEIIPEEQRRRLEEEERQKELEEIYMLPRMRNCAKQVMSF

SEQ ID NO: 8081 - protein, 1711 aa, Mus musculus
MNGHSDEESVRNGSGESSQSGDDCGSASGSGSGSSSGSSSDGSSSQSGSSDSDSGSDSGSQSESESDTSRENKVQAKPPKVDGAEFWKSSPSILAVQRSAMLRKQPQQAQQQRPASSNSGSEEDSSSSEDSDDSSSGAKRKKHNDEDWQMSGSGSPSQLGSDSESEEERDKSSCDGTESDYEPKNKVRSRKPQNRSKSKNGKKILGQKKRQIDSSEDEDDEDYDNDKRSSRRQATVNVSYKEDEEMKTDSDDLLEVCGEDVPQPEDEEFETIERVMDCRVGRKGATGATTTIYAVEADGDPNAGFERNKEPGDIQYLIKWKGWSHIHNTWETEETLKQQNVRGMKKLDNYKKKDQETKRWLKNASPEDVEYYNCQQELTDDLHKQYQIVERIIAHSNQKSAAGLPDYYCKWQGLPYSECSWEDGALISKKFQTCIDEYFSRNQSKTTPFKDCKVLKQRPRFVALKKQPSYIGGHEGLELRDYQLNGLNWLAHSWCKGNSCILADEMGLGKTIQTISFLNYLFHEHQLYGPFLLVVPLSTLTSWQREIQTWASQMNAVVYLGDINSRNMIRTHEWMHPQTKRLKFNILLTTYEILLKDKAFLGGLNWAFIGVDEAHRLKNDDSLLYKTLIDFKSNHRLLITGTPLQNSLKELWSLLHFIMPEKFSSWEDFEEEHGKGREYGYASLHKELEPFLLRRVKKDVEKSLPAKVEQILRMEMSALQKQYYKWILTRNYKALSKGSKGSTSGFLNIMMELKKCCNHCYLIKPPDNNEFYNKQEALQHLIRSSGKLILLDKLLIRLRERGNRVLIFSQMVRMLDILAEYLKYRQFPFQRLDGSIKGELRKQALDHFNAEGSEDFCFLLSTRAGGLGINLASADTVVIFDSDWNPQNDLQAQARAHRIGQKKQVNIYRLVTKGSVEEDILERAKKKMVLDHLVIQRMDTTGKTVLHTGSAPSSSTPFNKEELSAILKFGAEELFKEPEGEEQEPQEMDIDEILKRAETHENEPGPLSVGDELLSQFKVANFSNMDEDDIELEPERNSKNWEEIIPEEQRRRLEEEERQKELEEIYMLPRMRNCAKQISFNGSEGRRSRSRRYSGSDSDSISERKRPKKRGRPRTIPRENIKGFSDAEIRRFIKSYKKFGGPLERLDAIARDAELVDKSETDLRRLGELVHNGCVKALKDSSSGTERAGGRLGKVKGPTFRISGVQVNAKLVIAHEDELIPLHKSIPSDPEERKQYTIPCHTKAAHFDIDWGKEDDSNLLIGIYEYGYGSWEMIKMDPDLSLTHKILPDDPDKKPQAKQLQTRADYLIKLLSRDLAKREAQRLCGAGGSKRRKTRAKKSKAMKSIKVKEEIKSDSSPLPSEKSDEDDDKLNDSKPESKDRSKKSVVSDAPVHITASGEPVPIAEESEELDQKTFSICKERMRPVKAALKQLDRPEKGLSEREQLEHTRQCLIKIGDHITECLKEYSNPEQIKQWRKNLWIFVSKFTEFDARKLHKLYKHAIKKRQESQQNSDQNSNVATTHVIRNPDMERLKENTNHDDSSRDSYSSDRHLSQYHDHHKDRHQGDSYKKSDSRKRPYSSFSNGKDHREWDHYRQDSRYYSDREKHRKLDDHRSREHRPSLEGGLKDRCHSDHRSHSDHRMHSDHRSSSEHTHHKSSRDYRYLSDWQLDHRAASSGPRSPLDQRSPYGSRSPFEHSAEHRSTPEHTWSSRKT

SEQ ID NO: 8082 - protein, 1711 aa, Mus musculus
MNGHSDEESVRNGSGESSQSGDDCGSASGSGSGSSSGSSSDGSSSQSGSSDSDSGSDSGSQSESESDTSRENKVQAKPPKVDGAEFWKSSPSILAVQRSAMLRKQPQQAQQQRPASSNSGSEEDSSSSEDSDDSSSGAKRKKHNDEDWQMSGSGSPSQLGSDSESEEERDKSSCDGTESDYEPKNKVRSRKPQNRSKSKNGKKILGQKKRQIDSSEDEDDEDYDNDKRSSRRQATVNVSYKEDEEMKTDSDDLLEVCGEDVPQPEDEEFETIERVMDCRVGRKGATGATTTIYAVEADGDPNAGFERNKEPGDIQYLIKWKGWSHIHNTWETEETLKQQNVRGMKKLDNYKKKDQETKRWLKNASPEDVEYYNCQQELTDDLHKQYQIVERIIAHSNKQSAAGLPDYYCKWQGLPYSECSWEDGALISKKFQTCIDEYFSRNQSKTTPFKDCKVLKQRPRFVALKKQPSYIGGHEGLELRDYQLNGLNWLAHSWCKGNSCILADEMGLGKTIQTISFLNYLFHEHQLYGPFLLVVPLSTLTSWQREIQTWASQMNAVVYLGDINSRNMIRTHEWMHPQTKRLKFNILLTTYEILLKDKAFLGGLNWAFIGVDEAHRLKNDDSLLYKTLIDFKSNHRLLITGTPLQNSLKELWSLLHFIMPEKFSSWEDFEEEHGKGREYGYASLHKELEPFLLRRVKKDVEKSLPAKVEQILRMEMSALQKQYYKWILTRNYKALSKGSKGSTSGFLNIMMELKKCCNHCYLIKPPDNNEFYNKQEALQHLIRSSGKLILLDKLLIRLRERGNRVLIFSQMVRMLDILAEYLKYRQFPFQRLDGSIKGELRKQALDHFNAEGSEDFCFLLSTRAGGLGINLASADTVVIFDSDWNPQNDLQAQARAHRIGQKKQVNIYRLVTKGSVEEDILERAKKKMVLDHLVIQRMDTTGKTVLHTGSAPSSSTPFNKEELSAILKFGAEELFKEPEGEEQEPQEMDIDEILKRAETHENEPGPLSVGDELLSQFKVANFSNMDEDDIELEPERNSKNWEEIIPEEQRRRLEEEERQKELEEIYMLPRMRNCAKQISFNGSEGRRSRSRRYSGSDSDSISERKRPKKRGRPRTIPRENIKGFSDAEIRRFIKSYKKFGGPLERLDAIARDAELVDKSETDLRRLGELVHNGCVKALKDSSSGTERAGGRLGKVKGPTFRISGVQVNAKLVIAHEDELIPLHKSIPSDPEERKQYTIPCHTKAAHFDIDWGKEDDSNLLIGIYEYGYGSWEMIKMDPDLSLTHKILPDDPDKKPQAKQLQTRADYLIKLLSRDLAKREAQRLCGAGGSKRRKTRAKKSKAMKSIKVKEEIKSDSSPLPSEKSDEDDDKLNDSKPESKDRSKKSVVSDAPVHITASGEPVPIAEESEELDQKTFSICKERMRPVKAALKQLDRPEKGLSEREQLEHTRQCLIKIGDHITECLKEYSNPEQIKQWRKNLWIFVSKFTEFDARKLHKLYKHAIKKRQESQQNSDQNSNVATTHVIRNPDMERLKENTNHDDSSRDSYSSDRHLSQYHDHHKDRHQGDSYKKSDSRKRPYSSFSNGKDHREWDHYRQDSRYYSDREKHRKLDDHRSREHRPSLEGGLKDRCHSDHRSHSDHRMHSDHRSSSEHTHHKSSRDYRYLSDWQLDHRAASSGPRSPLDQRSPYGSRSPFEHSAEHRSTPEHTWSSRKT

SEQ ID NO: 8083 - protein, 1021 aa, Mus musculus
MNLFNLDRFRFEKRSKIEEAPEAAPQPSQARPSSPISLSAEEENAEGEGSRANTPDSDVTEKTEDSSVPEPPDNERKASLSCFQNQRAIQEYIDLSSDTEDVSPNCSSTVQEKKFSKDTVIIVSEPSEDEESHDLPSVTRRNDSSELEDLSELEDLKDAKLQTLKELFPQRSDSDLLKLIESTSTMDGAIAAALLMFGDAGGGPRKRKLSSSSEEDDVNDDQSVKQPRGDRGEESNESAEASSNWEKQESIVLKLQKEFPNFDKQELREVLKEHEWMYTEALESLKVFAEDQDVQCASQSEVTNGKEVARNQNYSKNATKIKMKQKISVKPQNGFNKKRKKNVFNPKKAVEDSEYDSGSDAGSSLDEDYSSCEEVMEDGYKGKILHFLQVSSIAELTLIPKCSQKKAQKITELRPFNNWEALFTKMSKINGLSEDLIWNCKTVIQERDVVIRLMNKCEDISNKLTKQVTMLTGNGGGWNREQPSLLNQSLSLKPYQKVGLNWLALVHKHGLNGILADEMGLGKTIQAIAFLAYLFQEGNKGPHLIVVPASTIDNWLREVNLWCPSLNVLCYYGSQEERKQIRFNIHNKYEDYNVIVTTYNCAISSSDDRSLFRRLKLNYAIFDEGHMLKNMGSIRYQHLMTINARNRLLLTGTPVQNNLLELMSLLNFVMPHMFSSSTSEIRRMFSSKTKPADEQSIYEKERIAHAKQIIKPFILRRVKEEVLKLLPPKKDRIELCAMSEKQEQLYSGLFNRLKKSINNLEKNTEMCNVMMQLRKMANHPLLHRQYYTPEKLKEMSQLMLKEPTHCEANPDLIFEDMEVMTDFELHVLCKQYQHINSYQLDMDLILDSGKFRALGCILSELKQKGDRVVLFSQFTMMLDILEVLLKHHQHRYLRLDGKTQISERIHLIDEFNTDMDIFVFLLSTKAGGLGINLTSANVVILHDIDCNPYNDKQAEDRCHRVGQTKEVLVIKLISQGTIEESMLKINQQKLKLEQDMTTVDEADEGSMPADIATLLKTSMGL

SEQ ID NO: 8084 - protein, 836 aa, Mus musculus
MDGAIAAALLMFGDAGGGPRKRKLSSSSEEDDVNDDQSVKQPRGDRGEESNESAEASSNWEKQESIVLKLQKEFPNFDKQELREVLKEHEWMYTEALESLKVFAEDQDVQCASQSEVTNGKEVARNQNYSKNATKIKMKQKISVKPQNGFNKKRKKNVFNPKKAVEDSEYDSGSDAGSSLDEDYSSCEEVMEDGYKGKILHFLQVSSIAELTLIPKCSQKKAQKITELRPFNNWEALFTKMSKINGLSEDLIWNCKTVIQERDVVIRLMNKCEDISNKLTKQVTMLTGNGGGWNREQPSLLNQSLSLKPYQKVGLNWLALVHKHGLNGILADEMGLGKTIQAIAFLAYLFQEGNKGPHLIVVPASTIDNWLREVNLWCPSLNVLCYYGSQEERKQIRFNIHNKYEDYNVIVTTYNCAISSSDDRSLFRRLKLNYAIFDEGHMLKNMGSIRYQHLMTINARNRLLLTGTPVQNNLLELMSLLNFVMPHMFSSSTSEIRRMFSSKTKPADEQSIYEKERIAHAKQIIKPFILRRVKEEVLKLLPPKKDRIELCAMSEKQEQLYSGLFNRLKKSINNLEKNTEMCNVMMQLRKMANHPLLHRQYYTPEKLKEMSQLMLKEPTHCEANPDLIFEDMEVMTDFELHVLCKQYQHINSYQLDMDLILDSGKFRALGCILSELKQKGDRVVLFSQFTMMLDILEVLLKHHQHRYLRLDGKTQISERIHLIDEFNTDMDIFVFLLSTKAGGLGINLTSANVVILHDIDCNPYNDKQAEDRCHRVGQTKEVLVIKLISQGTIEESMLKINQQKLKLEQDMTTVDEADEGSMPADIATLLKTSMGL

SEQ ID NO: 8085 - protein, 1071 aa, Mus musculus
SRGGGSGLAGFVEAAGARCGLRGGKAGAHLCGPASSLKAVSPLRVVVPPNMNLFNLDRFRFEKRSKIEEAPEAAPQPSQARPSSPISLSAEEENAEGEGSRANTPDSDVTEKTEDSSVPEPPDNERKASLSCFQNQRAIQEYIDLSSDTEDVSPNCSSTVQEKKFSKDTVIIVSEPSEDEESHDLPSVTRRNDSSELEDLSELEDLKDAKLQTLKELFPQRSDSDLLKLIESTSTMDGAIAAALLMFGDAGGGPRKRKLSSSSEEDDVNDDQSVKQPRGDRGEESNESAEASSNWEKQESIVLKLQKEFPNFDKQELREVLKEHEWMYTEALESLKVFAEDQDVQCASQSEVTNGKEVARNQNYSKNATKIKMKQKISVKPQNGFNKKRKKNVFNPKKAVEDSEYDSGSDAGSSLDEDYSSCEEVMEDGYKGKILHFLQVSSIAELTLIPKCSQKKAQKITELRPFNNWEALFTKMSKINGLSEDLIWNCKTVIQERDVVIRLMNKCEDISNKLTKQVTMLTGNGGGWNREQPSLLNQSLSLKPYQKVGLNWLALVHKHGLNGILADEMGLGKTIQAIAFLAYLFQEGNKGPHLIVVPASTIDNWLREVNLWCPSLNVLCYYGSQEERKQIRFNIHNKYEDYNVIVTTYNCAISSSDDRSLFRRLKLNYAIFDEGHMLKNMGSIRYQHLMTINARNRLLLTGTPVQNNLLELMSLLNFVMPHMFSSSTSEIRRMFSSKTKPADEQSIYEKERIAHAKQIIKPFILRRVKEEVLKLLPPKKDRIELCAMSEKQEQLYSGLFNRLKKSINNLEKNTEMCNVMMQLRKMANHPLLHRQYYTPEKLKEMSQLMLKEPTHCEANPDLIFEDMEVMTDFELHVLCKQYQHINSYQLDMDLILDSGKFRALGCILSELKQKGDRVVLFSQFTMMLDILEVLLKHHQHRYLRLDGKTQISERIHLIDEFNTDMDIFVFLLSTKAGGLGINLTSANVVILHDIDCNPYNDKQAEDRCHRVGQTKEVLVIKLISQGTIEESMLKINQQKLKLEQDMTTVDEADEGSMPADIATLLKTSMGL

SEQ ID NO: 8086 - protein, 1136 aa, Mus musculus
RLPQRIILFLSTFVPTRSLPGCKCVRACGRRAPFGGAPACQASSSAGPRRVYFRAARRSRFGPLCSRGGGSGLAGFVEAAGARCGLRGGKAGAHLCGPASSLKAVSPLRVVVPPNMNLFNLDRFRFEKRSKIEEAPEAAPQPSQARPSSPISLSAEEENAEGEGSRANTPDSDVTEKTEDSSVPEPPDNERKASLSCFQNQRAIQEYIDLSSDTEDVSPNCSSTVQEKKFSKDTVIIVSEPSEDEESHDLPSVTRRNDSSELEDLSELEDLKDAKLQTLKELFPQRSDSDLLKLIESTSTMDGAIAAALLMFGDAGGGPRKRKLSSSSEEDDVNDDQSVKQPRGDRGEESNESAEASSNWEKQESIVLKLQKEFPNFDKQELREVLKEHEWMYTEALESLKVFAEDQDVQCASQSEVTNGKEVARNQNYSKNATKIKMKQKISVKPQNGFNKKRKKNVFNPKKAVEDSEYDSGSDAGSSLDEDYSSCEEVMEDGYKGKILHFLQVSSIAELTLIPKCSQKKAQKITELRPFNNWEALFTKMSKINGLSEDLIWNCKTVIQERDVVIRLMNKCEDISNKLTKQVTMLTGNGGGWNREQPSLLNQSLSLKPYQKVGLNWLALVHKHGLNGILADEMGLGKTIQAIAFLAYLFQEGNKGPHLIVVPASTIDNWLREVNLWCPSLNVLCYYGSQEERKQIRFNIHNKYEDYNVIVTTYNCAISSSDDRSLFRRLKLNYAIFDEGHMLKNMGSIRYQHLMTINARNRLLLTGTPVQNNLLELMSLLNFVMPHMFSSSTSEIRRMFSSKTKPADEQSIYEKERIAHAKQIIKPFILRRVKEEVLKLLPPKKDRIELCAMSEKQEQLYSGLFNRLKKSINNLEKNTEMCNVMMQLRKMANHPLLHRQYYTPEKLKEMSQLMLKEPTHCEANPDLIFEDMEVMTDFELHVLCKQYQHINSYQLDMDLILDSGKFRALGCSLSELKQKGDRVVLFSQFTMMLDILEVLLKHHQHRYLRLDGKTQISERIHLIDEFNTDMDIFVFLLSTKAGGLGINLTSANVVILHDIDCNPYNDKQAEDRCHRVGQTKEVLVIKLISQGTIEESMLKINQQKLKLEQDMTTVDEADEGSMPADIATLLKTSMGL

SEQ ID NO: 8087 - protein, 1215 aa, Mus musculus
MWEEYPDVYGVRRSNRSRQEPSRFNVKEEASSGSESGSPKRRGQRQLKKQEKWKQDPSEDEQEQGTSAESEAEQKKGKARRPVPRRTVPKPQVKKQPKIQRGKRKKQESSDDDDDDDEAPKRQTRRRAAKNVSYKEDDDFETDSDDLIEMTGEGGDEQQDNSETIEKVLDSRLGKKGATGASTTVYAVEANGDPSDDFDTEREEGEVQYLIKWKGWSYIHSTWESEDSLQQQKVKGLKKLENFKKKEDEVKQWLGKVSPEDVEYFSCQQELASELNKQYQIVERVIAVKTSKSTLGQTDFPAHSRKPAPSNEPEYLCKWMGLPYSECSWEDEALIGKKFQNCIDSFHSRNNSKTIPTRECKALKQRPRFVALKKQPAYLGGESLELRDYQLEGLNWLAHSWCKSNSVILADEMGLGKTIQTISFLSYLFHQHQLYGPFLIVVPLSTLTSWQREFEIWAPEINVVVYIGDLMSRNTIREYEWIHSQTKRLKFNALITTYEILLKDKTVLGSINWAFLGVDEAHRLKNDDSLLYKTLIDFKSNHRLLITGTPLQNSLKELWSLLHFIMPEKFEFWEDFEEDHGKGRENGYQSLHKVLEPFLLRRVKKDVEKSLPAKVEQILRVEMSALQKQYYKWILTRNYKALAKGTRGSTSGFLNIVMELKKCCNHCYLIKAPEDSERESGQEVLQSLIRSSGKLILLDKLLTRLRERGNRVLIFSQMVRMLDILAEYLTIKHYPFQRLDGSIKGEIRKQALDHFNADGSEDFCFLLSTRAGGLGINLASADTVVIFDSDWNPQNDLQAQARAHRIGQKKQVNIYRLVTKGTVEEEIIERAKKKMVLDHLVIQRMDTTGRTVLENNSGRSNSNPFNKEELTAILKFGAEDLFKEIEGEESEPQEMDIDEILRLAETRENEVSTSATDELLSQFKVANFATMEDEEELEERPHKDWDEIIPEEQRKKVEEEERQKELEEIYMLPRIRSSTKKAQTNDSDSDTESKRQAQRSSASESETDDSDDDKKPKRRGRPRSVRKDLVEGFTDAEIRRFIKAYKKFGLPLERLECIARDAELVDKSVADLKRLGELIHNSCVSAMQEYEEQLKESTSEGKGPGKRRGPTIKISGVQVNVKSIIQHEEEFEMLHKSIPVDPEEKKKYCLTCRVKAAHFDVEWGVEDDSRLLLGIYEHGYGNWELIKTDPELKLTDKLQGFPAPGRRKSTSAGML

SEQ ID NO: 8088 - protein, 1240 aa, Mus musculus
MEASQGLAEVETLSPQLAESYLRYVQEAKEAAKNGDLEESLKLFNLAKDIFPTKKVMSRIQKLQEALEQLAEEEDDDEFIDVCSSGLLLYRELYEKLFEHQKEGIAFLYSLYKDGRKGGILADDMGLGKTVQIIAFLSGMFDASLVNHVLLIMPTNLINTWVNEFAKWTPGMRVKTFHGSSKSERTRSLTRIQQRNGVVITTYQMLLNNWQQLASFNGQAFVWDYVILDEAHKIKSASTKSAVCARAIPASNRLLLTGTPVQNNLQELWSLFDFACQGSLLGTLKTFKMEYEHPIIRAREKDATPGEKALGLKISENLMEIIKPYFLRRTKEEVQTKKADNPEARLGEKNPAGEAICDMFSLARKNDLIVWIRLLPLQEEIYRKFVSLDHIKELLMETRSPLAELGVLKKLCDHPRLLSARACRLLNLGTATFSAQDENEQEDVSNMNSIDHLPDKTLIQESGKMIFLMSLLERLQDEGHQTLVFSQSIKILNIIERLLKNKHFKTLRIDGTVTHLWEREKRIQLFQQNKEYSVFLLTTQVGGVGLTLTAATRVVIFDPSWNPATDAQAVDRVYRIGQKENVVVYRLITCGTVEEKIYRRQVFKDSLIRQTTGEKKNPFRYFTKQELKELFTVGDLQKSATQMQLQCLHAAQRRSDEKLDEHIAYLHLLGIAGISDHDLMFTRDLSVKEELDMLEDSQYIHQRVQKAQFLVESESQNTVQRQTTGIEETWLKAQEFPSQQKKKGTEFNKPQPQPSRLLTKPTQVEAISSQMASITICDQSAESEPQEHSEVHDVTSLQGSHHFNSTSDAGTIASLPQGAESIGEVSTDSLLSPAKGFAAENDAMQKKGLQASPGQEAPSENLGSFHYLPRESSKASLGPNLDLQDSVVLYHRSPTANENQNLESDVPMIEISDDLSEPPSALQGAQAIEAQLELKEDDPLKSPPQYACDFNLFLEDSADTRQNLSSKFLEHVEKEKSLQSPAANSRAKSALTLSLDSSPKSDEESEVISVKTKSKTRRILSDDEDEDEEDAFKGSHTNSINISPFPFSSVKQFDASTPQSGSNPSRRFFSPKTPGEVNTSLHSRRSLASRRSLINVVLDDVEDMEERLDNSSEEESEPGLSEENNEEEALACTEEQPSGATLASGNKSSNLTMSEPTSPAPQSSPCAPEPSSSDPMPDPPQDLAVEAGNDYESLVARGKELKECGKIQEALNCLVKALDIKSADPEVMLMTLSLYKQLNI

SEQ ID NO: 8089 - protein, 1240 aa, Mus musculus
MEASQGLAEVETLSPQLAESYLRYVQEAKEAAKNGDLEESLKLFNLAKDIFPTKKVMSRIQKLQEALEQLAEEEDDDEFIDVCSSGLLLYRELYEKLFEHQKEGIAFLYSLYKDGRKGGILADDMGLGKTVQIIAFLSGMFDASLVNHVLLIMPTNLINTWVNEFAKWTPGMRVKTFHGSSKSERTRSLTRIQQRNGVVITTYQMLLNNWQQLASFNGQAFVWDYVILDEAHKIKSASTKSAVCARAIPASNRLLLTGTPVQNNLQELWSLFDFACQGSLLGTLKTFKMEYEHPIIRAREKDATPGEKALGLKISENLMEIIKPYFLRRTKEEVQTKKADNPEARLGEKNPAGEAICDMFSLARKNDLIVWIRLLPLQEEIYRKFVSLDHIKELLMETRSPLAELGVLKKLCDHPRLLSARACRLLNLGTATFSAQDENEQEDVSNMNSIDHLPDKTLIQESGKMIFLMSLLERLQDEGHQTLVFSQSIKILNIIERLLKNKHFKTLRIDGTVTHLWEREKRIQLFQQNKEYSVFLLTTQVGGVGLTLTAATRVVIFDPSWNPATDAQAVDRVYRIGQKENVVVYRLITCGTVEEKIYRRQVFKDSLIRQTTGEKKNPFRYFTKQELKELFTVGDLQKSATQMQLQCLHAAQRRSDEKLDEHIAYLHLLGIAGISDHDLMFTRDLSVKEELDMLEDSQYIHQRVQKAQFLVESESQNTVQRQTTGIEETWLKAQEFPSQQKKKGTEFNKPQPQPSRLLTKPTQVEAISSQMASITICDQSAESEPQEHSEVHDVTSLQGSHHFNSTSDAGTIASLPQGAESIGEVSTDSLLSPAKGFAAENDAMQKKGLQASPGQEAPSENLGSFHYLPRESSKASLGPNLDLQDSVVLYHRSPTANENQNLESDVPMIEISDDLSEPPSALQGAQAIEAQLELKEDDPLKSPPQYACDFNLFLEDSADTRQNLSSKFLEHVEKEKSLQSPAANSRAKSALTLSLDSSPKSDEESEVISVKTKSKTRRILSDDEDEDEEDAFKGSHTNSINISPFPFSSVKQFDASTPQSGSNPSRRFFSPKTPGEVNTSLHSRRSLASRRSLINVVLDDVEDMEERLDNSSEEESEPGLSEENNEEEALACTEEQPSGATLASGNKSSNLTMSEPTSPAPQSSPCAPEPSSSDPMPDPPQDLAVEAGNDYESLVARGKELKECGKIQESLNCLVKALDIKSADPEVMLMTLSLYKQLNI

SEQ ID NO: 8090 - protein, 808 aa, Mus musculus
MLEEEEQLEAAGLEKERKMLEEAQKSWDRESTEIRYRRLQHLLEKSNIYSKFLLTKMEQQQLEEQKKKEKLEKKKRSLKLTEGKSLVDGNGEKPVMKKKRGREDESYNISEVMSKEEILSVAKKHKDNEDESSSTTSLCVEDIQKNKDSNSMIKDRLSQTVRQNSKFFFDPVRKCNGQPVPFQQPKHFTGGVMRWYQVEGMEWLRMLWENGINGILADEMGLGKTVQCIATIALMIQRGVPGPFLVCGPLSTLPNWMAEFKRFTPEIPTLLYHGTREDRRKLVKNIHKRQGTLQIHPVVVTSFEIAMRDQNALQHCYWKYLIVDEGHRIKNMKCRLIRELKRFNADNKLLLTGTPLQNNLSELWSLLNFLLPDVFDDLKSFESWFDITSLSETAEDIIAKEREQNVLHMLHQILTPFLLRRLKSDVALEVPPKREVVVYAPLCNKQEIFYTAIVNRTIANMFGSCEKETVELSPTGRPKRRSRKSINYSELDQFPSELEKLISQIQPEVNRERTVVEGNIPIESEVNLKLRNIMMLLRKCCNHPYMIEYPIDPVTQEFKIDEELVTNSGKFLILDRMLPELKKRGHKVLVFSQMTSMLDILMDYCHLRNFIFSRLDGSMSYSEREKNIYSFNTDPDVFLFLVSTRAGGLGINLTAADTVIIYDSDWNPQSDLQAQDRCHRIGQTKPVVVYRLVTANTIDQKIVERAAAKRKLEKLIIHKNHFKGGQSGLSQSKNFLDAKELMELLKSRDYEREVKGSREKVISDEDLELLLDRSDLIDQMKASRPIKGKTGIFKILENSEDSSAECLF

SEQ ID NO: 8091 - protein, 821 aa, Mus musculus
MAEQTEPAVITPAMLEEEEQLEAAGLEKERKMLEEAQKSWDRESTEIRYRRLQHLLEKSNIYSKFLLTKMEQQQLEEQKKKEKLEKKKRSLKLTEGKSLVDGNGEKPVMKKKRGREDESYNISEVMSKEEILSVAKKHKDNEDESSSTTSLCVEDIQKNKDSNSMIKDRLSQTVRQNSKFFFDPVRKCNGQPVPFQQPKHFTGGVMRWYQVEGMEWLRMLWENGINGILADEMGLGKTVQCIATIALMIQRGVPGPFLVCGPLSTLPNWMAEFKRFTPEIPTLLYHGTREDRRKLVKNIHKRQGTLQIHPVVVTSFEIAMRDQNALQHCYWKYLIVDEGHRIKNMKCRLIRELKRFNADNKLLLTGTPLQNNLSELWSLLNFLLPDVFDDLKSFESWFDITSLSETAEDIIAKEREQNVLHMLHQILTPFLLRRLKSDVALEVPPKREVVVYAPLCNKQEIFYTAIVNRTIANMFGSCEKETVELSPTGRPKRRSRKSINYSELDQFPSELEKLISQIQPEVNRERTVVEGNIPIESEVNLKLRNIMMLLRKCCNHPYMIEYPIDPVTQEFKIDEELVTNSGKFLILDRMLPELKKRGHKVLVFSQMTSMLDILMDYCHLRNFIFSRLDGSMSYSEREKNIYSFNTDPDVFLFLVSTRAGGLGINLTAADTVIIYDSDWNPQSDLQAQDRCHRIGQTKPVVVYRLVTANTIDQKIVERAAAKRKLEKLIIHKNHFKGGQSGLSQSKNFLDAKELMELLKSRDYEREVKGSREKVISDEDLELLLDRSDLIDQMKASRPIKGKTGIFKILENSEDSSAECLF

SEQ ID NO: 8092 - protein, 685 aa, Mus musculus
DRWCPGERCLAPSLDNKKLCEASIKSITVDGNGKPFAVVLYPDFQEKTIPLQRLQEVKSTKDYSRSLIFDDEDLEKPYFPDRKIPSLASAFQLSEDGDSIPYTINRYLRDYQREGAQFLYRHYIEGRGCILGDDMGLGKTIQVISFLAAVLHKKGTREDIENNMPEFLLKSMKKKPPSTAKKMFLIVAPLSVLYNWKDELDTWGYFRVTVLHGSKKDNELLRLKQRKCEIALTTYETLRLCLEELNSLEWSAIIVDEAHRIKNPKARVTEVMKAVKCKVRIGLTGTILQNNMKELWCVMDWAVPGLLGSRIHFKKQFSDPVEHGQRHTATKRELATGRKAMHRLAKKMSGWFLRRTKTLIKGQLPKKEDRMVYCSLTDFQKAVYQTVLETEDVALILTSSQPCTCGSGQKRRKCCYKTNSRGDTVRTLCLSYLTVLQKIANHVALLQAASTSKHQETVIKRICDRVFSRFPDFVQKSKDAAFETLSDPKYSGKMKVLQQLLNHFRKQRDKVLLFSFSTKLLDVLQQYCMASGLDYRRLDGSTKSEERLKIVKEFNSSQDVNICLVSTMAGGLGLNFVGANVVILFDPTWNPANDLQAVDRAYRIGQCRDVKVLRLISLGTVEEIMYLRQVYKQQLHCVVVGSENAKRYFEAVQGSKEHRGELFGVHNLFKLRSQGSCLTRDILEV

SEQ ID NO: 8093 - protein, 1139 aa, Mus musculus
MDLVKCPEHGDACFLKTGVRDGPNKGKSFYVCRTNTCGFVQATDIPVSHCLLHEEFVVELQGLFLPQDKKEWRLFFRCARTKAEGKQWCGNVPWRQDPNRKELSVTSKPQQPSESQLHSPSQPRNPFRVLNKNQKTLERKQFVEEGERKTADKKLRENNEQLLDQRKEQKPKSNCRMEKDPSSDLVATRQSGGDREEQEEKSKFQPKTKKAEGMASKQGHGEVLQGIPKGPHMSESESRGVPNKPEPLREKETQLLVPSVPGQNPESKVQKEGHVSREPLKNGEAPSAQVAQKGLAQGPLQGPSKTWRPVPEAPAAPGLCSGMAHHATSSSEDSEDDGVSSRPGSPLLFDSTVDSKKKGSLQHSDQSVQRQMPAASGVSKKGDSSDPAAQRANLTTQLKQKKGTLAAVNIQALPDKGEKLLKQIQALEDALSALALSSDQGTKEKCSAQEPEQSNITKAAAAPLHLVPPQPLPRPLIQPASSLGLKAGRQETPEGASQCSGGHMNQHHLYNVWKITSEAIDELHRSLKSCPGETAVAEDPAGLKVPLLLHQKQALAWLLWRESQKPQGGILADDMGLGKTLTMIALILTKKNQQKSKEKERSEPVTWLSKNDSSVFTSSGTLIVCPASLIHHWKNEVEKRVTSNRLRIYLYHGPNRSRHAKVLSTYDIVITTYSLLAKEIPTTKQEGEVPGANLSVEGTSAPLLQVVWARIILDEAHNVKNPRVQTSIAVCKLQAQARWAVTGTPIQNNLLDMYSLMKFLRCSPFDEFSLWKSQVDNGSMKGGERLSILTKSLLLRRTKDQLDSTGKPLVALPARRCQLHRLKLSEDERAVYDIFLARSRSALQSYLKRQEGRGSHHGRSPDNPFSRVAQEFGSSVSQGCPAADSQRPSTVHVLSQLLRLRQCCCHLSLLKSALDPTELESEGLVLSLEEQLSALTLSKVDVSEPSPTVSLNGTCFKAELFDDTRRSTKVSSLLAELEAIQKGPGSQKSVIVSQWTSMLQVVALHLKKNRLTYATIDGSVNPKQRMDLVEAFNHSQGPQVMLISLLAGGVGLNLTGGNHLFLLDMHWNPSLEDQACDRIYRVGQKKDVVIHRFVCEGTVEEKILQLQEKKKDLAKQVLSGSEGPVTKLTLADLKILFGI

SEQ ID NO: 8094 - protein, 1138 aa, Mus musculus
MDLVKCPEHGDACFLKTGVRDGPNKGKSFYVCRTNTCGFVQATDIPVSHCLLHEEFVVELQGLFLPQDKKEWRLFFRCARTKAEGKQWCGNVPWRQDPNPKELSVTSKPQQPSESQLHSPSQPRNPFRVLNKNQKTLERKQFVEEGERKTADKKLRENNEQLLDQRKEQKPKSNSRMEKDPSSDLVATRQSGGDREEQEKSKFQPKTKKAEGMASKQGHGEVLQGIPKGPHMSESESRGVPNKPETLREKETQLLVPSVPGQNPESKVQKEGHVSREPLKNGEAPSAQVTQRGLAQGPLQGPSKTWRPVPEAPAAPELCSGMAHHATSSSEDSEDDGVSSRPGSPLLFDSTVDSQKKGSLQHSDQSVQRQMPAASGVSKKGDSSDPAAQRANLTTQLKQKKGTLAAVNIQALPDKGEKLLKQIQALEDALSALALSPEQGTKEKCSAQEPEQSNITKAAAAPLHLVPPQPLPRPLIQPASSLGLKAGRQETPEGASQCSGGHMNQHHLYNVWKITSEAIDELHRSLKSCPGETAVAEDPAGLKVPLLLHQKQALAWLLWRESQKPQGGILADDMGLGKTLTMIALILTKKNQQKSKEKERSEPVTWLSKNDSSVFTSSGTLIVCPASLIHHWKNEVEKRVTSNRLRIYLYHGPNRSRHAKVLSTYDIVITTYSLLAKEIPTTKQEGEVPGANLSVEGTSAPLLQVVWARIILDEAHNVKNPRVQTSIAVCKLQAQARWAVTGTPIQNNLLDMYSLMKFLRCSPFDEFSLWKSQVDNGSMKGGERLSILTKSLLLRRTKDQLDSTGKPLVALPARRCQLHRLKLSEDERAVYDIFLARSRSALQSYLKRQEGRGSHHGRSPDNPFSRVAQEFGSSVSQGCPAADSQRPSTVHVLSQLLRLRQCCCHLSLLKSALDPTELESEGLVLSLEEQLSALTLSKVDVSEPSPTVSLNGTCFKAELFDDTRRSTKVSSLLAELEAIQKGPGSQKSVIVSQWTSMLQVVALHLKKNRLTYATIDGSVNPKQRMDLVEAFNHSQGPQVMLISLLAGGVGLNLTGGNHLFLLDMHWNPSLEDQACDRIYRVGQKKDVVIHRFVCEGTVEEKILQLQEKKKDLAKQVLSGSEGPVTKLTLADLKILFGI

SEQ ID NO: 8095 - protein, 603 aa, Mus musculus
MLWENGINGILADEMGLGKTVQCIATIALMIQRGVPGPFLVCGPLSTLPNWMAEFKRFTPEIPTLLYHGTREDRRKLVKNIHKRQGTLQIHPVVVTSFEIAMRDQNALQHCYWKYLIVDEGHRIKNMKCRLIRELKRFNADNKLLLTGTPLQNNLSELWSLLNFLLPDVFDDLKSFESWFDITSLSETAEDIIAKEREQNVLHMLHQILTPFLLRRLKSDVALEVPPKREVVVYAPLCNKQEIFYTAIVNRTIANMFGSCEKETVELSPTGRPKRRSRKSINYSELDQFPSELEKLISQIQPEVNRERTVVEGNIPIESEVNLKLRNIMMLLRKCCNHPYMIEYPIDPVTQEFKIDEELVTNSGKFLILDRMLPELKKRGHKVLVFSQMTSMLDILMDYCHLRNFIFSRLDGSMSYSEREKNIYSFNTDPDVFLFLVSTRAGGLGINLTAADTVIIYDSDWNPQSDLQAQDRCHRIGQTKPVVVYRLVTANTIDQKIVERAAAKRKLEKLIIHKNHFKGGQSGLSQSKNFLDAKELMELLKSRDYEREVKGSREKVISDEDLELLLDRSDLIDQMKASRPIKGKTGIFKILENSEDSSAECLF

SEQ ID NO: 8096 - protein, 891 aa, Mus musculus
MKMKIQKKEKQLSKLRALNHSPMSDASVNFDYKSPSPFDCSPDQGENIEEAANHCLPHKNLYTTEEEADTLFSRKLTSHNGMVDSGGRGTGVKKKRKKKEPGEQEGTKGSKDREPKPKRKREPKEPKEPRRAKEPKRAKEPKETKQKDGVKKPRKHREASGTKEGKEKRSCTDYGSRTKSKKASREQGPTPVERKKKGKRKNETTVESLELDHSLPNPSLQSPEEPSESADSQKRRSGRQVKRRKYNEDLDFKVVDDDGETIAVLGAGRTSALSASTLAWQAEEPPEDDANIIEKILASKTVQEVHPGEPPFDLELFYVKYRNFSYLHCKWATMEELEKDPRIAQKIKRFRNKQAQMKHIFTEPDEDLFNPDYIEIDRILEVAHTKDAETGEEVTHYLVKWCSLPYEESTWELEEDVDPAKVKEFESLQILPEVKHVERPASDAWQKLETSREYRNSNRLREYQLEGMNWLLFNWYNRKNCILADEMGLGKTIQSIAFLSEIFVRGIHGPFLIIAPLSTITNWEREFRTWTEMNAIVYHGSQISRQMIQQYEMVYRDAQGNPLSGVFKFHVVITTFEMILADCPELKKIHWSCVIIDEAHRLKNRNCKLLEGLKLMALEHKVLLTGTPLQNSVEELFSLLNFLEPSQFPSETAFLEEFGDLKTEEQVKKLQSILKPMMLRRLKDDVEKNLAPKQETIIEVELTNIQKKYYRAILEKNFSFLTKGANQHNVPNLINTMMELRKCCNHPYLINGAEEKILEDFRKAHSSEASDFQLQAMIQAAGKLVLIDKLLPKLIAGGHKVLIFSQMVRCLDILEDYLIQRRYTYERIDGRVRGNLRQAAIDRFCKPDSDRFVFLLCTRAGGLGINLTAADTCIIFDSDWNPQNDLQVTIG

SEQ ID NO: 8097 - protein, 551 aa, Mus musculus
MGLGKTIQVISFLAAVLHKKGTREDIENNMPEFLLKSMKKKPPSTAKKMFLIVAPLSVLYNWKDELDTWGYFRVTVLHGSKKDNELLRLKQRKCEIALTTYETLRLCLEELNSLEWSAIIVDEAHRIKNPKARVTEVMKAVKCKVRIGLTGTVLQNNMKELWCVMDWAVPGLLGSRIHFKKQFSDPVEHGQRHTATKRELATGRKAMHRLAKKMSGWFLRRTKTLIKGQLPKKEDRMVYCSLTDFQKAVYQTVLETEDVALILTSSQPCTCGSGQKRRKCCYKTNSRGDTVRTLCLSYLTVLQKVANHVALLQAASTSKHQETVIKRICDRVFSRFPDFVQKSKDAAFETLSDPKYSGKMKVLQQLLNHFRKQRDKVLLFSFSTKLLDVLQQYCMASGLDYRRLDGSTKSEERLKIVKEFNSSQDVNICLVSTMAGGLGLNFVGANVVILFDPTWNPANDLQAVDRAYRIGQCRDVKVLRLISLGTVEEIMYLRQVYKQQLHCVVVGSENAKRYFEAVQGSKEHRGELFGVHNLFKLRSQGSCLTRDILEV

SEQ ID NO: 8098 - protein, 577 aa, Mus musculus
MEASQGLAEVETLSPQLAESYLRYVQEAKEAAKNGDLEESLKLFNLAKDIFPTKKVMSRIQKLQEALEQLAEEEDDDEFIDVCSSGLLLYRELYEKLFEHQKEGIAFLYSLYKDGRKGGILADDMGLGKTVQIIAFLSGMFDASLVNHVLLIMPTNLINTWVNEFAKWTPGMRVKTFHGSSKSERTRSLTRIQQRNGVVITTYQMLLNNWQQLASFNGQAFVWDYVILDEAHKIKSASTKSAVCARAIPASNRLLLTGTPVQNNLQELWSLFDFACQGSLLGTLKTFKMEYEHPIIRAREKDATPGEKALGLKISENLMEIIKPYFLRRTKEEVQTKKADNPEARLGEKNPAGEAICDMFSLARKNDLIVWIRLLPLQEEIYRKFVSLDHIKELLMETRSPLAELGVLKKLCDHPRLLSARACRLLNLGTATFSAQDENEQEDVSNMNSIDHLPDKTLIQESGKMIFLMSLLERLQDEGHQTLVFSQSIKILNIIERLLKNKHFKTLRIDGTVTHLWEREKRIQLFQQNKEYSVFLLTTQVGGVGLTLTAATRVVIFDPSWNPATDAQAVDRVYRIG

SEQ ID NO: 8099 - protein, 747 aa, Mus musculus
MRRSLAPSQLARRKPEDRSSDDEDWQPGTVTPKKRKSSSETQVQECFLSPFRKPLTQLLNRPPCLDSSQHEAFIRSILSKPFKVPIPNYQGPLGSRALGLKRAGVRRALHDPLEEGALVLYEPPPLSAHDQLKLDKEKLPVHVVVDPVLSKVLRPHQREGVKFLWECVTSRRIPGSHGCIMADEMGLGKTLQCITLMWTLLRQSPECKPEIEKAVVVSPSSLVKNWYNEVEKWLGGRIQPLAIDGGSKDEIDRKLEGFMNQRGARVPSPILIISYETFRLHVGVLKKGNVGLVICDEGHRLKNSENQTYQALDSLNTSRRVLISGTPIQNDLLEYFSLVHFVNSGILGTAHEFKKHFELPILKSRDAAASEADRQRGEERLRELIGIVNRCLIRRTSDILSKYLPVKIEQVVCCRLTPLQTELYKRFLRQAKPEEELREGKMSVSSLSSITSLKKLCNHPALIYDKCVAEEDGFEGTLGIFPPGYNSKAVEPQLSGKMLVLDYILAVTRSRSSDKVVLVSNYTQTLDLFEKLCRVRRYLYVRLDGTMSIKKRAKVVERFNSPSSPDFVFMLSSKAGGCGLNLIGANRLVMFDPDWNPANDEQAMARVWRDGQKKICYIYRLLSAGTIEEKIFQRQSHKKALSSCVVDEEQDVERHFSLGELKELFTLDEASLSDTHDRLHCRRCVNNRQVWPPPDGSDCTSDLAQWNHSTDKRGLQDEVLQAAWDASSTAITFVFHQRSHEEQRGLH

SEQ ID NO: 8100 - protein, 813 aa, Mus musculus
MRRSLAPSQLARRKPEDRSSDDEDWQPGTVTPKKRKSSSETQVQECFLSPFRKPLTQLLNRPPCLDSSQHEAFIRSILSKPFKVPIPNYQGPLGSRALGLKRAGVRRALHDPLEEGALVLYEPPPLSAHDQLKLDKEKLPVHVVVDPILSKVLRPHQREGVKFLWECVTSRRIPGSHGCIMADEMGLGKTLQCITLMWTLLRQSPECKPEIEKAVVVSPSSLVKNWYNEVEKWLGGRIQPLAIDGGSKDEIDRKLEGFMNQRGARVPSPILIISYETFRLHVGVLKKGNVGLVICDEGHRLKNSENQTYQALDSLKTSRRVLISGTPIQNDLLEYFSLVHFVNSGILGTAHEFKKHFELPILKSRDAAASEADRQRGEERLRELIGIVNRCLIRRTSDILSKYLPVKIEQVVCCRLTPLQTELYKRFLRQAKPEEELREGKMSVSSLSSITSLKKLCNHPALIYDKCVAEEDGFEGTLGIFPPGYNSKAVEPQLSGKMLVLDYILAVTRSRSSDKVVLVSNYTQTLDLFEKLCRVRRYLYVRLDGTMSIKKRAKVVERFNSPSSPDFVFMLSSKAGGCGLNLIGANRLVMFDPDWNPANDEQAMARVWRDGQKKICYIYRLLSAGTIEEKIFQRQSHKKALSSCVVDEEQDVERHFSLGELKELFTLDEASLSDTHDRLHCRRCVNNRQVWPPPDGSDCTSDLAQWNHSTDKRGLQDEVLQAAWDASSTAITFVFHQRSHEEQRSSLIISWSGCSCLGKDTGKGGSLPHEALLSFILWEKIIKKGCMMFAQNLFYKKNFFGLKKKKKKKGIKA

SEQ ID NO: 8101 - protein, 747 aa, Mus musculus
MRRSLAPSQLARRKPEDRSSDDEDWQPGTVTPKKRKSSSETQVQECFLSPFRKPLTQLLNRPPCLDSSQHEAFIRSILSKPFKVPIPNYQGPLGSRALGLKRAGVRRALHDPLEEGALVLYEPPPLSAHDQLKLDKEKLPVHVVVDPILSKVLRPHQREGVKFLWECVTSRRIPGSHGCIMADEMGLGKTLQCITLMWTLLRQSPECKPEIEKAVVVSPSSLVKNWYNEVEKWLGGRIQPLAIDGGSKDEIDRKLEGFMNQRGARVPSPILIISYETFRLHVGVLKKGNVGLVICDEGHRLKNSENQTYQALDSLNTSRRVLISGTPIQNDLLEYFSLVHFVNSGILGTAHEFKKHFELPILKSRDAAASEADRQRGEERLRELIGIVNRCLIRRTSDILSKYLPVKIEQVVCCRLTPLQTELYKRFLRQAKPEEELREGKMSVSSLSSITSLKKLCNHPALIYDKCVAEEDGFEGTLGIFPPGYNSKAVEPQLSGKMLVLDYVLAVTRSRSSDKVVLVSNYTQTLDLFEKLCRVRRYLYVRLDGTMSIKKRAKVVERFNSPSSPDFVFMLSSKAGGCGLNLIGANRLVMFDPDWNPANDEQAMARVWRDGQKKICYIYRLLSAGTIEEKIFQRQSHKKALSSCVVDEEQDVERHFSLGELKELFTLDEASLSDTHDRLHCRRCVNNRQVWPPPDGSDCTSDLAQWNHSTDKRGLQDEVLQAAWDASSTAITFVFHQRSHEEQRGLH

SEQ ID NO: 8102 - protein, 747 aa, Mus musculus
MRRSLAPSQLARRKPEDRSSDDEDWQPGTVTPKKRKSSSETQVQECFLSPFRKPLTQLLNRPPCLDSSQHEAFIRSILSKPFKVPIPNYQGPLGSRALGLKRVGVRRALHDPLEEGALVLYEPPPLSAHDQLKLDKEKLPVHVVVDPILSKVLRPHQREGVKFLWECVTSRRIPGSHGCIMADEMGLGKTLQCITLMWTLLRQSPECKPEIEKAVVVSPSSLVKNWYNEVEKWLGGRIQPLAIDGGSKDEIDRKLEGFMNQRGARVPSPILIISYETFRLHVGVLKKGNVGLVICDEGHRLKNSENQTYQALDSLNTSRRVLISGTPIQNDLLEYFSLVHFVNSGILGTAHEFKKHFELPILKSRDAAASEADRQRGEERLRELIGIVNRCLIRRTSDILSKYLPVKIEQVVCCRLTPLQTELYKRFLRQAKPEEELREGKMSVSSLSSITSLKKLCNHPALIYDKCVAEEDGFEGTLGIFPPGYNSKAVEPQLSGKMLVLDYILAVTRSRSSDKVVLVSNYTQTLDLFEKLCRVRRYLYVRLDGTMSIKKRAKVVERFNSPSSPDFVFMLSSKAGGCGLNLIGANRLVMFDPDWNPANDEQAMARVWRDGQKKICYIYRLLSAGTIEEKIFQRQSHKKALSSCVVDEEQDVERHFSLGELKELFTLDEASLSDTHDRLHCRRCVNNRQVWPPPDGSDCTSDLAQWNHSTDKRGLQDEVLQAAWDASSTAITFVFHQRSHEEQRGLH

SEQ ID NO: 8103 - protein, 388 aa, Mus musculus
MASGLPRFLQALPAEHGPEPLRTRVQEPDLQQWGLTGIRLRSYQLEGVNWLVQCFHCQNGCILGDEMGLGKTCQTIALLIYLVGRLNDEGPFLVLCPLSVLSNWKEEMERFAPGLSCVTYTGDKEERARLQQDLRQESGFHVLLTTYEICLKDASFLKSFSWSVLAVDEAHRLKNQSSLLHRTLSEFSAVFRLLLTGTPIQNSLRELYSLLCVVEPDLFCREQVEDFVQRYQDIEKESKSASELHRLLQPFLLRRVKAQVATELPKKTEVVVYHGMSALQKKYYKAILMKDLDAFENETAKKVKLQNILTQLRKCVDHPYLFDGVEPEPFEVGEHLIEASGKLHLLDRLLAFLYSGGHRVLLFSQMTHMLDILQDYMDYRGDSPCPLQ

SEQ ID NO: 8104 - protein, 749 aa, Mus musculus
KDKHILAKIRWKYMIVDEGHRMKNHHCKLTQVLNTHYVAPRRLLLTGTPLQNKLPELWALLNFLLPTIFKSCSTFEQWFNAPFAMTGEKVDLNEEETILIIRRLHKVLRPFLLRRLKKEVEAQLPEKVEYVIKCDMSALQRVLYRHMQAKGVLLTDGSEKDKKGKGGTKTLMNTIMQLRKICNHPYMFQHIEESFSEHLGFTGGIVQGLDLYRASGKFELLDRILPKLRATNHKVLLFCQMTSLMTIMEDYFAYRGFKYLRLDGTTKAEDRGMLLKTFNEPGSEYFIFLLSTRAGGLGLNLQSADTVIIFDSDWNPHQDLQAQDRAHRIGQQNEVRVLRLCTVNSVEEKILAAAKYKLNVDQKVIQAGMFDQKSSSHERRAFLQAILEHEEQDEEEDEVPDDETVNQMIARHEEEFDLFMRMDLDRRREEARNPKRKPRLMEEDELPSWIIKDDAEVERLTCEEEEEKMFGRGSRHRKEVDYSDSLTEKQWLKAIEEGTLEEIEEEVRQKKSSRKRKRDSEAGSSTPTTSTRSRDKDEESKKQKKRGRPPAEKLSPNPPNLTKKMKKIVDAVIKYKDSSGRQLSEVFIQLPSRKELPEYYELIRKPVDFKKIKERIRNHKYRSLNDLEKDVMLLCQNAQTFNLEGSLIYEDSIVLQSVFTSVRQKIEKEDDSEGEESEEEEEGEEEGSESESRSVKVKIKLGRKEKAQDRLKGGRRRPSRGSRAKPVVSDDDSEEEQEEDRSGSGSEED

SEQ ID NO: 8105 - protein, 498 aa, Mus musculus
MKKSKLSETVREFKTTNRLLLTGTPLQNNLHELWSLLNFLFPNVFNSADDFDSWVDTNNCLGDQKLVERLHMVLCPFLFRRIKADVEKSLPPKKEVKIYVGLSKMQREWYTRILIKDIDILNSAGKMDKMRLLNILMQLRKCCNHPYLFDGAEPGPLYTTDTHLVTNSGKMVVLDKLLPKLKEQGSRVLIFSQMTRVLDILEDYCMWRNYEYCRLDEQTPHDERQDSINAYNEPNSTKFVFMLNTRAGGLGINLATADVVILYDSDWNPQIDLQPMDHAHRIGQRKTVRVFRFITDNTVEERIVERAEMKLRLDSIVIQQGRLVDQNLNKIGKDEMLQMIRRGATHVFASKESEITDEDIDGILERGAKKTAEMNEKLSKMGERSLRNFTMDTESSVYNFEGEDYREKQKSAFTEWIEPPKRERKANYAVDAYFREALRVSEPKAPKAPRPPKQLNVQDFQFFPPGLCELLEKEILYYRKTIGYKVPWSPDLPNAAQA

SEQ ID NO: 8106 - protein, 561 aa, Mus musculus
MEELEKDPRIAQKIKRFRNKQAQMKHIFTEPDEDLFNPDDIEIDRILEVAHTKDAETGEEVTHYLVKWCSLPYEESTWELEEDVDPAKVKEFESLQILPEVKHVERPASDAWQKLETSREYRNSNRLREYQLEGMNWLLFNWYNRKNCILADEMDLGKTIQSIAFLSEIFVRGIHGPFLIIAPLSTITNWEREFRTWTEMNAIVYHGSQISRQMIQQYEMVYRDAQGNPLSGVFKFHVVLTTFEMILADCPELKKIHWSCVIIDEAHRLKNRNCKLLEGLKLMALEHKVLLTGTPLQNSVEELFSLLNFLEPSQFPSETAFLEEFGDLKTEEQVKKLQSILKPMMLRRLKDDVEKNLAPKQETIIEVELTNIQKKYYRAILEKNFSFLTKGANQHNMPNLINTMMELRKCCNHPYLINGAEEKILEDFRKAHSSEASDFQLQAMIQAAGKLVLIDKLLPKLIAGGHKVLIFSQMVRCLDILEDYLIQRRYTYERIDGRVRGNLRRQPSTGSVSQTQTALSFFCAPEREAWESISQLLIPASYLILTGTHKMTCRLRPDVIV

SEQ ID NO: 8107 - protein, 2999 aa, Mus musculus
MHHGSGPQNVQHQLQRSRSFTGSEEEQPAHPNLPPSPAAPFAPSASPSAPQSPGYQIQQLMSRSPVAGQNVNITLQNVGPVVGGNQQITLAPLPLPNPTSPGFQFGAQQRRFEHGSPSYIQVTSPMSQQVQTQSPTQPSPGPGQTLQNVRAGAPGPGLGICSSSPTGGFVDASVLVRQISLSPSSGGHFVFQEAPGLTQMAQGAQVQLQHSGAPITVRERRLSQPHAQSGGTIHHLGPQSPAAAGGTGLQPLASPNHITTASLPPQISSIIQGQLIQQQQQVLQGQPMNRSLGFERTPGVLLPGVGGPSAFGMTSPPPPTSPSRTTMPPGLSSVPLTSMGSSGMKKVPKKLEEIPPASQEMAQMRKQCLDYHYKEMEALKEVFKEYLIELFFLQHLQGNMMDFLAFKKKHYAPLQAYLRQNDLDIEEEEEEEEEEEGKSEVINDEHQSLTGSLVVGPGSATEADPFKRQQVMPPTGGMPPTPQATQLTGQKQSQQQYDPSTGPPVQNAASLHTPPPQLPARLPPASVPATALPSTLQFSQQSQMVEASTQLQIPVKTQQLNAPIPAPLPSQLPAPSSQPAQPALHVPMPGKAQMQTSQLSSQTQTVASTRPPLDSAQPCQRSLPTSSSSSSLVPVSGSGPGPSPARSSPVNRPSSATNKALSPITSRSPGVAVSAPPKPQSPAQNAASSQDGSQDKLAEQITLENQIHQRIADLRKEGLWSLRRLPKLQEAPRPKSHWDYLLEEMQWMATDFAQERRWKLAAAKKLVRTVARHHEEKKLREERGKKEEQSRLRRIAATTAREIEYFWSNIEQVVEIKLQVELEEKRKKALNLQKVSRRGKESRLKGFDTSPEHSLDLGISGRKRKASTSLTDDEVEDEEETIEEEEAHEGLVDHHTELTNLAKEAELPLIDLMKLYEGAFLPNFQWPQPEPDHEESSGEEDVEDCPSDRESRRDSVLIDSLFIMDQFKAAERMSIGKSNTKDITEVTAVAEAILPKGSARVTTAVKFSAPSLLYGALRDYQKIGLDWLAKLYRKNLNGILADEAGLGKTVQIIAFFAHLACNEGNWGPHLVVMRSCNILKWELELKRWCPGLKTLSYVGSHRELKAKRQEWTEPNNFHICITSYKQFFRGYTAFSRVHWKCLVVDEMQRVKGMTERHWEAIFKLQSQQRLLLIDVPLHNTFLELWTMVHFLIPGISRPYLSFPLKAPNEENQDYYHKMVIRLHRVTQPFILRRTKRDVEKQLTRKYEHVLKCRLSSRQKALYEDVILQPRTQEALKSGHFVSVLSVLTRLQRICNHPGLVEPRVPGSSFAAGSLQYKSASLILRVLEREFWKETDLSIFDLIGLENKITRHEAELLCKKKVTRKLMEEVFASPPPSARPAAVKLKASRLFQPVQYGQKPEGRTVAFPSTHPPRMANTNTSTATPQGQVRGRPPIATFSANPDTKGGEVVKIAQLASIAGPQSRVAQPETPVTLQFQGNKFTLSHSQLRQLTAGQPLQLQGSVLQIVSAPGQPYLRAPGPVVMQTVSQAGAVHSTLGSKPPTSGPSPAPLTPQVGVPGRVAVSAMAVGEPGLASKPASPAAGPTQEEKSRLLKERLDQIHFINERRCSQAPVYGRDLLRICSLPGRRKRPLCWSLDSNFGKGPKGVNYDMSLSKSEGDLILTLSQESLQDVLGRVACVIPPVVATPPSLWVARPPSLYSSRLRALRQCLREHTGPYHRQLQQLTALRSLQFPELRLVQFDSGKLEALAILLQKLKSEGRRVLILSQMVLMLDILEMFLNFHYLTYVRIDENANSEQRQELMRSFNRDRRIFCALLSTHSRATGINLVEADTVVFYDNDLNPVMDAKAQEWCDRIGRCKDIHIYRLVSGNSIEEKLLKNGTKDLIREVAAQGNDYSMAFLTQRTIQELFEVYSPMDDTGFPVKAEEFVVLSQEPSVSETIAPKIARPFIEALKSIECLEEDAQRSTEEAVPGSSSVAVSSDSDGSRYDEEPSQLEELADFMEQLTPIEKYALNYLELFHTTTEQEKERISEDLVMASMKDWETRNARALQEREARLQLEQEEAELLTYTREDAYTMEYVYEDADGQTEVMPLWTPPTPPQDDNDIYIDSVMCLMYETTPIPEAKLPPVYVRKERKRHKTDPSAAGRKKKQRHGEAVVPPRSLFDRATPGMLKIRREGKEQKKNLLLKQQTPFAKPLPTYVKSSGEPAQDSPDWLIGEDWALLQAVKQLLELPLNLTIVSPAHTPNWDLVSDVVNSCSRIYRSSKQCRNRYENVIIPREEGKSKNNRPLRTSQIYAQDENATHTQLYTSHFELMKMTAGKRSPPIKPLLGMNPFQKNPKHASVLAESGINYDKPLPPIQVASLRAERIAKEKKALADQQKAQQPPVTQPPPQQQQQQQQQQQQQQQQQQPPPPPQQPPPPVPQPQAASSQTPAGQPAVQPQPQPQVQAQPQPVQPQSKGQPTMTTVGSVAVLAGTIKTSVTGTSIPTGTVSGNVIVNTIAGVPAATFQSINKRLASPVAPGTLTTSGGSAPAQVVHTQQRAVGSPATATTDLVSMTTTQGVRAVTSVTASAVVTTNLTPVQTPTRSLVTQVSQATGVQLPGKTITPAAHFQLLRQQQQQQQQQQQQQQTSQVQVPQLQSQAQSPAQIKAVSKLGPEHIIKMQKQKMQLPPQPPPPQAQPGPPQQPAQVQVQTPQPPQQQQSPQLTTVTAPRPGALLTGTTVTNLQVARLTRVPTSQLQAQGQMQTQTPQPAQVALAKPPVVSVPAAVVSSPGVTTLPMNVAGISVAIGQPQKTAGQTVVAQPVNVQQLLKYKQQTAVQQQKAIQPQVAQGQAAVQQKLTTQQITTQGPQQKVAYAAQPALKTQFLTTPISQAQKLAGTQQVQTQIQVAKLPQVVQQQTPVASIQQVASASQQASPQTVTLTQATAAGQQVQMIPTVTATAQLVQQKLIQQQVVTTASASLQTPGGPSPAQLPASSDSPSQQPKLQMRVPAVRLKTPTKPPCQ

SEQ ID NO: 8108 - protein, 3035 aa, Mus musculus
MHHGSGPQNVQHQLQRSRSFTGSEEEQPAHPNLPPSPAAPFAPSASPSAPQSPGYQIQQLMSRSPVAGQNVNITLQNVGPVVGGNQQITLAPLPLPNPTSPGFQFGAQQRRFEHGSPSYIQVTSPMSQQVQTQSPTQPSPGPGQTLQNVRAGAPGPGLGICSSSPTGGFVDASVLVRQISLSPSSGGHFVFQEAPGLTQMAQGAQVQLQHSGAPITVRERRLSQPHAQSGGTIHHLGPQSPAAAGGTGLQPLASPNHITTASLPPQISSIIQGQLIQQQQQVLQGQPMNRSLGFERTPGVLLPGVGGPSAFGMTSPPPPTSPSRTTMPPGLSSVPLTSMGSSGMKKVPKKLEEIPPASQEMAQMRKQCLDYHYKEMEALKEVFKEYLIELFFLQHLQGNMMDFLAFKKKHYAPLQAYLRQNDLDIEEEEEEEEEEEGKSEVINDEHQSLTGSLVVGPGSATEADPFKRQQVMPPTEQSKRPRLEVGHPGVVFQHPGVNAGVPLQQLMPTVQGGMPPTPQATQLTGQKQSQQQYDPSTGPPVQNAASLHTPPPQLPARLPPASVPATALPSTLQFSQQSQMVEASTQLQIPVKTQQLNAPIPAPLPSQLPAPSSQPAQPALHVPMPGKAQMQTSQLSSQTQTVASTRPPLDSAQPCQRSLPTSSSSSSLVPVSGSGPGPSPARSSPVNRPSSATNKALSPITSRSPGVAVSAPPKPQSPAQNAASSQDGSQDKLAEQITLENQIHQRIADLRKEGLWSLRRLPKLQEAPRPKSHWDYLLEEMQWMATDFAQERRWKLAAAKKLVRTVARHHEEKKLREERGKKEEQSRLRRIAATTAREIEYFWSNIEQVVEIKLQVELEEKRKKALNLQKVSRRGKESRLKGFDTSPEHSLDLGISGRKRKASTSLTDDEVEDEEETIEEEEAHEGLVDHHTELTNLAKEAELPLIDLMKLYEGAFLPNFQWPQPEPDHEESSGEEDVEDCPSDRESRRDSVLIDSLFIMDQFKAAERMSIGKSNTKDITEVTAVAEAILPKGSARVTTAVKFSAPSLLYGALRDYQKIGLDWLAKLYRKNLNGILADEAGLGKTVQIIAFFAHLACNEGNWGPHLVVMRSCNILKWELELKRWCPGLKTLSYVGSHRELKAKRQEWTEPNNFHICITSYKQFFRGYTAFSRVHWKCLVVDEMQRVKGMTERHWEAIFKLQSQQRLLLIDVPLHNTFLELWTMVHFLIPGISRPYLSFPLKAPNEENQDYYHKMVIRLHRVTQPFILRRTKRDVEKQLTRKYEHVLKCRLSSRQKALYEDVILQPRTQEALKSGHFVSVLSVLTRLQRICNHPGLVEPRVPGSSFAAGSLQYKSASLILRVLEREFWKETDLSIFDLIGLENKITRHEAELLCKKKVTRKLMEEVFASPPPSARPAAVKLKASRLFQPVQYGQKPEGRTVAFPSTHPPRMANTNTSTATPQGQVRGRPPIATFSANPDTKGGEVVKIAQLASIAGPQSRVAQPETPVTLQFQGNKFTLSHSQLRQLTAGQPLQLQGSVLQIVSAPGQPYLRAPGPVVMQTVSQAGAVHSTLGSKPPTSGPSPAPLTPQVGVPGRVAVSAMAVGEPGLASKPASPAAGPTQEEKSRLLKERLDQIHFINERRCSQAPVYGRDLLRICSLPGRRKRPLCWSLDSNFGKGPKGVNYDMSLSKSEGDLILTLSQESLQDVLGRVACVIPPVVATPPSLWVARPPSLYSSRLRALRQCLREHTGPYHRQLQQLTALRSLQFPELRLVQFDSGKLEALAILLQKLKSEGRRVLILSQMVLMLDILEMFLNFHYLTYVRIDENANSEQRQELMRSFNRDRRIFCALLSTHSRATGINLVEADTVVFYDNDLNPVMDAKAQEWCDRIGRCKDIHIYRLVSGNSIEEKLLKNGTKDLIREVAAQGNDYSMAFLTQRTIQELFEVYSPMDDTGFPVKAEEFVVLSQEPSVSETIAPKIARPFIEALKSIECLEEDAQRSTEEAVPGSSSVAVSSDSDGSRYDEEPSQLEELADFMEQLTPIEKYALNYLELFHTTTEQEKERISEDLVMASMKDWETRNARALQEREARLQLEQEEAELLTYTREDAYTMEYVYEDADGQTEVMPLWTPPTPPQDDNDIYIDSVMCLMYETTPIPEAKLPPVYVRKERKRHKTDPSAAGRKKKQRHGEAVVPPRSLFDRATPGMLKIRREGKEQKKNLLLKQQTPFAKPLPTYVKSSGEPAQDSPDWLIGEDWALLQAVKQLLELPLNLTIVSPAHTPNWDLVSDVVNSCSRIYRSSKQCRNRYENVIIPREEGKSKNNRPLRTSQIYAQDENATHTQLYTSHFELMKMTAGKRSPPIKPLLGMNPFQKNPKHASVLAESGINYDKPLPPIQVASLRAERIAKEKKALADQQKAQQPPVTQPPPQQQQQQQQQQQQQQQQQQPPPPPQQPPPPVPQPQAASSQTPAGQPAVQPQPQPQVQAQPQPVQPQSKGQPTMTTVGSVAVLAGTIKTSVTGTSIPTGTVSGNVIVNTIAGVPAATFQSINKRLASPVAPGTLTTSGGSAPAQVVHTQQRAVGSPATATTDLVSMTTTQGVRAVTSVTASAVVTTNLTPVQTPTRSLVTQVSQATGVQLPGKTITPAAHFQLLRQQQQQQQQQQQQQQTSQVQVPQLQSQAQSPAQIKAVSKLGPEHIIKMQKQKMQLPPQPPPPQAQPGPPQQPAQVQVQTPQPPQQQQSPQLTTVTAPRPGALLTGTTVTNLQVARLTRVPTSQLQAQGQMQTQTPQPAQVALAKPPVVSVPAAVVSSPGVTTLPMNVAGISVAIGQPQKTAGQTVVAQPVNVQQLLKYKQQTAVQQQKAIQPQVAQGQAAVQQKLTTQQITTQGPQQKVAYAAQPALKTQFLTTPISQAQKLAGTQQVQTQIQVAKLPQVVQQQTPVASIQQVASASQQASPQTVTLTQATAAGQQVQMIPTVTATAQLVQQKLIQQQVVTTASASLQTPGGPSPAQLPASSDSPSQQPKLQMRVPAVRLKTPTKPPCQ

SEQ ID NO: 8109 - protein, 1322 aa, Mus musculus
MDQFKAAERMSIGKSNTKDITEVTAVAEAILPKGSARVTTAVKFSAPSLLYGALRDYQKIGLDWLAKLYRKNLNGILADEAGLGKTVQIIAFFAHLACNEGNWGPHLVVMRSCNILKWELELKRWCPGLKTLSYVGSHRELKAKRQEWTEPNNFHICITSYKQFFRGYTAFSRVHWKCLVVDEMQRVKGMTERHWEAIFKLQSQQRLLLIDVPLHNTFLELWTMVHFLIPGISRPYLSFPLKAPNEENQDYYHKMVIRLHRVTQPFILRRTKRDVEKQLTRKYEHVLKCRLSSRQKALYEDVILQPRTQEALKSGHFVSVLSVLTRLQRICNHPGLVEPRVPGSSFAAGSLQYKSASLILRVLEREFWKETDLSIFDLIGLENKITRHEAELLCKKKVTRKLMEEVFASPPPSARPAAVKLKASRLFQPVQYGQKPEGRTVAFPSTHPPRMANTNTSTATPQGQVRGRPPIATFSANPDTKGGEVVKIAQLASIAGPQSRVAQPETPVTLQFQGNKFTLSHSQLRQLTAGQPLQLQGSVLQIVSAPGQPYLRAPGPVVMQTVSQAGAVHSTLGSKPPTSGPSPAPLTPQVGVPGRVAVSAMAVGEPGLASKPASPAAGPTQEEKSRLLKERLDQIHFINERRCSQAPVYGRDLLRICSLPGRRKRPLCWSLDSNFGKGPKGVNYDMSLSKSEGDLILTLSQESLQDVLGRVACVIPPVVATPPSLWVARPPSLYSSRLRALRQCLREHTGPYHRQLQQLTALRSLQFPELRLVQFDSGKLEALAILLQKLKSEGRRVLILSQMVLMLDILEMFLNFHYLTYVRIDENANSEQRQELMRSFNRDRRIFCALLSTHSRATGINLVEADTVVFYDNDLNPVMDAKAQEWCDRIGRCKDIHIYRLVSGNSIEEKLLKNGTKDLIREVAAQGNDYSMAFLTQRTIQELFEVYSPMDDTGFPVKAEEFVVLSQEPSVSETIAPKIARPFIEALKSIECLEEDAQRSTEEAVPGSSSVAVSSDSDGSRYDEEPSQLEELADFMEQLTPIEKYALNYLELFHTTTEQEKERISEDLVMASMKDWETRNARALQEREARLQLEQEEAELLTYTREDAYTMEYVYEDADGQTEVMPLWTPPTPPQDDNDIYIDSVMCLMYETTPIPEAKLPPVYVRKERKRHKTDPSAAGRKKKQRHGEAVVPPRSLFDRATPGMLKIRREGNEQKKNLLLKQQTPFAKPLPTYVKSSGEPAQDSPDWLIGEDWALLQAVKQLLELPLNLTIVSPAHTPNWDLVSDVVNSCSRIYRSSKQCRNRYENVIIPREEGKLICEAN

SEQ ID NO: 8110 - protein, 746 aa, Mus musculus
MASELGAGDDGSSTELAKPLYLQYLERALRLDHFLRQTSAIFNRNISSDDSEDGLDDNNPLLPESGDPLIQVKEEPPNSLLGETSGASSSGLLNPYSLNGVLQSESKSDKGNLYNFSKLKKSRKWLKSILLSDESSEADSQSEDNDDEEEELSLSREELHNMLRLHKYKKLHQNKYSKDKELQQYQYYSAGLLSTYDPFYEQQRHLLGPKKKKFKEDKKLKAKLKKVKKKRRRDEEFSSEESPRHHHHQTKVFAKFSHDAPPPGTKKKHLSIEQLNARRRKVWLSIVKKELPKANKQKSSARNLFLTNSRKLAHQCMKEVRRAALQAQKNCKETLPRARRLTKEMLLYWKKYEKVEKEHRKRAEKEALEQRKLDEEMREAKRQQRKLNFLITQTELYAHFMSRKRDMGHDGIQEEILRKLEDSSTQRQIDIGGGVVVNITQEDYDSNHFKAQALKNAENAYHIHQARTRSFDEDAKESRAAALRAADKSGSGFGESYSLANPSIRAGEDIPQPTIFNGKLKGYQLKGMNWLANLYEQGINGILADEMGLGKTVQSIALLAHLAERENIWGPFLIISPASTLNNWHQEFTRFVPKFKVLPYWGNPHDRKVIRRFWSQKTLYTQDAPFHVVITSYQLVVQDVKYFQRVKWQYMVLDEAQALKSSSSVRWKILLQFQCRNRLLLTGTPIQNTMAELWALLHFIMPTLFDSHEEFNEWFSKDIESHAENKSAIDENQLSRLHMILKPFML

SEQ ID NO: 8111 - protein, 825 aa, Mus musculus
ESLPGSLPPDLRTKATVELKALRLLNFQRQLRQEVVACMRRDTTLETALNSKAYKRSKRQTLREARMTEKLEKQQKIEQERKRRQKHQEYLNSILQHAKDFKEYHRSVAGKIQKLSKAVATWHANTEREQKKETERIEKERMRRLMAEDEEGYRKLIDQKKDRRLAYLLQQTDEYVANLTNLVWEHKQAQAAKEKKKRRRRKKKAEENAEGGEPALGPDGEPIDESSQMSDLPVKVTHTETGKVLFGPEAPKASQLDAWLEMNPGYEVAPRSDSEESESDYEEEDEEEESSRQETEEKILLDPNSEEVSEKDAKQIIETAKQDVDDEYSMQYSARGSQSYYTVAHAISERVEKQSALLINGTLKHYQLQGLEWMVSLYNNNLNGILADEMGLGKTIQTIALITYLMEHKRLNGPYLIIVPLSTLSNWTYEFDKWAPSVVKISYKGTPAMRRSLVPQLRSGKFNVLLTTYEYIIKDKHILAKIRWKYMIVDEGHRMKNHHCKLTQVLNTHYVAPRRILLTGTPLQNKLPELWALLNFLLPTIFKSCSTFEQWFNAPFAMTGERVDLNEEETILIIRRLHKVLRPFLLRRLKKEVESQLPEKEIISSLPSIVNDKYGRKVLLYLMSPRDPAHTVPELIELLQKGDGNAHSKKDTAIRRRELLESISPALLSYLQGHTQEVVLDKSACVLVSDMLGSATGDVQPAMDAIASLAAAELHPGGKDGELHVAEHPAGHLVLKWLLEQDKKMKESGKEGCFAKTLVERVGMKNLKSWASINRGAIILSSLLQSCDQEVVNKVKGGLKPLIPTLEKNKSSSRGIQTLLEKLTA

SEQ ID NO: 8112 - protein, 582 aa, Mus musculus
MDISAPQSRADSRKDRWCPGERCLAQSLDNKKLCEASIKSITVDGNGKPFAVVLYPDFQEKTIPLQRLQEVKSTKDYSRSLIFDDKDLEKPYFPDRKIPSLASAFQLSEDGDSIPYTINRYLRDYQREGAQFLYRHYIEGRGCILGDDMGLGKTIQVISFLAAVLHKKGTREDIENNMPEFLLKSMKKKPPSTAKKMFLIVAPLSVLYNWKDELDTWGYFRVTVLHGSKKDNELLRLKQRKCEIALTTYETLRLCLEELNSLEWSAIIVDEAHRIKNPKARVTEVMKAVKCKVRIGLTGTVLQNNMKELWCVMDWAVPGLLGSRIHFKKQFSDPVEHGQRHTATKRELATGRKAMHRLAKKMSGWFLRRTKTLIKGQLPKKEDRMVYCSLTDFQKAVYQTVLETEDVALILTSSQPCTCGSGQKRRKCCYKTNSRGDTVRTLCLSYLTVLQKVANHVALLQAASTSKHQETVIKRICDRVFSRFPDFVQKSKDAAFETLSDPKYSGKMKVLQQLLNHFRKQRDKVLLFSFSTKLLDVLQQYCMASGLDYRRLDGSTKSEERLKIVKEFNSSQDVNICLVSPM

SEQ ID NO: 8113 - protein, 530 aa, Mus musculus
MWLTMPTAGSKKKAPTPQISCLTSESYTQLDFLPDKLRTKLLPFQKDGIVFALRRDGRCMVADEMGLGKTIQAIAIAYFYKEEWPLLIVVPSSLRYPWIEELEKWIPELEPEEINVVMNKTDIGRIPGSRVTVLGYGLLTTDAETLLDALNTQNFRVVIVDESHYMKSRTAARSKILLPMVQKARRAILLTGTPALGRPEELFMQIEALFPQKFGTWIEYAKRYCNAHVRYFGKRRQWDCRGASNLSELHQLLNDIMIRRLKSEVLSQLPPKVRQRIPFDLPPAAVKELNASFEEWQKLMRAPNSGAMETVMGLITRMFKQTAIAKAGAVKDYIKMLLQNDSLKFLVFAHHLSMLQACTEAVIESKSRYIRIDGSVPSSERIHLVNQFQKDPDTRVAILSIQAAGQGLTFTAASHVVFAELYWDPGHIKQAEDRAHRIGQCSSVNIHYLIANGTLDSLMWAMLNRKAQVTGSTLNGRKEKLQATEDDKEKWGFLQFAEAWTPSDSFEELKDSVFTHFQNLRLGCLEKQPE

SEQ ID NO: 8114 - protein, 1069 aa, Mus musculus
MPTAGSKKKAPTPQISCLTSESYTQLDFLPDKLRTKLLPFQKDGIVFALRRDGRCMVADEMGLGKTIQAIAIAYFYKEEWPLLIVVPSSLRYPWIEELEKWIPELEPEEINVVMNKTDIGRIPGSRVTVLGYGLLTTDAETLLDALNTQNFRVVIVDESHYMKSRTAARSKILLPMVQKARRAILLTGTPALGRPEELFMQIEALFPQKFGTWIEYAKRYCNAHVRYFGKRRQWDCRGASNLSELHQLLNDIMIRRLKSEVLSQLPPKVRQRIPFDLPPAAVKELNASFEEWQKLMRAPNSGAMETVMGLITRMFKQTAIAKAGAVKDYIKMLLQNDSLKFLVFAHHLSMLQACTEAVIESKSRYIRIDGSVPSSERIHLVNQFQKDPDTRVAILSIQAAGQGLTFTAASHVVFAELYWDPGHIKQAEDRAHRIGQCSSVNIHYLIANGTLDSLMWAMLNRKAQVTGSTLNGRKEKLQATEDDKEKWGFLQFAEAWTPSDSFEELKDSVFTHFEKEKQHDIRSFFLPKLKKRQLETTCDDPEAFKEKITVASDPRKMATSDSTADKNGCEPEAKRLKSLSTEDHSSALEEGPSLQARATSMEVVHEVKPPLASPALPEKGWQCGFCTFLNNPGLPYCEMCENPRSRAAGRNHLQDNNKNDEDAAQESTSKSDQAGLECERQCPERLEAEQSANSKEEALEGGGEDRLPSQPEIGQLNNSGTLPVRETFMFCASRNTDRIHLYTKDGKPMNCNFIPLDIKLDLWEDLPATFQLKQNRSLILRFVREWSSLTAMKQRVLRKSGQLFCSPLLASEEITKQQAKENNTRRYITKEDVAKASMNKVKSDGGHIRLITKESMTQDSSLKKIDSACVPSLNPCPADLTVEPSPSKGYIQAVDKEGRPLCLRCQHPTCQPEQTAKASAWDSRFCSLKCQEEFWIRSNNSYLRAQVFATEHGVCQHCGVDAQELFLRMRDAPKSHRKSLLNAAWTAKLPLEQLNEMLRNPGEGHFWQVDHIRPVYEGGGQCSLDNLQTLCTVCHKERTAQQAKERSQVRRLSLATKHGSDITRFLVKK

SEQ ID NO: 8115 - protein, 616 aa, Mus musculus
MPTAGSKKKAPTPQISCLTSESYTQLDFLPDKLRTKLLPFQKDGIVFALRRDGRCMVADEMGLGKTIQAIAIAYFYKEEWPLLIVVPSSLRYPWIEELEKWIPELEPEEINVVMNKTDIGRIPGSRVTVLGYGLLTTDAETLLDALNTQNFRVVIVDESHYMKSRTAARSKILLPMVQKARRAILLTGTPALGRPEELFMQIEALFPQKFGTWIEYAKRYCNAHVRYFGKRRQWDCRGASNLSELHQLLNDIMIRRLKSEVLSQLPPKVRQRIPFDLPPAAVKELNASFEEWQKLMRAPNSGAMETVMGLITRMFKQTAIAKAGAVKDYIKMLLQNDSLKFLVFAHHLSMLQACTEAVIESKSRYIRIDGSVPSSERIHLVNQFQKDPDTRVAILSIQAAGQGLTFTAASHVVFAELYWDPGHIKQAEDRAHRIGQCSSVNIHYLIANGTLDSLMWAMLNRKAQVTGSTLNGRKEKLQATEDDKEKWGFLQFAEAWTPSDSFEELKDSVFTHFEKEKQHDIRSFFLPKLKKRQLETTCDDPEAFKEKITVASDPRKMATSDSTADKNGCEPEAKRLKSLSTEDHSSALEEGPSLQARATSMEVVHGQAPIGFSSPS

SEQ ID NO: 8116 - protein, 518 aa, Mus musculus
MEASQGLAEVETLSPQLAESYLRYVQEAKEAAKNGDLEESLKLFNLAKDIFPTKKVMSRIQKLQEALEQLAEEEDDDEFIDVCSSGLLLYRELYEKLFEHQKEGIAFLYSLYKDGRKGGILADDMGLGKTVQIIAFLSGMFDASLVNHVLLIMPTNLINTWVNEFAKWTPGMRVKTFHGSSKSERTRSLTRIQQRNGVVITTYQMLLNNWQQLASFNGQAFVWDYVILDEAHKIKSASTKSAVCARAIPASNRLLLTGTPVQNNLQELWSLFDFACQGSLLGTLKTFKMEYEHPIIRAREKDATPGEKALGLKISENLMEIIKPYFLRRTKEEVQTKKADNPEARLGEKNPAGEAICDMFSLARKNDLIVWIRLLPLQEEIYRKFVSLDHIKELLMETRSPLAELGVLKKLCDHPRLLSARACRLLNLGTATFSAQDENEQEDVSNMNSIDHLPDKTLIQESGKMIFLMSLLERLQDEGHQTLVFSQSIKILNIIERLLKNKHFKTLRIDGTVTHLWE

SEQ ID NO: 8117 - protein, 1069 aa, Mus musculus
MPTAGSKKKAPTPQISCLTSESYTQLDFLPDKLRTKLLPFQKDGIVFALRRDGRCMVADEMGLGKTIQAIAIAYFYKEEWPLLIVVPSSLRYPWIEELEKWIPELEPEEINVVMNKTDIGRIPGSRVTVLGYGLLTTDAETLLDALNTQNFRVVIVDESHYMKSRTAARSKILLPMVQKARRAILLTGTPALGRPEELFMQIEALFPQKFGTWIEYAKRYCNAHVRYFGKRRQWDCRGASNLSELHQLLNDIMIRRLKSEVLSQLPPKVRQRIPFDLPPAAVKELNASFEEWQKLMRAPNSGAMETVMGLITRMFKQTAIAKAGAVKDYIKMLLQNDSLKFLVFAHHLSMLQACTEAVIESKSRYIRIDGSVPSSERIHLVNQFQKDPDTRVAILSIQAAGQGLTFTAASHVVFAELYWDPGHIKQAEDRAHRIRQCSSVNIHYLIANGTLDSLMWAMLNRKAQVTGSTLNGRKEKLQATEDDKEKWGFLQFAEAWTPSDSFEELKDSVFTHFEKEKQHDIRSFFLPKLKKRQLETTCDDPEAFKEKITVASDPRKMATSDSTADKNGCEPEAKRLKSLSTEDHSSALEEGPSLQARATSMEVVHEVKPPLASPALPEKGWQCGFCTFLNNPGLPYCEMCENPRSRAAGRNHLQDNNKNDEDAAQESTSKSDQAGLECERQCPERLEAEQSANSKEEALEGGGEDRLPSQPEIGQLNNSGTLPVRETFMFCASRNTDRIHLYTKDGKPMNCNFIPLDIKLDLWEDLPATFQLKQNRSLILRFVREWSSLTAMKQRVLRKSGQLFCSPLLASEEITKQQAKENNTRRYITKEDVAKASMNKVKSDGGHIRLITKESMTQDSSLKKIDSACVPSLNPCPADLTVEPSPSKGYIQAVDKEGRPLCLRCQHPTCQPEQTAKASAWDSRFCSLKCQEEFWIRSNNSYLRAQVFATEHGVCQHCGVDAQELFLRMRDAPKSHRKSLLNAAWTAKLPLEQLNEMLRNPGEGHFWQVDHIRPVYEGGGQCSLDNLQTLCTVCHKERTAQQAKERSQVRRLSLATKHGSDITRFLVKK

SEQ ID NO: 8118 - protein, 421 aa, Mus musculus
MYDFDSADDFDSWFDTNNCLGDQKLVERLHMVLCPFLLRRIKADVEKSLPPKKEVKIYVGLSKMQREWYTRILIKDIDILNSAGKMDKMRLLNILMQLRKCCNHPYLFDGAEPGPLFTTDMHLVTNSGKMVVLDKLLPKLKEQGSRVLIFSQMTRVLDILEDYCMWRNYEYCRLDEQTPHERQDSINAYNEPNSTKFVFMLSTRAGGLGINLATADVVILYDSDWNPQVDLQAMDYAHRIGQRKTVRVFRFITDNTVEERIVERAEMKLRLDSIVIQQGRLVDQNLNKIGKDEMLQMIRRGATHVFASKESEITDEDIDGILERGAKKTAEMNEKLSKMGESSLRNFMMDTESSVYYFEGEDYREKQKIAFTEWIEPPKRERKANYAVDAYFREALRVSLKHPRHLDLQNNQMFRISSSFL

SEQ ID NO: 8119 - protein, 377 aa, Mus musculus
MYDFDSADDFDSWFDTNNCLGDQKLVERLHMVLCPFLLRRIKADVEKSLPPKKEVKIYVGLSKMQREWYTRILIKDIDILNSAGKMDKMRLLNILMQLRKCCNHPYLFDGAEPGPLFTTDMHLVTNSGKMVVLDKLLPKLKEQGSRVLIFSQMTRVLDILEDYCMWRNYEYCRLDEQTPHERQDSINAYNEPNSTKFVFMLSTRAGGLGINLATADVVILYDSDWNPQVDLQAMDYAHRIGQRKTVRVFRFITDNTVEERIVERAEMKLRLDSIVIQQGRLVDQNLNKIGKDEMLQMIRRGATHVFASKESEITDEDIDGILERGAKKTAEMNEKLSKMGESSLRNFMMDTESSVYYFEGEDYREKQKIAFTEWIEP

SEQ ID NO: 8120 - protein, 841 aa, Mus musculus
MSYTFTRGPVWKYSQSVQYGSHENIPRLSYSTFLPHFEFQDIIPPDDFLTSDEEQDLVLFGTMRGQVVGLRYYTGVVNNNEMVALQREPNNPYDKNAIKVNNVNGNQVGHIKREIAAAVAYIMDNKLAQVEGVVPFGASNTFTMPLYMTYWGKEENRNVVLEQLKKHGFKLGPTPKTLGSSLENAWGSGRRGPSYSRPAHVAVQMTTDQLKTEFDKLFEDLKEDDRTVEMEPAEAIETPLLPHQKQALAWMIARENSKELPPFWEQRNDLYYNTITNFSVKERPENVHGGILADDMGLGKTLTAIAVILTNFDDGRPLLSKRGKKNHPGKEYKDETIKRRGSNMDKKEDGHSESSTCGEEPSISGTPEKSSCTLSQLSSVCPKRRKISVQYIENSDSEEIETSELPQKMKGKLKNVQLNTKSRVKGSSKVKEDSKFALTFFASATQRKMLKKGMSMMECSEACDTGERTRATLIICPLSVLSNWIDQFGQHVKSEVHLNFYVYYGPDRIRDSAWLSKQDIILTTYNILTHDYGTKDDSPLHSIKWLRVILDEGHAIRNPNAQQTKAVLELEAERRWVLTGTPIQNSLKDLWSLLSFLKLKPFIDREWWYRIIQRPVTTGDEGGLRRLQSLIKNITLRRTKTSKIKGKSVLELPERKVFIQHITLSEEERKIYQSVKNEGKAAIGRYFTEGTVLAHYADVLGLLLRLRQICCHTHLLTNGMSSSGPSRSDTPEELRKMLIEKMKIILSSGSDEECAICLDSLTFPVITHCAHVFCKPCICQVIHSEQPHAKCPLCRNEIHGDNLLECPPEELACDSDKESSMEWKSSSKVKSTCVNILMFHT

SEQ ID NO: 8121 - protein, 1002 aa, Mus musculus
MSYTFTRGPVWKYSQSVQYGSHENIPRLSYSTFLPHFEFQDIIPPDDFLTSDEEQDLVLFGTMRGQVVGLRYYTGVVNNNEMVALQREPNNPYDKNAIKVNNVNGNQVGHIKREIAAAVAYIMDNKLAQVEGVVPFGASNTFTMPLYMTYWGKEENRNVVLEQLKKHGFKLGPTPKTLGSSLENAWGSGRRGPSYSRPAHVAVQMTTDQLKTEFDKLFEDLKEDDRTVEMEPAEAIETPLLPHQKQALAWMIARENSKELPPFWEQRNDLYYNTITNFSVKERPENVHGGILADDMGLGKTLTAIAVILTNFDDGRPLLSKRGKKNHPGKEYKDETIKRRGSNMDKKEDGHSESSTCGEEPSISGTPEKSSCTLSQLSSVCPKRRKISVQYIENSDSEEIETSELPQKMKGKLKNVQLNTKSRVKGSSKVKEDSKFALTFFASATQRKMLKKGMSMMECSEACDTGERTRATLIICPLSVLSNWIDQFGQHVKSEVHLNFYVYYGPDRIRDSAWLSKQDIILTTYNILTHDYGTKDDSPLHSIKWLRVILDEGHAIRNPNAQQTKAVLELEAERRWVLTGTPIQNSLKDLWSLLSFLKLKPFIDREWWYRIIQRPVTTGDEGGLRRLQSLIKNITLRRTKTSKIKGKSVLELPERKVFIQHITLSEEERKIYQSVKNEGKAAIGRYFTEGTVLAHYADVLGLLLRLRQICCHTHLLTNGMSSSGPSRSDTPEELRKMLIEKMKIILSSGSDEECAICLDSLTFPVITHCAHVFCKPCICQVIHSEQPHAKCPLCRNEIHGDNLLECPPEELACDSDKESSMEWKSSSKINALMHALIELRTKDPNIKSLVVSQFTTFLSLIETPLKASGFVFTRLDGSMAQKKRVESIQRFQNTEAGSPTISTVLKAGGVGLNLCARSRVFLMDPAWNPAAEDQCFDRCHRLGQKQEVIITKFIVKDSVEENMLKIQNTKRDLAAGAFATKKTDANDMKQAKINEIRTLIDL

SEQ ID NO: 8122 - protein, 467 aa, Mus musculus
MPGSRPTCRALLAAESGGAAGCLPLARWTSPPRSPAQTPAKVISFLAAVLHKKGTREDIENNMPEFLLKSMKKKPPSTAKKMFLIVAPLSVLYNWKDELDTWGYFRVTVLHGSKKDNELLRLKQRKCEIALTTYETLRLCLEELNSLEWSAIIVDEAHRIKNPKARVTEVMKAVKCKVRIGLTGTVLQNNMKELWCVMDWAVPGLLGSRIHFKKQFSDPVEHGQRHTATKRELATGRKAMHRLAKKMSGWFLRRTKTLIKGQLPKKEDRMVYCSLTDFQKAVYQTVLETEDVALILTSSQPCTCGSGQKRRKCCYKTNSRGDTVRTLCLSYLTVLQKVANHVALLQAASTSKHQETVIKRICDRVFSRFPDFVQKSKDAAFETLSDPKYSGKMKVLQQLLNHFRKQRDKVLLFSFSTKLLDVLQQYCMASGLDYRRLDGSTKSEERLKIVKEFNSSQDVNICLVSTM

SEQ ID NO: 8123 - protein, 381 aa, Mus musculus
MEPDTATEAATVAVSDARATVVVVEDEQPGPSTFKEEGAAAAATEGTTATEKGEKKEKITSPFQLKLAAKASKSEKEMDPEYEEKMKADRAKRFEFLLKQTELFAHFIQPSAQKSPTSPLNMKLARPRVKKDDKQSLISVGDYRHRRTEQEEDEELLSESRKTSNVCVRFEVSPSYVKGGPLRDYQIRGLNWLISLYENGVNGILADEMGLGKTLQTIALLGYLKHYRNIPGPHMVLVPKSTLHNWMNEFKRWVPSLRVICFVGDKDVRAAFIRDEMMPGEWDVCVTSYEMVIKEKSVFKKFHWRYLVIDEAHRIKNEKSKLSEIVREFKSTNRLLLTGTPLQNNLHELWALLNFLLPDVFNSADVSLKQSICVRGSGAQG

SEQ ID NO: 8124 - protein, 278 aa, Mus musculus
MDKMRLLNILMQLRKCCNHPYLFDGAEPGPPYTTDMHLVTNSGKMVVLDKLLPKLKEQGSRVLIFSQMTRVLDILEDYCMWRNYEYCRLDGQTPHDERQDSINAYNEPNSTKFVFMLSTRAGGLGINLATADVVILYDSDWNPQVDLQAMDRAHRIGQTKTVRVFRFITDNTVEERIVERAEMKLRLDSIVIQQGRLVDQNLNKIGKDEMLQMIRHGATHVFASKESEITDEDIDGILERGAKKTAEMNEKLSKMGESSLRNFTMDTESSVYNFEGED

SEQ ID NO: 8125 - protein, 394 aa, Mus musculus
MKELWCVMDWAVPGLLGSRIHFKKQFSDPVEHGQRHTATKRELATGRKAMHRLAKKMSGWFLRRTKTLIKGQLPKKEDRMVYCSLTDFQKAVYQTVLETEDVALILTSSQPCTCGSGQKRRKCCYKTNSRGDTVRTLCLSYLTVLQKIANHVALLQAASTSKHQETVIKRICDRVFSRFPDFVQKSKDAAFETLSDPKYSGKMKVLQQLLNHFRKQRDKVLLFSFSTKLLDVLQQYCMASGLDYRRLDGSTKSEERLKIVKEFNSSQDVNICLVSTMAGGLGLNFVGANVVILFDPTWNPANDLQAVDRAYRIGQCRDVKVLRLISLGTVEEIMYLRQVYKQQLHCVVVGSENAKRYFEAVQGSKEHRGELFGVHNLFKLRSQGSCLTRDILEV

SEQ ID NO: 8126 - protein, 473 aa, Mus musculus
MPEKFSSWEDFEEEHGKGREYGYASLHKELEPFLLRRVKKDVEKSLPAKVEQILRMEMSALQKQYYKWILTRNYKALSKGSKGSTSGFLNIMMELKKCCNHCYLIKPPDNNEFYNKQEALQHLIRSSGKLILLDKLLIRLRERGNRVLIFSQMVRMLDILAEYLKYRQFPFQRLDGSIKGELRKQALDHFNAEGSEDFCFLLSTRAGGLGINLASADTVVIFDSDWNPQNDLQAQARAHRIGQKKQVNIYRLVTKGSVEEDILERAKKKMVLDHLVIQRMDTTGKTVLHTGSAPSSSTPFNKEELSAILKFGAEELFKEPEGEEQEPQEMDIDEILKRAETHENEPGPLSVGDELLSQFKVANFSNMDEDDIELEPERNSKNWEEIIPEEQRRRLEEEERQKELEEIYMLPRMRNCAKQISFNGSEGRRSRSRRYSGSDSDSISERKRPKKRGRPRTIPRENIKGFSDAEIRR

SEQ ID NO: 8127 - protein, 1104 aa, Mus musculus
MTDPMMDFFDDANLFGETLEGLSDDTFVQPGPVSLVDELNLGAEFEPLHIDSLNHVQGTPTHQKMADFEQLSQFDSMKFHPVNQSFGSPVEHVLSPHSQFNCSPIHPPNQPNGLFQDVADGSPMWGHQTATGLANQNGSPFHQPGHSHSLHQNKSFVAHPDFALFQASEHQTQCSSLHSQQSRSNLNPGQNSLGQAKNFLDANVSGAHRVNVNHLATAPSSQQTLPVQFSPTANPPAHFLKCSSHQEGNYNRPSPSMTSCSVSNSQQFPSHYSFSSGHVSPSSLLQSSAGLAPGHTNQALSDFAGSNSFSPHRGMKQEPTQHLLNPTPSLNSNNFQILHSSHPQGNYSNSKLSPVHMNFPDPVDAGPPVGHFNDHAETNGFSSLEENLLHHVDSHAEPFAGLDPEDLLQEGLLPQFDESPFGQDNSNHVLDHDLDRQFTSHLVSRPSDMAQTQLQYQARGWPSPLSTNHQHLHSRNHLCLQRQPPSSKKSDGSGTYTKLQNTQVRVMSEKKPRKRVESESKQEKANRIISEAIARAKERGERNIPRVMSPENFPSASVEGKEEKRGRRMKSKPKDRDNKKPKTYSKLKEKTKIGKLIITLGKKHKRRNESSDELSDAEQRSQHTFKEQHSQKRRSNRQIKRKKYAEDAEGKQSEEEVKGSLRVKRNSAPPPGEQPLQLFVENPSEEDAAIVDKILACRTVKKEVSPGVMLDIEEFFVKYKNYSYLHCEWATEQQLLKDKRIQQKIKRFKLRQAQRAHFLADMEEEPFNPDYVEVDRILEVSFCEDKDTGESVIYYLVKWCSLPYEDSTWELKEDVDLAKIEEFEQLQASRPDTRHLDRPPSNIWKKIEQSREYKNGNQLREYQLEGLNWLLFNWYNRRNCILADEMGLGKTIQSITFLYEILLTGIRGPFLIIAPLSTIANWEREFRTWTDINVVVYHGSLISRQMIQQYEMYFRDSQGRIIRGAYRFQAIITTFEMILGGCGELNAIDWRCVIIDEAHRLKNKNCKLLEGLKLMNLEHKVLLTGTPLQNTVEELFSLLHFLEPLRFPSESTFMQEFGDLKTEEQVQKLQAILKPMMLRRLKEDVEKKLAPKEETIIEVELTNI

SEQ ID NO: 8128 - protein, 482 aa, Mus musculus
MPTAGSKKKAPTPQISCLTSESYTQLDFLPDKLRTKLLPFQKDGIVFALRRDGRCMVADEMGLGKTIQAIAIAYFYKEEWPLLIVVPSSLRYPWIEELEKWIPELEPEEINVVMNKTDIGRIPGSRVTVLGYGLLTTDAETLLDALNTQNFRVVIVDESHYMKSRTAARSKILLPMVQKARRAILLTGTPALGRPEELFMQIEALFPQKFGTWIEYAKRYCNAHVRYFGKRRQWDCRGASNLSELHQLLNDIMIRRLKSEVLSQLPPKVRQRIPFDLPPAAVKELNASFEEWQKLMRAPNSGAMETVMGLITRMFKQTAIAKAGAVKDYIKMLLQNDSLKFLVFAHHLSMLQACTEAVIESKSRYIRIDGSVPSSERIHLVNQFQKDPDTRVAILSIQAAGQGLTFTAASHVVFAELYWDPGHIKQAEDRAQPNRTVQFCEYSLPYCKWYSGQPNVGNAESKGSGHREHTEWQEGETPGYGR

SEQ ID NO: 8129 - protein, 558 aa, Mus musculus
KKDVENELSDKIEILTYCQLTSRQKLLYQALKNKISIEDLLQSSMGSTQQAQNTTSSLMNLVMQFRKVCNHPELFERQETWSPFHISLKPYEISKFIYRHGQIRVFNHSRDRWLKVLLSPFAPDYIQQSLFHRKGINEGSCFSFLRFIDVSPAEMANLMLQGLLARWLALFLSLKASYRLHQLRSWAEPDGTSHQSYLRNKDFLLGVDFPLSFPNLCSCPLLKSLVFSSHCKAVSGYSDHVVHQRRSATSSLRCCLLTELPSFLCVASPRVTAVPLDSYCNDRSAEYERRVLKEGGSLAAKQCLLNGAPELATDWLSRRSQFFPEPAGGLLSIRPQNGWSFIRIPGKESLITDSGKLYALDVLLTRLKSQGHRVLIYSQMTRMIDLLEEYMVYRKHTYMRLDGSSKISERRDMVADFQTRNDIFVFLLSTRAGGLGINLTAADTVIFYDSDWNPTVDQQAMDRAHRLGQTKQVTVYRLICKGTIEERILQRAKEKSEIQRMVISGGNFKPDTLKPKEVVSLLLDDEELEKKLRLRQEEKRQQEESNRVKERKRKREKY

SEQ ID NO: 8130 - protein, 910 aa, Mus musculus
MSLPLTEEQRKKIEENRQKALARRAEKLSEQPQSAASGSSAAGPSQSKQGSLLNLLAEPSKPVGHASIFKQQNLSNSFPTDQRPHSSRCSQPSPAEETTGLWKTQGEMSTACPKPNPSPPGASNQPLLGYKSSEGQPQATWDTGASSSGPFPRDPELEAKAARPSTSRQSISDSFYVLGGKTPRTEGRPPNILQTTPQNTGFLRGACIKTGDRFRVKIGYNQELIAVFKSLPSRHYDSFTKTWDFSMSDYRALMKAVERLSTVSLKPLDEAGGSVGGQTSLPSAPSLTFVTGKCMLISRVRFEVDIGYSEAVIGLFKQMESRSYDIKTRKWSFLLEEHNKLIARSRELKQVQLDPLPKTVTLAFASQLEKTSPKLKADVPEADLSGVDAKLVSSLMPFQREGVSFAISKRGRLLLADDMGLGKTVQAICIAAFYRKEWPLLVVVPSSVRFTWEQAFLRWLPSLSPENINVVVTGKGRLTAGLVNIVSFDLLCKLERQLKTPFKVVIIDESHFLKNIKTARCRAAVPILKVAKRVILLSGTPAMSRPAELYTQIIAVKPTFFPQFHAFGLRYCDAKRLPWGWDYSGSSNLGELKLLLEEAIMLRRLKSDVLSQLPAKQRKMVVVNPGRISSRAKAALDAAAKEMTKDKTKQQQKEALLVFFNRTAEAKIPCVVEYILDLLDSGREKFLVFAHHKVILDAVAKELERKNVQHIRIDGSTPSADREAQCQRFQLSKGHTVALLSITAANMGLTFSTADLVVFAELFWNPGVLIQAEDRVHRIGQTNSVSIHYLVAKGTADDYLWPLIQEKIKVLGEAGLSETNFSEMTEATDYVHKDPKQKTIYDLFQQSFEDDGNDMEFLEAAESFELGSTSGTSGNISQDLGDLLDEDEGSPPKKSRFEFFDNWDSFSSPF

SEQ ID NO: 8131 - protein, 910 aa, Mus musculus
MSLPLTEEQRKKIEENRQKALARRAEKLSEQPQSTASGSSAAGPSQSKQGSLLNLLAEPSKPVGHASIFKQQNLSNSLPTDQRPHSSRCSQPSPAEETTGLWKTQGEMSTACPKPNPSPPGASNQPLLGYKSSEGQPQATWDTGASSSGPFPRDPELEAKAARPSTSRQSISDSFYVLGGKTPRTEGRPPNILQTTPQNTGFLRGACIKTGDRFRVKIGYNQELIAVFKSLPSRHYDSFTKTWDFSMSDYRALMKAVERLSTVSLKPLDEAGGSVGGQTSLPSAPSLTFVTGKCMLISRVRFEVDIGYSEAVIGLFKQMESRSYDIKTRKWSFLLEEHNKLIARSRELKQVQLDPLPKTVTLAFASQLEKTSPKLKADVPEADLSGVDAKLVSSLMPFQREGVSFAISKRGRLLLADDMGLGKTVQAICIAAFYRKEWPLLVVVPSSVRFTWEQAFLRWLPSLSPENINVVVTGKGRLTAGLVNIVSFDLLCKLERQLKTPFKVVIIDESHFLKNIKTARCRAAVPILKVAKRVILLSGTPAMSRPAELYTQIIAVKPTFFPQFHAFGLRYCDAKRLPWGWDYSGSSNLGELKLLLEEAIMLRRLKSDVLSQLPAKQRKMVVVNPGRISSRAKAALDAAAKEMTKDKTKQQQKEALLVFFNRTAEAKIPCVVEYILDLLDSGREKFLVFAHHKVILDAVAKELERKNVQHIRIDGSTPSADREAQCQRFQLSKGHTVALLSITAANMGLTFSTADLVVFAELFWNPGVLIQAEDRVHRIGQTNSVSIHYLVAKGTADDYLWPLIQEKIKVLGEAGLSETNFSEMTEATDYVHKDPKQKTIYDLFQQSFEDDGNDMEFLEAAESFELGSTSGTSGNISQDLGDLLDEDEGSPPKKSRFEFFDNWDSFSSPF

SEQ ID NO: 8132 - protein, 910 aa, Mus musculus
MSLPLTEEQRKKIEENRQKALARRAEKLSEQPQSAASGSSAAGPSQSKQGSLLNLLAEPSKPVGHASIFKQQNLSNSFPTDQRPHSSRCSQPSPAEETTGLWKTQGEMSTACPKPNPSPPGASNQPLLGYKSSEGQPQATWDTGASSSGPFPRDPELEAKAARPSTSRQSISDSFYVLGGKTPRTEGRPPNILQTTPQNTGFLRGACIKTGDRFRVKIGYNQELIAVFKSLPSRHYDSFTKTWDFSMSDYRALMKAVERLSTVSLKPLDEAGGSVGGQTSLPSAPSLTFVTGKCMLISRVRFEVDIGYSEAVIGLFKQMESRSYDIKTRKWSFLLEEHNKLIARSRELKQVQLDPLPKTVTLAFASQLEKTSPKLKADVPEADLSGVDAKLVSSLMPFQREGVSFAISKRGRLLLADDMGLGKTVQAICIAAFYRKEWPLLVVVPSSVRFTWEQAFLRWLPSLSPENINVVVTGKGRLTAGLVNIVSFDLLCKLERQLKTPFKVVIIDESHFLKNIKTARCRAAVPILKVAKRVILLSGTPAMSRPAELYTQIIAVKPTFFPQFHAFGLRYCDAKRLPWGWDYSGSSNLGELKLLLEEAIMLRRLKSDVLSQLPAKQRKMVVVNPGRISSRAKAALDAAAKEMTKDKTKQQQKEALLVFFNRTAEAKIPCVVEYILDLLDSGREKFLVFAHHKVILDAVAKELERKNVQHIRIDGSRPTRARELKCQRFQLSKGHTVALLSIPAANMGLTFSTADLVVFAELFWNPGVLIQAEDRVHRIGQTNSVSIHYLVAKGTADDYLWPLIQEKIKVLGEAGLSETNFSEMTEATDYVHKAPKQKTIYDLFQQSFEDDGNDMEFLEAAESFEIKNTSGTSGNISQDLGDLLDEDEGSPPKKSRFEFFDNWDSFSSPF

SEQ ID NO: 8133 - protein, 904 aa, Mus musculus
TAARSKILLPMVQKARRAILLTGTPALGRPEELFMQIEALFPQKFGTWIEYAKRYCNAHVRYFGKRRQWDCRGASNLSELHQLLNDIMIRRLKSEVLSQLPPKVRQRIPFDLPPAAVKELNASFEEWQKLMRAPNSGAMETVMGLMTRMFKQTAIAKAGAVKDYIKMLLQNDSLKFLVFAHHLSMLQACTEAVIESKSRYIRIDGSVPSSERIHLVNQFQKDPDTRVAILSIQAAGQGLTFTAASHVVFAELYWDPGHIKQAEDRAHRIGQCSSVNIHYLIANGTLDSLMWAMLNRKAQVTGSTLNGRKEKLQATEDDKEKWGFLQFAEAWTPSDSFEELKDSVFTHFEKEKQHDIRSFFLPKLKKRQLETTCDDPEAFKEKITVASDPRKMATSDSTADKNGCEPEAKRLKSLSTEDHSSALEEGPSLQARATSMEVVHEVKPPLASPALPEKGWQCGFCTFLNNPGLPYCEMCENPRSRAAGRNHLQDNNKNDEDAAQESTSKSDQAGLECERQCPERLEAEQSANSKEEALEGGGEDRLPSQPEIGQLNNSGTLPVRETFMFCASRNTDRIHLYTKDGKPMNCNFIPLDIKLDLWEDLPATFQLKQNRSLILRFVREWSSLTAMKQRVLRKSGQLFCSPLLASEEITKQQAKENNTRRYITKEDVAKASMNKVKSDGGHIRLITKESMTQDSSLKKIDSACVPSLNPCPADLTVEPSPSKGYIQAVDKEGRPLCLRCQHPTCQPEQTAKASAWDSRFCSLKCQEEFWIRSNNSYLRAQVFATEHGVCQHCGVDAQELFLRMRDAPKSHRKSLLNAAWTAKLPLEQLNEMLRNPGEGHFWQVDHIRPVYEGGGQCSLDNLQTLCTVCHKERTAQQAKERSQVRRLSLATKHGSDITRFLVKK

SEQ ID NO: 8134 - protein, 275 aa, Mus musculus
MMLLRKCCNHPYMIEYPIDPVTQEFKIDEELVTNSGKFLILDRMLPELKKRGHKVLVFSQMTSMLDILMDYCHLRNFIFSRLDGSMSYSEREKNIYSFNTDPDVFLFLVSTRAGGLGINLTAADTVIIYDSDWNPQSDLQAQDRCHRIGQTKPVVVYRLVTANTIDQKIVERAAAKRKLEKLIIHKNHFKGGQSGLSQSKNFLDAKELMELLKSRDYEREVKGSREKVISDEDLELLLDRSDLIDQMKASRPIKGKTGIFKILENSEDSSAECLF

SEQ ID NO: 8135 - protein, 173 aa, Mus musculus
MASGLPRFLQALPAEHGPEPLRTRVLEPDLQQWGLTGIRLRSYQLEGVNWLVQCFHCQNGCILGDEMGLGKTCQTIALLIYLVGRLNDEGPFLVLCPLSVLSNWKEEMERFAPGLSCVTYTGDKEERARLQQDLRQESGFHVLLTTYEICLKDASFLKSFSWSVLAVDEAHRL

SEQ ID NO: 8136 - protein, 2476 aa, Mus musculus
MTAEPMSGNKLSTLVQKLHDFLAHSSEESEETCSSPRLVMNQSTDKICGSGLNSDMMENNKEEGASTSEKSRSSGSSRSKRKPSIVTKYVESDDEKPTDENVNEKAATENSENDITMQSLPKGTVIVQPEPVLNEDKDDFKGPEFRSRSKMKADNLIKRGEDGLHGIVSCTACGQQVNHFQKDSIYRHPSLKVLICKNCFKYYMSDDISRDSDGMDEQCRWCAEGGNLICCDFCHNAFCKKCILRNLGRKELSTIMDENNQWYCYICQPEPLLDLVTACNSVFENLEQLLQQNKKKIKVDSEKTSKVCDQTSKFSPKKSSSSCNGEEKKLEESCSGSVSSTYSHSALSVPKEMIKKTTKLIETTSNMNSSYIKFLKQAADNSEMTSAMKLCQLKSFKSVLDDIKKAHLALEEDLNSEIQALDDVHKEKNTKDLKSTDAKSETKLGKGEKSYSTEKREFLKLDARSSVKAIDGEEQRAHKSTSGEHKGSGRKDGSQYEPTNTPEDLDMDIVSVPSSVPEDIFDSLESAMEVQSSADYQGDGNSGTEPELESSSVKLNVSSKDSRGNIKSKVTAKVRKELFVKLTPVSLSNSPIKGVDCQEVSQEKNGRKSSGVARSSEKCRPREEISDHENNVTILLEDSDLRRSPRVKTTPLRRQTESNPAMSNSDEESNGTMKEKQKMSGPIRKKDKRNSADCATDNPKPHKVPKAKQPVIGDQNSDSDEMLAVLKEASQMGHSSSSDTDINEPQMNHKGKTGKDDNGKRKRKNSTSGSDFDTKKGKSTETSIISKKKRQNYSESSNYDSELEREIKTMSRIGAARKSVPEKKEEDSSEDEKQGKKVVDNGGHERAKTTQEGSSADDTGDTEGRQGGSCSIAGGSIEKVRSGVEFREMLCKPGVSSDGAEKPSVKEENVNSPEDKRVSKTKEKTKHLRSRQSRKGKGGSSDGTDRFPKKEQSDESSEGEKKQSRQRPGTKGKKAPDLKGETLKREQEWDSSSDGTERLPEEEEIGPFSKGIKQSKTDTAGGEKKGKKWKDKSCEKKEELSDSVDKLPGKGDSCDSSEDKKTRNRVSLREKKRFSLPAKSPGKRPECSSSDTEKSLKGQCCDSTEKRPKRIDLRERRNSSSKRNTKEVKSASSSSDAEGSSEDNKKQKKQRTSAKKKTGNTKEKKRNSLRATPKRKQVDITSSSSDIGDDDQNSAGEESSDEQKIKPVTENLVLPSHTGFCQSSGDEALSKSVPATVDDDDDDNDPENRIAKKMLLEEIKANLSSDEDGSSDDEPDGGGKKRIGKQSEESPADDGELRREQLAVNQVNSESDSDSEESKKPRYRHRLLRHKLTLSDGESGEEKPTKPKEHKEAKGRNRRKVSSEDSEDTDFQESGVSEEVSESEDEQRPRTRSAKKAELEENQRSYKQKKKRRRIKVQEDSSSENKSHSEEDKKEGDEEDEEDEDEDEEDENDDSKSPGKGRKKIRKILKDDKLRTETQNALKEEEERRKRIAEREREREKLREVIEIEDASPTKCPITTKLVLDENEETKEPLVQVHRNMVIKLKPHQVDGVQFMWDCCCESVEKTKKSPGSGCILAHCMGLGKTLQVVSFLHTVLLCDKLDFSTALVVCPLNTALNWMNEFEKWQEGLNDNEKLEVSELATVKRPQERSYMLQRWQEDGGVMIIGYEMYRNLAQGRNVKSRKLKDIFNKALVDPGPDFVVCDEGHILKNEASAVSKAMNSIKSRRRIILTGTPLQNNLIEYHCMVNFIKENLLGSIKEFRNRFINPIQNGQCADSTMVDVRVMKKRAHILYEMLAGCVQRKDYTALTKFLPPKHEYVLAVRMTAIQCKLYQYYLDHLTGVGNSTEGGRGKAGAKLFQDFQMLSRIWTHPWCLQLDYISKENKGYFDEDSMDEFIASDSDETSKSLSSDEKKKPKGKKGKKDSSSSGSGSDNDVEVIKVWNSRSRGGGDGNMDDTGNNPSVSLKLDESKTTSTSNPSSPAPDWYKDFVTDTDAEVLEHSGKMVLLFEILRMAEEIGDKVLVFSQSLISLDLIEDFLELASREKTEDKEKPLIYKGEGKWIRNIDYYRLDGSTNAQSRKKWAEEFNDETNVRGRLFIISTKAGSLGINLVAANRVIIFDASWNPSYDIQSIFRVYRFGQTKPVYVYRFLAQGTMEDKIYDRQVTKQSLSFRVVDQQQVERHFTMNELTELYTFEPDLLDDPNSEKKKKRDTPMLPKDTILAELLQIHKEHIVGYHEHDSLLDHKEEEELTEEERKAAWAEYEAEKKGLTMRFNIPTGTNLPPVTFTSQTPYIPFNLGALSAMSNQQLEDLINQGREKVVEATNSMTAVRIQPLEDIISTVWKENMNLSEAQVQALALSRQASQELDVKRREAIYNDVLTKQQMLINCVQRILMNRRLQQQYTQQQQQQLTYQQATLSHLMMPKPPNLIMTPSNYQQIDMRGMYQSVAGGMQPPPLQRAPPPTVRSKNPGPSPGKSM

SEQ ID NO: 8137 - protein, 327 aa, Mus musculus
MVVLDKLLPKLKEQGSRVLIFSQMTRVLDILEDYCMWRNYEYCRLDEQTPHERQDSINAYNEPNSTKFVFMLSTRAGGLGINLATADVVILYDSDWNPQVDLQAMDYAHRIGQRKTVRVFRFITDNTVEERIVERAEMKLRLDSIVIQQGRLVDQNLNKIGKDEMLQMIRRGATHVFASKESEITDEDIDGILERGAKKTAEMNEKLSKMGESSLRNFTMDTESSVYNFEGEDYREKQKSAFTEWIEPPKRERKANYAVDAYFREALRVSEPKAPKAPRPPKQLNVQDFQFFPPGLCELLEKEILYYRKTIGYKVPWSPDLPNAAQA

SEQ ID NO: 8138 - protein, 1466 aa, Mus musculus
MSDESASGSDPDLDPDVELEDEEEEEEEEEVAVEEHDRDDEEGLLDDTSLEGMCGTEHAQLGEDGQRPPRCTSTTSSQSEPSEQLRHQGKILASEDPKKKRAQKPSHMRRNIRKLLREDQLEPVTKAAQQEELERRKRLEQQRKEYAAPIPTVPLEFLPEEIVLRASDGPQLPPRVLAQEVICLDSSSGSEDEKSSRDEVIELSSGEEDTLHIVDSSESVSEEDEEEEKGGTHVNDALNQHDALGRVLVNLNHPPEEENVFLAPQLARAVKPHQIGGIRFLYDNLVESLERFKTSSGFGCILAHSMGLGKTLQVISFIDVLFRHTPAKTVLAIVPVNTLQNWLAEFNMWLPAPEALPADSKPEEVQPRFFKVHILNDEHKTVASRAKVTADWVSEGGVLLMGYEMYRLLTLKKSLATSRPKKTKKRSHPVIIDLDEEDRQQEFRREFEKALCRPGPDVVICDEGHRIKNCQASTSQALKNIRSRRRVVLTGYPLQNNLIEYWCMVDFVRPDFLGTRQEFSNMFERPILNGQCIDSTPQDVRLMRYRSHVLHSLLEGFVQRRGHTVLKIHLPAKEENVILVRLSQIQRDLYTQFMDRFRDCGTSGWLGLNPLKAFCVCCKIWNHPDVLYEALQKENLANEQDLDVEELGSAGTSARCPPHGTKVKGEDSALPSSMGEATNSKFLQGVGFNPFQERGNNIVTYEWAKELLTNYQTGVLENSPKMVLLFHLIEESVKLGDKILVFSQSLSTLALIEEFLGKRDMPCLPGAEGQGTQKWVRNVSYFRLDGSTPAFERERLINQFNDPSNLTTWLFLLSTRAGCLGVNLIGANRVVVFDASWNPCHDAQAVCRVYRYGQKKPCHIYRLVADYTLEKKIYDRQISKQGMSDRVVDDLNPMLNFTRKEVENLLHFVEKEPAPQTSLDIKGIKESVLQLACLKYPHLITKEPFEHESLLLNRKDHKLTKAEKKAAKKSYEEDKRTSVPYTRPSYAQYYPASDQSLTSIPAFSQRNWQPTLKGDEKPVASVRPVQSTPIPMMPRHVPLSGGVSSASSTNTSMNFPINYLQRAGVLVQKVVTTTDIVIPGLNSSTDVQARINAGESIHIIRGTKGTYIRTSDGRIFAVRATGKPKAPEDGRMAASGSQGPSLASTSNGRHSASSPKAPDPEGLARPVSPDSPEIISELQQYADVAAARESRQSSPSISAALPGPPGQLMDNSTIPGTALGTEPCLGGHCLNSSLLVTGQPSGGRHPVLDLRGHKRKLATPSVTQESIRRRSRKGHLPAPVQPYEHGYPVSGGFAMPPVSLNHNLTTPFTSQAGENSLFMGSNPSYYQLSNLLADARLVFPVTTDPLVPAGPVSSSSTATSVTASNPSFMLNPSVPGMLPSYSLPFSQPLLSEPRMFAPFPSPGLPSNLSRGVSVYPGYMSPHAGYPAGGLLRSQVPPFDSHEVAEVGFSSNDDEDKDDDVIEVTGK

SEQ ID NO: 8139 - protein, 563 aa, Mus musculus
FQHIEESFSEHLGFTGGIVQGLDLYRASGKFELLDRILPKLRATNHKVLLFCQMTSLMTIMEDYFAYRGFKYLRLDGTTKAEDRGMLLKTFNEPGSEYFIFLLSTRAGGLGLNLQSADTVIIFDSDWNPHQDLQAQDRAHRIGQQNEVRVLRLCTVNSVEEKILAAAKYKLNVDQKVIQAGMFDQKSSSHERRAFLQAILEHEEQDEEEDEVPDDETVNQMIARHEEEFDLFMRMDLDRRREEARNPKRKPRLMEEDELPSWIIKDDAEVERLTCEEEEEKMFGRGSRHRKEVDYSDSLTEKQWLKAIEEGTLEEIEEEVRQKKSSRKRKRDSEAGSSTPTTSTRSRDKDEESKKQKKRGRPPAEKLSPNPPNLTKKMKKIVDAVIKYKDSSSGRQLSEVFIQLPSRKELPEYYELIRKPVDFKKIKERIRNHKYRSLNDLEKDVMLLCQNAQTFNLEGSLIYEDSIVLQSVFTSVRQKIEKEDDSEGEESEEEEEGEEEGSESESRSVKVKIKLGRKEKAQDRLKGGRRRPSRGSRAKPVVSDDDSEEEQEEDRSGSGSEED

SEQ ID NO: 8140 - protein, 788 aa, Mus musculus
MSLPLTEEQRKKIEENRQKALARRAEKLSEQPQSAASGSSAAGPSQSKQGSLLNLLAEPSKPVGHASIFKQQNLSNSFPTDQRPHSSRCSQPSPAEETTGLWKTQGEMSTACPKPNPSPPGASNQPLLGYKSSEGQPQATWDTGASSSGPFPRDPELEAKAARPSTSRQSISDSFYVLGGKTPRTEGRPPNILQTTPQNTGFLRGACIKTGDRFRVKIGYNQELIAVFKSLPSRHYDSFTKTWDFSMSDYRALMKAVERLSTVSLKPLDEAGGSVGGQTSLPSAPSLTFVTGKCMLISRVRFEVDIGYSEAVIGLFKQMESRSYDIKTRKWSFLLEEHNKLIARSRELKQVQLDPLPKTVTLAFASQLEKTSPKLKADVPEADLSGVDAKLVSSLMPFQREGVSFAISKRGRLLLADDMGLGKTVQAICIAAFYRKEWPLLVVVPSSVRFTWEQAFLRWLPSLSPENINVVVTGKGRLTAGLVNIVSFDLLCKLERQLKTPFKVVIIDESHFLKNIKTARCRAAVPILKVAKRVILLSGTPAMSRPAELYTQIIAVKPTFFPQFHAFGLRYCDAKRLPWGWDYSGSSNLGELKLLLEEAIMLRRLKSDVLSQLPAKQRKMVVVNPGRISSRAKAALDAAAKEMTKDKTKQQQKEALLVFFNRTAEAKIPCVVEYILDLLDSGREKFLVFAHHKVILDAVAKELERKNVQHIRIDGSTPSADREAQCQRFQLSKGHTVALLSITAANMGLTFSTADLVVFAELFWNPGVGNVARVPLGMPRAEKYKIRK

SEQ ID NO: 8141 - protein, 495 aa, Mus musculus
LMTIMEDYFAFRNFLYLRLDGTTKSEDRAALLKKFNEPGSQYFIFLLSTRAGGLGLNLQAADTVVIFDSDWNPHQDLQAQDRAHRIGQQNEVRVLRLCTVNSVEEKILAAAKYKLNVDQKVIQAGMFDQKSSSHERRAFLQAILEHEEENEEEDEVPDDETLNQMIARREEEFDLFMRMDMDRRREDARNPKRKPRLMEEDELPSWIIKDDAEVERLTCEEEEEKIFGRGSRQRRDVDYSDALTEKQWLRAIEDGNLEEMEEEVRLKKRKRRRNVDKDPVKEDVEKAKKRRGRPPAEKLSPNPPKLTKQMNAIIDTVINYKDSSGRQLSEVFIQLPSRKDLPEYYELIRKPVDFKKIKERIRNHKYRSLGDLEKDVMLLCHNAQTFNLEGSQIYEDSIVLQSVFKSARQKIAKEEESEEESNEEEEEDDEEESESEAKSVKVKIKLNKKEEKGRDTGKGKKRPNRGKAKPVVSDFDSDEEQEENEQSEASGTDNE

SEQ ID NO: 8142 - protein, 163 aa, Mus musculus
TKDPNIKSLVVSQFTTFLSLIETPLKASGFVFTRLDGSMAQKKRVESIQRFQNTEAGSPTIMLLSLKAGGVGLNLCAASRVFLMDPAWNPAAEDQCFDRCHRLGQKQEVIITKFIVKDSVEENMLKIQNTKRDLAAGAFGTKKTDANDMKQAKINEIRTLIDL

SEQ ID NO: 8143 - protein, 1471 aa, Mus musculus
MEFREACHIIPQDFHLQAMVRSAGKLVLIDKLLPKLKAGGHKVLIFSQMVRCLDILEDYLIQRRYLYERIDGRVRGNLRQAAIDRFSKPDSDRFVFLLCTRAGGLGINLTAADTCIIFDSDWNPQNDLQAQARCHRIGQSKAVKVYRLITRNSYEREMFDKASLKLGLDKAVLQSMSGRDGNITGIQQFSKKEIEDLLRKGAYAAIMEEDDEGSKFCEEDIDQILLRRTTTITIESEGKGSTFAKASFVASENRTDISLDDPNFWQKWAKKADLDMDLLNSKNNLVIDTPRVRKQTRHFSTLKDDDLVEFSDLESEDDERPRSRRHDRHHTYGRTDCFRVEKHLLVYGWGRWRDILSHGRFKRRMTERDVETICRAILVYCLLHYRGDENIKSFIWDLISPAENGKTKELQNHSGLSIPVPRGRKGKKVKSQSTFDIHKADWIRKYNPDTLFQDESYKKHLKHQCNKVLLRVRMLYYLRQEVIGDQAEKVLGGAIASEIDIWFPVVDQLEVPTTWWDSEADKSLLIGVFKHGYEKYNTMRADPALCFLEKAGRPDDKAIAAEHRVLDNFSDLVEGIDFDKDCEDPEYKPLQGPPKDPDDEGDPLMMMDEEISVIDGEEAQVTQQPGHLFWPPGSALTARLRRLVTAYQRSYKREQMKMEAAERGDRRRRRCEAAFKLKEIARREKQQRWTRREQTDFYRVVSTFGVEYDPDNMQFHWDRFRTFARLDKKTDESLTKYFHGFVAMCRQVCRLPPAAGDEPPDPNLFIEPITEERASRTLYRIELLRRLREQVLCHPLLEDRLALCQPPGLELPKWWEPVRHDGELLRGAARHGVSQTDCNIMQDPDFSFLAARMNYMQNHQAGASAASLSRCSTPLLHQQCTSRTASPSPLRPDAPVEKSPEESTVQVPNLESLTLKLEDEVVARSRLTSQDYEVRVGSSDTAPLSRSVPPVKLEDEDDSDSELDLSKLSPSSSSSSSSSSSSSSTDESEDEKEEKLTADRSRPKLYDEESLLSLTMSQDGFPNEDGEQMTPELLLLQERQRASEWPKDRVLINRIDLVCQAVLSGKWPSNRRSQEVTAGGILGPGNHLLDSPSLTPGEDGDSPVPTPRSGSAASMAEEEASAVTTAAAQFTKLRRGMDEKEFTVQIKDEEGLKLTFQKHRLMANGVMGDGHPLFHKKKGNRKKLVELEVECMEEPNHLDLDLETRIPVINKVDGTLLVGDEAPRRAELEMWLQGHPEFAVDPRFLAYMEERRKQKWQRCKKNNKAELNCLGMEPVQPANSRNGKKGHYAETAFNRVLPGPVAPENSKKRVRRTRPDLSKMMALMQGGSTGSLSLHNTFQHSSSNLQSVSSLGHSSTTSASLPFMPFVMGAAAPPHVDSSTMLHHHHHHPHPHHHHHHHPGLRTTGYPSSPATTTSGTALRLPTLQPEDDDEEEDEEDDDLSQGYDSSERDFSLIDDPMMPANSDSSEDADD

SEQ ID NO: 8144 - protein, 829 aa, Mus musculus
ERIDGGITGNMRQEAIDRFNAPGAQQFCFLLSTRAGGLGINLATADTVIIYDSDWNPHNDIQAFSRAHRIGQNKKVMIYRFVTRASVEERITQVAKKKMMLTHLVVRPGLGSKTGSMSKQELDDILKFGTEELFKDEATDGGGDNKEGEDSSVIHYDDKAIERLLDRNQDETEDTELQGMNEYLSSFKVAQYVVREEEMGEEEEVEREIIKQEESVDPDYWEKLLRHHYEQQQEDLARNLGKGKRIRKQVNYNDGSQEDRDWQDDQSDNQSDYSVASEEGDEDFDERSEAPRRPSRKGLRNDKDKPLPPLLARVGGNIEVLGFNARQRKAFLNAIMRYGMPPQDAFTTQWLVRDLRGKSEKEFKAYVSLFMRHLCEPGADGAETFADGVPREGLSRQHVLTRIGVMSLIRKKVQEFEHVNGRWSMPELAEVEENKKMSQPGSPSPKTPTPSTPGDTQPNTPAPVPPAEDGIKIEENSLKEEESTEGEKEVKSTAPEATVECAQPPAPAPATAPATATAPEDDKAPAEPPEGEEKVEKAEVKERTEEPMETEAKGTTEVEKVEEKSAVDLTPIVVEDKEEKKEEEEKKDVMLQNGETPKDLSDEKQKKNSKQRFMFNIADGGFTELHSLWQNEERAATVTKKTYEIWHRRHDYWLLAGIINHGYARWQDIQNDPRYAILNEPFKGEMNRGNFLEIKNKFLARRFKLLEQALVIEEQLRRAAYLNMSEDPSHPSMALNTRFAEVECLAESHQHLSKESMAGNKPANAVLHKVLKQLEELLSDMKADVTRLPATIARIPPVAVRLQMSERNILSRLANRAPEPPPQQVAQQQ

SEQ ID NO: 8145 - protein, 99 aa, Mus musculus
MSTAGWMNRHPHDERQDSINAYNEPNSTKFVFMLSTRAGGLGINLATADVVILYDSDWNPQVDLQPMDHAHRIGQRKTVRVFRFITDNTVEERIWNVLR

SEQ ID NO: 8146 - protein, 1651 aa, Mus musculus
IGLENKITRHEAELLCKKKVTRKLMEEVFASPPPSARPAAVKLKASRLFQPVQYGQKPEGRTVAFPSTHPPRMANTNTSTATPQGQVRGRPPIATFSANPDTKGGEVVKIAQLASIAGPQSRVAQPETPVTLQFQGNKFTLSHSQLRQLTAGQPLQLQGSVLQIVSAPGQPYLRAPGPVVMQTVSQAGAVHSTLGSKPPTSGPSPAPLTPQVGVPGRVAVSAMAVGEPGLASKPASPAAGPTQEEKSRLLKERLDQIHFINERRCSQAPVYGRDLLRICSLPGRRKRPLCWSLDSNFGKGPKGVNYDMSLSKSEGDLILTLSQESLQDVLGRVACVIPPVVATPPSLWVARPPSLYSSRLRALRQCLREHTGPYHRQLQQLTALRSLQFPELRLVQFDSGKLEALAILLQKLKSEGRRVLILSQMVLMLDILEMFLNFHYLTYVRIDENANSEQRQELMRSFNRDRRIFCALLSTHSRATGINLVEADTVVFYDNDLNPVMDAKAQEWCDRIGRCKDIHIYRLVSGNSIEEKLLKNGTKDLIREVAAQGNDYSMAFLTQRTIQELFEVYSPMDDTGFPVKAEEFVVLSQEPSVSETIAPKIARPFIEALKSIECLEEDAQRSTEEAVPGSSSVAVSSDSDGSRYDEEPSQLEELADFMEQLTPIEKYALNYLELFHTTTEQEKERISEDLVMASMKDWETRNARALQEREARLQLEQEEAELLTYTREDAYTMEYVYEDADGQTEVMPLWTPPTPPQDDNDIYIDSVMCLMYETTPIPEAKLPPVYVRKERKRHKTDPSAAGRKKKQRHGEAVVPPRSLFDRATPGMLKIRREGKEQKKNLLLKQQTPFAKPLPTYVKSSGEPAQDSPDWLIGEDWALLQAVKQLLELPLNLTIVSPAHTPNWDLVSDVVNSCSRIYRSSKQCRNRYENVIIPREEGKSKNNRPLRTSQIYAQDENATHTQLYTSHFELMKMTAGKRSPPIKPLLGMNPFQKNPKHASVLAESGINYDKPLPPIQVASLRAERIAKEKKALADQQKAQQPPVTQPPPQQQQQQQQQQQQQQQQQQPPPPPQQPPPPVPQPQAASSQTPAGQPAVQPQPQPQVQAQPQPVQPQSKGQPTMTTVGSAAVLAGTIKTSVTGTSIPTGTVSGNVIVNTIAGVPAATFQSINKRLASPVAPGTLTTSGGSAPAQVVHTQQRAVGSPATATTDLVSMTTTQGVRAVTSVTASAVVTTNLTPVQTPTRSLVTQVSQATGVQLPGKTITPAAHFQLLRQQQQQQQQQQQQQQTSQVQVPQLQSQAQSPAQIKAVSKLGPEHIIKMQKQKMQLPPQPPPPQAQPGPPQQPAQVQVQTPQPPQQQQSPQLTTVTAPRPGALLTGTTVTNLQVARLLQAQGQMQTQTPQPAQVALAKPPVVSVPAAVVSSPGVTTLPMNVAGISVAIGQPQKTAGQTVVAQPVNVQQLLKYKQQTAVQQQKAIQPQVAQGQAAVQQKLTTQQITTQGPQQKVAYAAQPALKTQFLTTPISQAQKLAGTQQVQTQIQVAKLPQVVQQQTPVASIQQVASASQQASPQTVTLTQATAAGQQVQMIPTVTATAQLVQQKLIQQQVVTTASASLQTPGGPSPAQLPASSDSPSQQPKLQMRVPAVRLKTPTKPPCQ

SEQ ID NO: 8147 - protein, 263 aa, Mus musculus
TKQQQKEALLVFFNRTAEAKIPCVVEYILDLLDSGRERFLVFAHHKVILDAVAKELERKNVQHIRIDGSTPSADREAQCQRFQLSKGHTVALLSITAANMGLTFSTADLVVFAELFWNPGVLIQAEDRVHRIGQTNSVSIHYLVAKGTADDYLWPLIQEKIKVLGEAGLSETNFSEMTEATDYVHKDPKQKTIYDLFQQSFEDDGNDMEFLEAAESFELGSTSGTSGNISQDLGDLLDEDEGSPPKKSRFEFFDNWDSFSSPF

SEQ ID NO: 8148 - protein, 186 aa, Mus musculus
MKPGRPRVKKDEKQNLLSVGDYRHCRTEQEEDEELLTERSKATNVCTRFEDSPSYVKWGKLRDYQVRGLNWLISLYENGINGILADEMGLGKTLQTISLLGYMKHYRNIPGPHMVLVPKYTLHNWISEFKRWIPTLRSVCLIGDEEQRAVFVRDVLLPGEWDVCVTSYEMLIKEKVCVQKNSAGDT

SEQ ID NO: 8149 - protein, 292 aa, Mus musculus
MLDIEEFFVKYKNYSYLHCEWATEQQLLKDKRIQQKIKRFKLRQAQRAHFLADMEEEPFNPDYVEVDRILEVSFCEDKDTGESVIYYLVKWCSLPYEDSTWELKEDVDLAKIEEFEQLQASRPDTRHLDRPPSNIWKKIEQSREYKNGNQLREYQLEGLNWLLFNWYNRRNCILADEMGLGKTIQSITFLYEILLTGIRGPFLIIAPLSTIANWEREFRTWTDINVVVYHGSLISRQMIQQYEMYFRDSQGRIIRGAYRFQAIITTFEMILGGCGELNAIDWRCVIIDEAHR

SEQ ID NO: 8150 - protein, 1022 aa, Mus sp.
GRQTPAIGPDGEPLDETSQMSDLPVKVIHVESGKILTGTDAPKAGQLEAWLEMNPGYEVAPRSDSEESGSEEEEEEEEEEQPQPAQPPTLPVEEKKKIPDPDSDDVSEVDARHIIENAKQDVDDEYGVSQALARGLQSYYAVAHAVTERVDKQSALMVNGVLKQYQIKGLEWLVSLYNNNLNGILADEMGLGKTIQTIALITYLMEHKRINGPFLIIVPLSTLSNWAYEFDKWAPSVVKVSYKGSPAARRAFVPQLRSGKFNVLLTTYEYIIKDKHILAKIRWKYMIVDEGHRMKNHHCKLTQVLNTHYVAPRRLLLTGTPLQNKLPELWALLNFLLPTIFKSCSTFEQWFNAPFAMTGEKVDLNEEETILIIRRLHKVLRPFLLRRLKKEVEAQLPEKVEYVIKCDMSALQRVLYRHMQAKGVLLTDGSEKDKKGKGGTKTLMNTIMQLRKICNHPYMFQHIEESFSEHLGFTGGIVQGLDLYRASGKFELLDRILPKLRATNHKVLLFCQMTSLMTIMEDYFAYRGFKYLRLDGTTKAEDRGMLLKTFNEPGSEYFIFLLSTRAGGLGLNLQSADTVIIFDSDWNPHQDLQAQDRAHRIGQQNEVRVLRLCTVNSVEEKILAAAKYKLNVDQKVIQAGMFDQKSSSHERRAFLQAILEHEEQDEEEDEVPDDETVNQMIARHEEEFDLFMRMDLDRRREEARNPKRKPRLMEEDELPSWIIKDDAEVERLTCEEEEEKMFGRGSRHRKEVDYSDSLTEKQWLKAIEEGTLEEIEEEVRQKKSSRKRKRDSEAGSSTPTTSTRSRDKDEESKKQKKRGRPPAEKLSPNPPNLTKKMKKIVDAVIKYKDSSSGRQLSEVFIQLPSRKELPEYYELIRKPVDFKKIKERIRNHKYRSLNDLEKDVMLLCQNAQTFNLEGSLIYEDSIVLQSVFTSVRQKIEKEDDSEGEESEEEEEGEEEGSESESRSVKVKIKLGRKEKAQDRLKGGRRRPSRGSRAKPVVSDDDSEEEQEEDRSGSGSEED

SEQ ID NO: 8151 - protein, 1929 aa, Rattus norvegicus
MASKEKENQLRISKAEKEEGRVKQTVTEALVCIYRFASMSGTDLEMKDKDDIRLLPSALGVKKRKRGPKKQKENKPGKPRKRKKLDSEEEFGSERDEYREKSESGGSEYGTGPELGLVRDGDWTQVEQKSSATLLLTWGLEDVEHVFSEEDYHTLTNYKAFSQFMRPLIAKKNPKIPMSKMMTILGAKWREFSANNPFKGKCHGLWTFSPPHSHAGPGHKRRGKSARAPDGRKKLRGKKMAPLKIKLGLLGGRRRKAGSGDEGPEPEAEESDLDSGSVHSASGRPDGPVRAKKLKRGRPGRKKKKVTGEEEVDGYETDHQDYCEVCQQGGEIILCDTCPRAYHLVCLDPELDRAPEGKWSCPHCYCRVCKDGGELLCCDACISSYHIHCLNPPLPDIPNGEWLCPRCTCPVLKGRVQKILHWRWGEPPVAVPAPQQADGDPDAPPPRVLQGRSEREFFVKWVGLSYWHCSWAKELQLEIFHLVMYRNYQRKNDMDEPPPLDYGSGEDDGKSDKRKVKDPHYAEMEEKYYRFGIKPEWMTVHRIINHSMDKKGNYHYLVKWKDLPYDQSTWEEDEMNIPEYDDHKQSYWRHRELIMGEDPAQPRKYKKKKKEIQGDGPPSSPTNDPTVKYETQPRFITATGGTLHMYQLEGLNWLRFSWAQGTDTILADEMGLGKTIQTIVFLYSLYKEGHTKGPFLVSAPLSTIINWEREFQMWAPKFYVVTYTGDKDSRAIIRENEFSFEDNAIKGGKKAFKMKREAQVKFHVLLTSYELITIDQAALGSIRWACLVVDEAHRLKNNQSKFFRVLNGYKIDHKLLLTGTPLQNNLEELFHLLNFLTPERFNNLEGFLEEFADISKEDQIKKLHDLLGPHMLRRLKADVFKNMPAKTELIVRVELSPMQKKYYKYILTRNFEALNSRGGGNQVSLLNIMMDLKKCCNHPYLFPVAAMESPKLPSGAYEGGALIKSSGKLLLLQKMLRKLKEQGHRVLIFSQMTKMLDLLEDFLDYEGYKYERIDGGITGALRQEAIDRFNAPGAQQFCFLLSTRAGGLGINLATADTVIIFDSDWNPHNDIQAFSRAHRIGQANKVMIYRFVTRASVEERITQVAKRKMMLTHLVVRPGLGSKAGSMSKQELDDILKFGTEELFKDENEGENKEEDSSVIHYDNEAIARLLDRNQDATDDTDVQNMNEYLSSFKVAQYVVREEDKIEEIEREIIKQEENVDPDYWEKLLRHHYEQQQEDLARNLGKGKRVRKQVNYNDAAQEDQDNQSEYSVGSEEEDEDFDERPEGRRQSKRQLRNEKDKPLPPLLARVGGNIEVLGFNTRQRKAFLNAVMRWGMPPQDAFTTQWLVRDLRGKTEKEFKAYVSLFMRHLCEPGADGSETFADGVPREGLSRQQVLTRIGVMSLVKKKVQEFEHINGRWSMPELMPDPSADSKRSSRASSPTKTSPTTPEASTTNSPCTSKPATPAPSEKGDGVRTLLEKDDTENPEEKPEKSSKVGEKMETEIDSPSPAPSLGERLEHRKILLEDDAPGVPGEIEPEPGYRGDREKSASEPTPGERGEEKPLDGQEHRERTEGETGDLGKRAEDVKADRELRLGPPRDEPRPNGRREEKVEKPRFMFNIADGGFTELHTLWQNEERAAISSGKLNEIWHRRHDYWLLAGIVLYPLHIHGYARWQDIQNDAQFAIINEPFKTEANKGNFLEMKNKFLARRFKLLEQALVIEEQLRRAAYLNLSQEPAHPAMALHARFAEAECLAESHQHLSKESLAGNKPANAVLHKVLNQLEELLSDMKADVTRLPATLSRIPPIAARLQMSERSILSRLASKGTEPHPTPAFPPGPYATPPGYGAAFSAAPVGALAAAGANYSQMPAGSFITATTNGPPVLVKKEKEMVGALVSDGLGLDRKEPRAGEALGPAANPPPSPPLGPPLG

SEQ ID NO: 8152 - protein, 2600 aa, Rattus norvegicus
MPGGRPPLAPRPLLASPPGHVARPLSPGSEEEDMDALLNNSLPPPHPENEDDPEEDLSEAETPKLKKKKKPKKPRDPKIPKSKRQKKEEPKSSAQLLEDWGMEDIDHVFSEEDYRTLTNYKAFSQFVRPLIAAKNPKIAVSKMMMVLGAKWREFSTNNPFKGSSGASVAAAAAAAVAVVESMVTATEVAPPPPPVEVPIRKAKTKEGKGPNARRKPKGSPRVPDAKKPKPKKVAPLKIKLGGFGSKRKRSSSEDDDLDVESDFDDASINSYSVSDGSTSRSSRSRKKLRTAKKKKKGEEEVTAVDGYETDHQDYCEVCQQGGEIILCDTCPRAYHMVCLDPDMEKAPEGKWSCPHCEKEGIQWEAKEDNSEGEEILEEVGGDPEEEDDHHMEFCRVCKDGGELLCCDTCPSSYHIHCLNPPLPEIPNGEWLCPRCTLELHCQVMFRNYQRKNDMDEPPSGDFGGDEEKSRKRKNKDPKFAEMEERFYRYGIKPEWMMIHRILNHSVDKKGHVHYLIKWRDLPYDQASWESEDVEIQDYDLFKQSYWNHRELMRGEEGRPGKKLKKVKLRKLERPPETPTVDPTVKYERQPEYLDATGGTLHPYQMEGLNWLRFSWAQGTDTILADEMGLGKTVQTAVFLYSLYKEGHSKGPFLVSAPLSTIINWEREFEMWAPDMYVVTYVGDKDSRAIIRENEFSFEDNAIRGGKKASRMKKEASVKFHVLLTSYELITIDMAILGSIDWACLIVDEAHRLKNNQSKFFRVLNGYSLQHKLLLTGTPLQNNLEELFHLLNFLTPERFHNLEGFLEEFADIAKEDQIKKLHDMLGPHMLRRLKADVFKNMPSKTELIVRVELSPMQKKYYKYILTRNFEALNARGGGNQVSLLNVVMDLKKCCNHPYLFPVAAMEAPKMPNGMYDGSALIRASGKLLLLQKMLKNLKEGGHRVLIFSQMTKMLDLLEDFLEHEGYKYERIDGGITGNMRQEAIDRFNAPGAQQFCFLLSTRAGGLGINLATADTVIIYDSDWNPHNDIQAFSRAHRIGQNKKVMIYRFVTRASVEERITQVAKKKMMLTHLVVRPGLGSKTGSMSKQELDDILKFGTEELFKDEATDGGGDNKEGEDSSVIHYDDKAIERLLDRNQDETEDTELQGMNEYLSSFKVAQYVVREEEMGEEEEVEREIIKQEESVDPDYWEKLLRHHYEQQQEDLARNLGKGKRIRKQVNYNDGSQEDRDWQDDQSDNQSDYSVASEEGDEDFDERSEAPRRPSRKGLRNDKDKPLPPLLARVGGNIEVLGFNARQRKAFLNAIMRYGMPPQDAFTTQWLVRDLRGKSEKEFKAYVSLFMRHLCEPGADGAETFADGVPREGLSRQHVLTRIGVMSLIRKKVQEFEHVNGRWSMPELAEVEENKKMSQPGSPSPKTPTPSTPGDTQPNTPAPVPPAEDGIKIEENSLKEEESTEGEKEVKPTAPEVTVEDDKAPAEPPEGEEKVEKAEVKERAEEPMETESKGTTEVEKAEEKSAVDLTPIVVEDKEEKKEEEEKKEVLLQNGETPKDLSDEKQKKNLKQRFMFNIADGGFTELHSLWQNEERAATVTKKTYEIWHRRHDYWLLAGIINHGYARWQDIQNDPRYAILNEPFKGEMNRGNFLEIKNKFLARRFKLLEQALVIEEQLRRAAYLNMSEDPSHPSMALNTRFAEVECLAESHQHLSKESMAGNKPANAVLHKVLKQLEELLSDMKADVTRLPATIARIPPVAVRLQMSERNILSRLANRAPEPPPQQVAPAAVKTQIIMGRKLDPTKKEKRGPGRKARKQKGAETELIRFLPAVCFLSLPNLLLFNNKTAGDENFKRLSSRARKRAAKRRSGSVEVPKPNKSPGIKTLPGELPKGAVQVRGKKRPAPIQNSDGDEEEDSEEEDVVTQGELWGSEDSSEDMVDDYGADSEDEEEKLLPIERAALKQKARDPADGTQWSEEDTDEDEGVTPESHPRKDDKAEGDLQINVEEEEAFTPDLQRVHKRIQDIVGVLRDFGAQREEGRSRTEYLSQLQKDLATYYSYGDFLLSKLMELFPLSELIEFLEANEVPRPITLRTNTLKTRRRDLAQALINRGVNLDPLGKWSKSGLVVYDSSVPIGATPEYLAGHYMLQGASSMLPVMALAPQEHERILDMCCAPGGKTSYIAQLMKNTGVILANDANAERLKSVVGNLHRLGVTNTIVSHYDGRQFPKVGSCPSEASSGYRALGGIAGLCSPWEAGVLLAASIGPALPSPQVVGGFDRVLLDAPCSGTGVISKDPAVKTNKDEKDIQRCAHLQKELLLSAIDSVNAASKTGGYLVYCTCSITVEENEWVVDYALKKRNVRLVPTGLDFGQEGFTRFRERRFHPTLRATRRFYPHTHNMDGFFIAKFKKFSNSIPQPHSGNSAAGTPTEPDLKGQVTPKSENSSQPTKKAHGAAKAKQQLVGQQHSKKPFQKMNGISKGPGLPTEPSVPNVQVSARPQESSLSDVKRKRAGKLKQRGPKQSAPPPKVGDLGTPAMQTPSEISATPRPKSPGKAKKREEVKQELPEQPAKGTASLKEDAAPKRLSSPTTAHHSSTRPPPAKRRKSMTKGSSQPLLS

SEQ ID NO: 8153 - protein, 1613 aa, Rattus norvegicus
MSTPDPPLGGTPRPGPSPGPGPSPGAMLGPSPGPSPGSAHSMMGPSPGPPSAGHPMPTQGPGGYPQDNMHQMHKPMESMHEKGMPDDPRYNQMKGMGMRSGAHTGMGPPPSPMDQHSQGYPSPLGGSEHASSPVPASGPSSGPQMSSGPGGAPLDGSDPQALGQQNRGPTPFNQNQLHQLRAQIMAYKMLARGQPLPDHLQMAVQGKRPMPGMQQQMPTLPPPSVSATGPGPGPGPGPGPGPGPAPPNYSRPHGMGGPNMPPPGPSGVPPGMPGQPPGGPPKPWPEGPMANAAAPTSTPQKLIPPQPTGRPSPAPPAVPPAASPVMPPQTQSPGQPAQPAPLVPLHQKQSRITPIQKPRGLDPVEILQEREYRLQARIVHRIQELENLPGSLAGDLRTKATIELKALRLLNFQRQLRQEVVVCMRRDTALETALNAKAYKRSKRQSLREARITEKLEKQQKIEQERKRRQKHQEYLNSILQHAKDFREYHRSVTGKLQKLTKAVATYHANTEREQKKENERIEKERMRRLMAEDEEGYRKLIDQKKDKRLAYLLQQTDEYVANLTELVRQHKAAQVAKEKKKKKKKKKAENAEGQTPAIGPDGEPLDETSQMSDLPVKVIHVESGKILTGTDAPKAGQLEAWLEMNPGYEVAPRSDSEESGSEEEEEEEEEEQPQPAQPPTLPVEEKKKIPDPDSDDVSEVDARHIIENAKQDVDDEYGVSQALARGLQSYYAVAHAVTERVDKQSALMVNGVLKQYQIKGLEWLVSLYNNNLNGILADEMGLGKTIQTIALITYLMEHKRINGPFLIIVPLSTLSNWAYEFDKWAPSVVKVSYKGSPAARRAFVPQLRSGKFNVLLTTYEYIIKDKHILAKIRWKYMIVDEGHRMKNHHCKLTQVLNTHYVAPRRLLLTGTPLQNKLPELWALLNFLLPTIFKSCSTFEQWFNAPFAMTGEKVDLNEEETILIIRRLHKVLRPFLLRRLKKEVEAQLPEKVEYVIKCDMSALQRVLYRHMQAKGVLLTDGSEKDKKGKGGTKTLMNTIMQLRKICNHPYMFQHIEESFSEHLGFTGGIVQGLDLYRASGKFELLDRILPKLRATNHKVLLFCQMTSLMTIMEDYFAYRGFKYLRLDGTTKAEDRGMLLKTFNEPGSEYFIFLLSTRAGGLGLNLQSADTVIIFDSDWNPHQDLQAQDRAHRIGQQNEVRVLRLCTVNSVEEKILAAAKYKLNVDQKVIQAGMFDQKSSSHERRAFLQAILEHEEQDEEEDEVPDDETVNQMIARHEEEFDLFMRMDLDRRREEARNPKRKPRLMEEDELPSWIIKDDAEVERLTCEEEEEKMFGRGSRHRKEVDYSDSLTEKQWLKAIEEGTLEEIEEEVRQKKSSRKRKRDSEAGSSTPTTSTRSRDKDEESKKQKKRGRPPAEKLSPNPPNLTKKMKKIVDAVIKYKDSSGRQLSEVFIQLPSRKELPEYYELIRKPVDFKKIKERIRNHKYRSLNDLEKDVMLLCQNAQTFNLEGSLIYEDSIVLQSVFTSVRQKIEKEDDSEGEESEEEEEGEEEGSESESRSVKVKIKLGRKEKAQDRLKGGRRRPSRGSRAKPVVSDDDSDEEQEEDRSGSGSEED

SEQ ID NO: 8154 - protein, 1613 aa, Rattus norvegicus
MSTPDPPLGGTPRPGPSPGPGPSPGAMLGPSPGPSPGSAHSMMGPSPGPPSAGHPMPTQGPGGYPQDNMHQMHKPMESMHEKGMPDDPRYNQMKGMGMRSGAHTGMGPPPSPMDQHSQGYPSPLGGSEHASSPVPASGPSSGPQMSSGPGGAPLDGSDPQALGQQNRGPTPFNQNQLHQLRAQIMAYKMLARGQPLPDHLQMAVQGKRPMPGMQQQMPTLPPPSVSATGPGPGPGPGPGPGPGPAPPNYSRPHGMGGPNMPPPGPSGVPPGMPGQPPGGPPKPWPEGPMANAAAPTSTPQKLIPPQPTGRPSPAPPAVPPAASPVMPPQTQSPGQPAQPAPLVPLHQKQSRITPIQKPRGLDPVEILQEREYRLQARIAHRIQELENLPGSLAGDLRTKATIELKALRLLNFQRQLRQEVVVCMRRDTALETALNAKAYKRSKRQSLREARITEKLEKQQKIEQERKRRQKHQEYLNSILQHAKDFREYHRSVTGKLQKLTKAVATYHANTEREQKKENERIEKERMRRLMAEDEEGYRKLIDQKKDKRLAYLLQQTDEYVANLTELVRQHKAAQVAKEKKKKKKKKKAENAEGQTPAIGPDGEPLDETSQMSDLPVKVIHVESGKILTGTDAPKAGQLEAWLEMNPGYEVAPRSDSEESGSEEEEEEEEEEQPQPAQPPTLPVEEKKKIPDPDSDDVSEVDARHIIENAKQDVDDEYGVSQALARGLQSYYAVAHAVTERVDKQSALMVNGVLKQYQIKGLEWLVSLYNNNLNGILADEMGLGKTIQTIALITYLMEHKRINGPFLIIVPLSTLSNWAYEFDKWAPSVVKVSYKGSPAARRAFVPQLRSGKFNVLLTTYEYIIKDKHILAKIRWKYMIVDEGHRMKNHHCKLTQVLNTHYVAPRRLLLTGTPLQNKLPELWALLNFLLPTIFKSCSTFEQWFNAPFAMTGEKVDLNEEETILIIRRLHKVLRPFLLRRLKKEVEAQLPEKVEYVIKCDMSALQRVLYRHMQAKGVLLTDGSEKDKKGKGGTKTLMNTIMQLRKICNHPYMFQHIEESFSEHLGFTGGIVQGLDLYRASGKFELLDRILPKLRATNHKVLLFCQMTSLMTIMEDYFAYRGFKYLRLDGTTKAEDRGMLLKTFNEPGSEYFIFLLSTRAGGLGLNLQSADTVIIFDSDWNPHQDLQAQDRAHRIGQQNEVRVLRLCTVNSVEEKILAAAKYKLNVDQKVIQAGMFDQKSSSHERRAFLQAILEHEEQDEEEDEVPDDETVNQMIARHEEEFDLFMRMDLDRRREEARNPKRKPRLMEEDELPSWIIKDDAEVERLTCEEEEEKMFGRGSRHRKEVDYSDSLTEKQWLKAIEEGTLEEIEEEVRQKKSSRKRKRDSEAGSSTPTTSTRSRDKDEESKKQKKRGRPPAEKLSPNPPNLTKKMKKIVDAVIKYKDSSGRQLSEVFIQLPSRKELPEYYELIRKPVDFKKIKERIRNHKYRSLNDLEKDVMLLCQNAQTFNLEGSLIYEDSIVLQSVFTSVRQKIEKEDDSEGEESEEEEEGEEEGSESESRSVKVKIKLGRKEKAQDRLKGGRRRPSRGSRAKPVVSDDDSDEEQEEDRSGSGSEED

SEQ ID NO: 8155 - protein, 1813 aa, Rattus norvegicus
MAVPLCRSADRHTALHCVLAKQQEVAVRSSKAGRSWRRVLIGCVSACHSASEEASASDSGSQSESEQGSDPGSGHGSESNSSSESSESQSESESESAGSKSQPVLPEAKEKPASKKERIADVKKMWEEYPDVYGVRRSNRSRQEPSRFNIKEEASSGSESGSPKRRGQRQLKKQTVPKPQVKKQPKIQRGKRKKQESSDDDDDDDEAPKRQTRRRAAKNVSYKEDDDFETDSDDLIEMTGEGVDEQQDNSETIEKVLDSRLGKKGATGASTTVYAVEANGDPSGDFDTEREEGEIQYLIKWKGWSYIHSTWESEESLQQQKVKGLKKLENFKKKEDEIKQWLGKVSPEDVEYFNCQQELASELNKQYQIVERVIAHSRKPAPSNEPEYLCKWMGLPYSECSWEDEALIGKKFQSCIDSFHSRNNSKTIPTRECKALKQRPRFVALKKQPAYLGGENLELRDYQLEGLNWLAHSWCKSNSVILADEMGLGKTIQTISFLSYLFHQHQLYGPFLIVVPLSTLTSWQREFEIWAPEVNVVVYIGDLMSRNTIREYEWIHSQTKRLKFNALITTYEILLKDKTVLGSINWAFLGVDEAHRLKNDDSLLYKTLIDFKSNHRLLITGTPLQNSLKELWSLLHFIMPEKFEFWEDFEEDHGKGRENGYQSLHKVLEPFLLRRVKKDVEKSLPAKVEQILRVEMSALQKQYYKWILTRNYKALAKGTRGSTSGFLNIVMELKKCCNHCYLIRAPEDSERETGQEVLQSLIRSSGKLILLDKLLTRLRERGNRVLIFSQMVRMLDILAEYLTIKHYPFQRLDGSIKGEIRKQALDHFNADGSEDFCFLLSTRAGGLGINLASADTVVIFDSDWNPQNDLQAQARAHRIGQKKQVNIYRLVTKGTVEEEIIERAKKKMVLDHLVIQRMDTTGRTVLENNSGRSNSNPFNKEELTAILKFGAEDLFKEIEGEESEPQEMDIDEILRLAETRENEVSTSATDELLSQFKVANFATMEDEEELEERPHKDWDEIIPEEQRKKVEEEERQKELEEIYMLPRIRSSTKKAQTNDSDSDTESKRQAQRSSASESETDDSDDDKKPKRRGRPRSVRKDLVEGFTDAEIRRFIKAYKKFGLPLERLECIARDAELVDKSVADLKRLGELVHNSCVSAMQEYEEQLKENASEGKGPGKRRGPTIKISGVQVNVKSIIQHEEEFEMLHKSIPVDPEEKKKYCLTCRVKAAHFDVEWGVEDDSRLLLGIYEHGYGNWELIKTDPELKLTDKLSALRQCSKKHFNLKRSFNLAPGIPCSWKEEIHDGWDALADEATSPSYLSCSTLLTAQILPVETDKKPQGKQLQTRVDYLLKLLRKGLEKKGTVTSGEEAKLKKRKPRVKKENKAPRLKDEHGLELSSPRHSDNPSEEGEVKVKGGDAKSSSKSKRSQGPVHITAGSEPVPIGEDEDDDLDQETFSICKERMRPVKKALKQLDKPDKGLNVQEQLEHTRSCLLKIGDRIAECLRAYSEQEHIKLWRRNLWIFVSKFTEFDARKLHKLYKMAHKKRSQEEEEQKKKDDTLGGKKPFRPEASGSSRDSLISQSHASHNLHPQKPHLPASHGPQMHGHPRDTYSHPNKRHFSNADRGDWQRERKFNYGGGNNAPWGGDRHHQYEQHWYKDHHYGDRRHMDAHRSGSYRPNNMSRKRPYEQYNSDRDHRGHRDYYDRHHHDSKRRRSDDFRPQNYHQQDFRRMSDHRPTMGYHGQGPSDHYRSFHTDKLGEYKQPMPTLHTALSDPRSPPAQKSPHDSKSPLDHRSPLERSLEQKNNPDYNWNVRKT

SEQ ID NO: 8156 - protein, 960 aa, Rattus norvegicus
MNPLSPYLNVDPRYLVQDTDEFILPTGANKTRGRFELAFFTIGGCCMTVMHQWVKEFHTWWPPFRVAIAARNRLLCPQKDLLLMQEMERLVRDIVHCHGVLITSYSYIRLMQDDISRHDWHYVILDEGHKIRNPNAAVTLACKQFRTPHRIILSGSPMQNNLRELWSLFDFTFPGKLGTLPVFMEQFSVPITMGGYSNASPVQVKTAYKCACVLRDTINPYLLRRMKSDVKMSLSLPDKNEQVLFCRLTDEQHKVYQNFIDSKAVYRILNGENQIFSGLVALRKICNHPDLFSGGPKNTSALPEDGLEEEQFGYWKRSGKMIVVESLLKIWHKQGQRVLLFSQSRQMLHILEVFLRAHKYSYLKMDGTTTIASRQPLITKYNEDTSIFVFLLTTRVGGLGVNLTGANRVIIYDPDWNPSTDTQARERAWRIGQKKQVTVYRLLTAGTIEEKIYHRQIFKQFLTNRVLKDPKQRRFFKSNDLYELFTLTSPDASQGTETSAIFAGTGSNIQTLKCHFKKRTPPVLQMDPKRKKPLVSDTSVNGATVMEEKSQGSGATGSVPSTESGPLKSDRHTDGSRASSVGFGEEADAGSTLEHLSGLSGDSPAVDHTSRLSAVASTSEKQGSSYEGECCQAQTGPVHLSEQTEGHFSKHKSKRKHDAAEEETTEKCPQPKQKAKNSRHHRDAKFEGTRVPHLVKKRRYHQQTTEQESGAKDRSSDDYVLEKLFKKSVGVHSVVKHDAIIDGSSPDYVLVEAEANRVAQDALKALRLSRQQCLGATSGVPTWTGHRGISGAPAGVKKRFGQKRNSSLPVQRPSSLTERTQNMKKEGEAHTAEHFSGKEDGASSSGAPSSSSLLARMRARNHMILPERLESDGEQLAGAAAAAAPPCSTEHDALLVDMRNFIAFQAQVDGQASTQEILQAFESKLSVAQSCVFRELLRNLCNFHRTPGGEGIWKLKPEYC

SEQ ID NO: 8157 - protein, 2688 aa, Rattus norvegicus
MDLDAAVLLAQLVCVLLEGKLSKLRALNHSPMSDASVNFDYKSPSPFDCSPDQGENIEEAANHCLPQKDFYTTEEEADTLFSRKLMSHNGMEDNGGRGTGVKKKRKKKEPGEQEGTKASKDREPKPKRKREPKEPKEPRRAKEPKRAKEPKEAKQKDGVKKPRKPREASGTKEGKEKRSCTDCGPRTKPKKASKDQGPTPVERKKKGKRKNETTVESLELDQSLPNPSLQSPEEPSESADSQKRRSGRQVKRRKYNEDLDFKVVDDDGETIAVLGAGRTSALSASTLAWQAEEPPEDDANIIEKILASKTVQEPDEDLFNPDYIEIDRILEVAHTKDAETGEEVTHYLVKWCSLPYEESTWELEEDVDPAKVKEFESLQILPEVKPVERPASDAWQKLETSREYKNSNRLREYQLEGMNWLLFNWYNRKNCILADEMGLGKTIQSIAFLSEIFVRGIHGPFLIIAPLSTITNWEREFRTWTEMNAIVYHGSQISRQMIQQYEMVYRDAQGNPLSGVFKFHVVITTFEMILADCPELKKIHWSCVVIDEAHRLKNRNCKLLEGLKLMALEHKVLLTGTPLQNSVEELFSLLNFLEPSQFPSETAFLEEFGDLKTEEQVKKLQSILKPMMLRRLKDDVEKNLAPKQETIIEVELTNIQKKYYRAILEKNFSFLTKGANQHNMPNLINTMMELRKCCNHPYLINGAEEKILEDFRKAHSSEASDFQLQAMIQAAGKLVLIDKLLPKLIAGGHKVLIFSQMVRCLDILEDYLIQRRYTYERIDGRVRGNLRQAAIDRFCKPDSDRFVFLLCTRAGGLGINLTAADTCIIFDSDWNPQNDLQAQARCHRIGQSKAVKVYRLITRNSYEREMFDKASLKLGLDKAILQDINRKGSTNGVQQLSKMEVEDLLRKGAYGALMDEEDEGSKFCEEDIDQILQRRTHTITIQSEGKGSTFAKASFVASGNRTDISLDDPNFWQKWAKIAELDTEANNEKESLVIDRPRVRKQTKHYNSFEEDELMEFSELDSDSDERPTRSRRLSDKARRYLRAECFRVEKNLLTFGWGRWKDILTHGRFKWPLNEKDMEVICRALLVYCVKHYKGDEKIKSFIWELITPSKDGQVQTLQNHSGLSAPVPRGRKGKKTKNQLLLPELKTADWLATCNPEVVLHDDGYKKHLKQHCNKVLLRVRMLYYLKAEILGEAADKAFEGTPARELDVLLPDIDYVEIPVDWWDAEADKSLLIGVFKHGYERYNAMRADPALCFLEKVGMPDEKSLSAEQGVTDGTSDIPERGNIDKEDSAEDKVDGLQKQTASPSDGSDGIFGEKKDDSQAVSSALTARLRRLVTIYQRCNRKELCRPEILGPGNQGYWVQEEVFRRTSDMDLINKEAQKRWTRREQADFYRTVSSFGVVYDQEKEAFDWTQFRAISRLDKKSDENLEHYFHSFVAMCRNVCRLPTWKDDGPPDASIYVEPITEERAAKTLYRIELLRKVREQVLTCPQLHERLQLCRPSLYLPVWWECGKHDRDLLIGTAKHGLNRTDYYIMNDPQLSFLDAYRNYAQHKRTDTQAPGSLCCLYQGNSKLYESLTYTPMSRTSESLESEPENLVKMDSRDDHLCLPEAGLPDITCENFVSKVQEVISLDHDESLLPESLENMMYGKTGLSQEPRSFQEAPSTNMQSRKKTVTVSASRDESCQLPGIEAEITSASSLMSSLEAGVAKMNIKNGKHLLVSISEEGEPCCSETGRSPESRGRLEARCLASPTLDTGHESGFVDLCSLSVYDSKRNFSSDQQLIDLLENKSLENKLILNQSDEEEEENEKETLAIVASTTEKPAVLDFTQPTASIPRGKNLSFHQDEAKKGRLEVGSKTPGPQRAFPPSANQCHCKHIERWAHGLGSEESEGEKPKAYEPDPYRSKANNTTVEGEPAIIPTEPFKLKHELLKEPWKESSEGGKSFSMYVPEGSEPKSEEMDFENKDDYEKDGACHSQDYPGKYSEEESKSSASGIAGDLGEEAQEVRAPTIAQLLQEKTLYSFSEWPKDRVIINRLDNICHVVLKGKWPCSHQYEPSGALPTPVLSSSAGSRSSLSEPEATEHSFSNGAALAAQIQKESFLAPVFTKDEQKHRRPYEFEVERDAKARSLEEYSASHGRPPIVLNGWHGESAIDLSCSSEGSPGATSPFPVSASTPKIGAISSLQGALGMDLSGILQAGLIHPVTGQIVNGSLRRDDAAMRRRRGRRKHIEGGMDLIFLKEQTLQAGILLVVRWVEIQTLSGEDQVGTAGKVQYPMLYRSPVTGVSSVEEVHEDAGQTTLNTTHPEGPGAASSASEPTAAASSQAEKAVPSKSLLDWLRQQADYSLDVPGFGASFSDKPKQRRPRCKEPGKLDIGSLGGEERVSAVPKEPGLRGFLPESKFNHTLAEPVLRDAGPRRRGRRPRNELLKAPAIVADSPSGMGPLFMNGLIAGMDLVGLQNVRNIPGIPLTGLVGFPAGFATMPTGEDVKNTLSMLPMMLPGMATVPQMFGVGGLLNTPMATTCTTTASASLASTKSGASATEKTTEDELSGRDVKADSLVEDKPGPSPFSDQSEPTITTSSPVAFNPFLIPGVSPGLIYPSMFLSPGMGMALPAMQQGRHSEMAGLETQKRKKKKTKGDNPTPEPASVCEREPGSDQNCTESSVTVSPEREHVAQAREEGLKDSNDDTN

SEQ ID NO: 8158 - protein, 1230 aa, Rattus norvegicus
MEASQGLAEVGTLSPQLAESYLRYSQEAKEAAKNGDLEEALKLFNLAKDIFPTKKVISRIQKLQEALEQLAEEEDDEFTDVCNSGLLLYRELYEKLFEHQKEGIAFLYSLYKNGRKGGILADDMGLGKTVQIIAFLSGMFDASLVNHVLLIMPTNLINTWVKEFAKWTPGMRVKTFHGSSKNERIRNLTRIQQRNGVVITTYQMLLNNWQQLASFNGQAFVWDYVILDEAHKIKSASTKSAVCARAVPASNRLLLTGTPIQNNLQELWSLFDFACQGSLLGTLKTFKMEYENPIIRAREKDATPGEKALGFKMSENLMEIIKPYFLRRTKEEVHMKKADKPEVRPGEKNSGVEDICEMLSLTRKNDLIVWIRLVPLQEEIYRKFVSLDHIKELLMETRSPLAELGVLKKLCDHPRLLSARACHLLNLGTVTFSAEDENEQEDASNMGSIDHLSDNALMQESGKMIFLMALLERLQDEGHQTLVFSQSRQILNIIERLLKNKHFKTLRIDGTVTHLWEREKRIQLFQQNKEYSVFLLTTQVGGVGLTLTAASRVVIFDPSWNPATDAQAVDRVYRIGQKENVVVYRLITCGTVEEKIYRRQVFKDSLIRQTTGDKKNPFRYFTKQELKELFTVGDLLNSATQMQLQCLHAAQRKSDEKLDEHIAYLHSLGIAGISDHDLMFTCDLSVKEELDMLEDAQYIQHRVQKAQFLVESESQNTKERPSEENWLKAQEFPSQQRKKGNKPQPQPSRLLANPTQVEAISSQMASISIYDQSTESEPQELSEAHDVTSLQGDQHHFESTSDAGTIASLPQGAESIGGVWTDSLLSPAKGFAADNEAVQKNELQASPGQEALSENLGSFHYLPRQSSKADLEPNLDVQDSVVLYHQSPTANENQNLESNEPMIEISDDLSASPSALQGAQAMEAQLELKKDPLESPPQYECDFNLFLEDSADTRQNLSSKFLEHVEKENSLQRPAGNSGEESAHNLSLDSSNKIDEESEVITVKTKNKARRILSDDEDEEDAFKDTSTNSFSVSPLTFSSVKHFDASTPQNDSNPSRRFFSPKIPDDVNTSLHPRRSLASRRSLINVVLDDMEDMEERLDTSSEEESEPELSEDSNEEAVACTEEQRSGATLASGNKHSSLTESEPTSPAPQSSPCAPEPSSSDPLLDPPQDPAVEAANDYESLVARGKELKECGKTQEALNCLVKALDIKSADPEVMRMTLSLYKQLNT

SEQ ID NO: 8159 - protein, 1249 aa, Rattus norvegicus
MNMTGSEMPNLVRNLGLLRAVEVFEESGAYKQEKTCGFAKIKSSSLKAVSLLREVLPINMNLFNLDRFRFEKRSKIEEAPEAAPQPSQPGPSSPISLSAEEENAEGEVSRANTPDSDVTEKTEDSSVPEPPDNESKASLSCFQNQRTIQEYIDLSSDSEDVSPNCSSTVQEKKFSKDTVIIVSEPSEDEESHDLPSATRRNDISELEDLSELEDLKDAKLQTLKELFPQRSDSDLLKISWLLWRPAENRISVRQICLDGSVVRPVLVVSEFLRIKENRLMALKTEDGYTGSETDFHSGKRCAYLIDSTSTMDGAIAAALLKFGDAGLVEARGLVAGQWGLGDWDSMQFRATGHAPEDLLGSKMVSVVNDSVRLIGCEDSIKLVLLHCEEGCMKLLASCGGPRKRKLSSSSEAYEEDEANDDQSLKKPRGDRREESNESAEASSNWEKQESIVLKLQKEFPNFDKQKKIMYFQELREVLKEHEWMYTEALESLKVFAEDQDVQCASQSEVTNGKEVARNQNYSKNAAKIKMKQKISMKPQNGFNKKRKKNVFNPKKAVEDSEYDSGSDAGSSLDEDYSSCEEVMEDGYKGKILHFLQDASIGELTLIPKCSQKKAQKIIELRPFNNWETLFTKMSKINGLSEDLIWNCKTVIQERDVVIRLMNKCEDISNKLTKQVTMLTGNGGGWNIEQPSLLNQSLSLKPYQKVGLNWLALVHKHGLNGILADEMGLGKTIQAIAFLAYLFQEGNKGPHLIVVPASTIVFKAKLLNPILADSYNLLCFVDNWLREVNLWCPTLNVLCYYGSQEERKQIRFNIHNKYEDYNVIVTTYNCAISSSDDRSLFRRLKLNYAIFDEGHMLKNMGSIRYQHLMTINARNRLLLTGTPVQNNLLELMSLLNFVMPHMFSSSTSEIRRMFSSKTKPADEQSIYEKERIAHAKQIIKPFILRRVKEEVLKLLPPKKDQIELCAMSEKQEQLYSGLFNRLKKSINNLEKNTEMCNVMMQLRKMANHPLLHRQYYTAEKLKEMSQLMLKEPTHCEANPDLIFEDMEVMTDFELHVLCKQYQHINSYQLDMDLILDSGKFRTLGCILSELKQKGDRVVLFSQFTMMLDILEVLLKHHQHRYLRLDGKTQISERIHLIDEFNTDMDIFVFLLSTKAGGLGINLTSANVVILHDIDCNPYNDKQAEDRCHRVGQTKEVLVIKLISQGTIEESMLKINQQKLKLEQDMTTVDEADEGSMPADIATLLKTSMGL

SEQ ID NO: 8160 - protein, 1445 aa, Rattus norvegicus
MFFHVILDNYDRWCPGERCLAPSLDNKKLCEASIKSITVDENGEPFAVVLYPDFQEKKIPLQRLQEVKSTKDHSRSLIFDDEDLEKPYFPDQKIPSLVSAFQLSEDGDSIPYTINRYLRDYQREGAQFLYRHYIKGRGCILGDDMGLGKTIQVISFLAAVLHKKGTREDIENNMPEFLLKSMKKESSSTARKMFLIVAPLSVLYNWKDELDTWGYFRVTVLHGSKKDNELTRLKQRKCEIALTTYETLRLCLEELNSLEWSAIIVDEAHRIRNPNARVTEVMKAVKCKVRIGLTGTILQNNMKELWCVMDWAVPGLLGSRIHFKKQFSDPVEHGQRHTATKRELATGRKAMHRLAKKMSGYFLRRTKTLIKGQLPKKEDRMVYSSLTDFQKAVYQTVLETEDVALILTSSQPCTCGSGQKRRKCCYKETLIKRICDQVFSRFPDFVQKSKDAAFETLSDPKYSGKMKVLDQLLNHFRKHRDKVLLFSFSTKLLDVLQQYCMASGLDYRRLDGSTKSEERLKIVKEFNSSQDVNICLVSTMAGGLGLNFIGANVVILFDPTWNPANDLQAIDRAYRIGQCRDVKVFRLISLGTVEEIMYLRQVYKQQLHCVVVGSENAKRYFEAVQGSKEHRGELFGVHNLFKLRSQGSCLTRDILEREGQVEAGIMTATTWLKGEASAQKLETPRDPDCQEPTNVCELYSDMSDEESVGKAVKHKVSGPSRTPGSSAQLTLLQCGFSKLFEAKCESVQDGDGNPVSSDGSSDEQPMCLSAKARQAACQKTWDSVCTSEHQKSDNIQTPDEKCVSDKSEKTLEQNVSSESDDETKCHSTAGHHCMGQGDTESEDSDVIFPTQDPTQRVPKNPICCKLLLGESEDSETEDPVKVNHDDGRQNSGRGNGPVSNFLYLENMTLKSVRKRKGTDDISDESDDIDMFPKSRIRKQRATASLKLKSKKENKRKHYNSPITAKDTNQVCEADGDCSSQVIEDFSSSDDSSSVSHVSFTKLNHRAETVKDGVQEVAYIHSNQNVIGSSRAENHMSRWATRDVFELKQFSQLPANVAVCSSETYKSKVNANAVIPTKKDQPPSDGHISSPLYISHPVSQKKKDVYRTNHTTFIIGETPRGIRRKQFEEMASFYKLSVKEFAEQVTSATSEEQQRMLRDFYSLQHPEVKEFFMDSASELMKSVHEKEERVRNKSKGKESLLKERPSNDSTLSCNDSTNKMSQVYNQKICEGKSVRFQNHGSHKEDTFSSGAEIKKSPVNFTQEIYSERNNHTPKDSMTLFCPDSKSEALETELEGSSGHQWDLTGAGSSRNRPCFKLRNKRVENPVSESTPTEGLLGDTSILNDLFKSHGEGPTQLPKNGPSGPVAKAKQRPKDFWDILNEQNDDSLSKLTDLAVIETLCTKAPRTTASKRKEELEASLWKANEKFLWKTFSSDVDDESISSRERE

SEQ ID NO: 8161 - protein, 2432 aa, Rattus norvegicus
MGTEFSHSPSEPFLEKPVPDMTQVSGQNAQLVKSDDYLPSIEQQPQQKKKKKKNNHIAAGDPSKGFGKDDFPGGVDNQELSRNSLDASQEETKKRKRPKVKKDPKELKEPREKKEPKTPKAPKTPKEPKERKAKTVTPKPKSSKKSSNKKPDSEASALKKKVNKGKTEGSENSDLDKTPPPSPGPEEDEDPGVQKRRSSRQVKRKRYTEDLEFKISDEEADDADAAGRDSPSNTSQSEQQESVDAEGPVVEKIMSSRLVKKQKESGEEVEVEEFYVKYKNFSYLHCQWASVEDLEKDKRIQQKIKRFKSKQGQSKFLSEIEDDLFNPDYVEVDRIMDFARSTDDRGEPVTHYLVKWCSLPYEDSTWELRQDLDQAKIEEFEKLMSREPETERVERPPADDWKKSESSREYKNNNKLREYQLEGVNWLLFNWYNMRNCILADEMGLGKTIQSITFLYEIYLKGIHGPFLVIAPLSTIPNWEREFRTWTELNVVVYHGSQASRRTIQLYEMYFKDPQGRVIKGSYKFHAIITTFEMILTDCPELRNIPWRCVVIDEAHRLKNRNCKLLEGLKMMDLEHKVLLTGTPLQNTVEELFSLLHFLEPSRFPSETTFMQEFGDLKTEEQVQKLQAILKPMMLRRLKEDVEKNLAPKEETIIEVELTNIQKKYYRAILEKNFTFLSKGAEEKILEEFKDAHNADSPDFQLQAMIQAAGKLVLIDKLLPKLKAGGHRVLIFSQMVRCLDILEDYLIQRTYPYERIDGRVRGNLRQAAIDRFSKPDSDRFVFLLCTRAGGLGINLTAADTCIIFDSDWNPQNDLQAQARCHRIGQSKSVKIYRLITRNSYEREMFDKASLKLGLDKAVLQSMSGRENATNGVQQLSKKEIEDLLRKGAYGALMDEEDEGSKFCEEDIDQILLRRTHTITIESEGKGSTFAKASFVASGNRTDISLDDPNFWQKWAKKAELDIDALNGRNNLVIDTPRVRKQTRLYSAVKEDELMEFSDLESDSEEKPCIKPRRPQDKTQGYARSECFRVEKNLLVYGWGRWTDILSHGRYKRQLTEHDVETICRAILVYCLNHYRGDENIKSFIWDLITPTADGQTRALLNHSGLSAPVPRGRKGKKVKAQSMQPVVQDADWLASCNPDALFQEDSYKKHLKHHCNKVLLRVRMLYYLRQEVIGDQAEKILEGADSSEADVWIPEPFHAEVPADWWDKEADKSLLIGVFKHGYEKYNSMRADPALCFLERVGMPDAKAIAAEQRGTDMLADGGDGGEFDREDEDPEYKPTRAPFKDEIDEFANSPPEDKEDSMEAQSTGEGPGQLVMEAWGTGEGPGQLVMEAWGTGKHSESNAELGQLYWPNTSSLTTRLRRLITAYQRSYKRQQMRQEALMKTDRRRRRPREEVRALEAEREAIISEKRQKWTRREEADFYRVVSTFGVIFDPVKQQFDWNQFRAFARLDKKSDESLEKYFSCFVAMCRRVCRMPAKPEDEPPDLASLIEPITEERASRTLYRIELLRKIREQVLHHPQLSDRLKLCQPSLDLPEWWECGRHDRDLLVGAAKHGVSRTDYHILNDPELSFLDAHKSFAQNRGASTVPSLNTLAMGFGQAPPVIASAHAHEEKVMEQAEGKAEECEHSPAKERSDGKEEEEEAGGAKDSRQECEAEASSVKGELKGVEGSGDPGSKSVSEKGSEEDEEEKLEDDDKSEESSQPEGAVSRGKTFDEESNASMSTARDETRDGFYMEDGDPSVAQLLHERTFAFSFWPKDRVMINRLDNICEAVLKGKWPINRRQMFDFQGLVPGYPPSTVDSPLQKRSFAELSMVSQASVSASEDITTSPQLSKRRRRRRKVEIEAERAAKRRNLMEMVAQLRESQVVSENGQEKVVDLSKASREATSSTSNFSSLTSKFILPNVSTPVSDAFKTQMELLQAGLSRTPTRHVLNGSLVDGEPPMKRRRGRRKNVEGLDLLFMSHKRTPLSAEDAEVTKAFEEDIETPPIRNIPSPGQLDPDTRIPVINLEDGTRLVGEEAPKNKDLVDWLKLHPMYTVDMPSYVPKNADVLFSPFQKPKQKRHRCRNPNKLDINTLTGEERVPVVNKRNGKKMGGAMAPPMKDLPRWLEENPEFAVAPDWTDIVKQSGFVPESMFDRLLTGPVVRGEGASRRGRRPKSEIARAAAAAAAVASTSGINPLLVNSLFAGMDLTSLQNLQNLQSLQLAGLMGFPPGLATAATAGGDAKGPAAVLPLMLPGMAGLPNVFGLGGLLNNPLSAATGNTTTASSQGEPEDGTSKAEEKGNDNEDENRDSEKSTDAVSAADSANGSVGAATAPAALPSNPLAFNPFLLSTMAPGLFYPSMFLPPGLGGLTLPGFPALAGLQNAVGASEEKAADKAEGGPCKDGETLEGSDAEENLDKTIESSILEDEVAQGEELDSLEGGDEIENNGNDE

SEQ ID NO: 8162 - protein, 1808 aa, Rattus norvegicus
MALTLLQWVSVARLALCEPTECSMEDSSTTDRLNFDRFDICRLLQHGASLLGSAGAEFEVQDEKSESRFWYYGLSGPFREGEVDPKERIARQRKLLQKKLGLNMGEAIGMSTEELFNDEDLDYTPTSAALVNKQSTLQAAELIDSEFRAGMSNRQKNKAKRMAKLFAKQRSRDAVETNEKSNDSTDGEPEEKRRKVANVVINQTASDAKVLIDNVPESSSFIEEVRHGAGTGLREILKAHGKSGGKMGDSTLEEMIQQHQEWLEDLVIRLLCVFALDRFGDFVSDEVVAPVRETCAQTLGVVLKHMNETGVHKTVDVLLKLLTQEQWEVRHGGLLGIKYALAVRQDVINTLLPKVLTRIIEGLQDLDDDVRAVAAASLVPVVESLVYLQTQKNSSSWLIPILSDMLRHIFQFCVLESSQEILDLIHKVWMELLSKASVQYVVAAACPWMGAWLCLMMQPSHLPIDLNMLLEVKARTKEKTGGKVRQGQMQSKEVLQEYIAGADTIMEDPATRDFVVMRARMMAAKLLGALCCCICDPGVNMVNQEIKPAESLGQLLLFHLNSKSALQRISAALVICEWAALQKECKAVTLAVQPRLLDILSEHLYYDEIAVPFTRMQNECKQFISSLADAHIEVGNRVNNNVLTIDQANDLVTTLFNEVTSTFDLNPQVLQQLDSKRHQVQMTVAETNQEWQVLQLRVHTFAACAVVSLQQLPEKLNPIIKPLMETIKKEENTLVQNYAAQYIAKLLQQCTTRTPCPNSKVIKNLCSSLCVDPYLTPCVTCPVPTQSGQENSKGSNSEKDGMHHTVTKHRGIITLYRHQKAAFAITSRRGPIPKAIKAQIADLPAGSSGNILVELDEGQKPYLVQRRGAEFALTTVVKHFGAEMALKLPHLWDAMVGPLKTMIDLNNFGVMEQLDVGIVPYIVLLVVPVLGRMSDQTDSVRFMATQCFATLIRLMPLEAGIPDPPNMSEELIQLKAKERHFLEQLLDGKKLENYKIPVPINAELRKYQQDGVNWLAFLNKYKLHGILCDDMGLGKTLQSICILAGDHCQRNIKFNYCILDEGHVIKNGKTKLSKAVKQLTANYRIILSGTPIQNNVLELWSLFDFLMPGFLGTERQFAARYGKPILASRDARSSSREQEAGVLAMDALHRQVLPFLLRRMKEDVLQDLPPKIIQDYYCTLSPLQVQLYEDFAKSRAKCDVDETVSSAALSEETEKPKLKATGHVFQLLLDCGLGNGTSSESGTESVVAQHRILIFCQLKSMLDIVEHDLLKPHLPSVTYLRLDGSIPPGQRHSIVSRFNNDPSIDVLLLTTHVGGLGLNLTGADTVVFVEHDWNPMRDLQAMDRAHRIGQKRVVNVYRLITRGTLEEKIMGLQKFKMNIANTVISQENSSLQSMGTDQLLDLFTLDKDGKAEKADSSTSGKASMKSVLENLSDLWDAEQYDSEYNLETFMRSLEFKFTRRLAADKGSGQVSMCYQEVLLQGQPLQSLSPRARHQNHFLKGLVQGSKANGHPEERAQFVLNLLLFIKQTLYSRLYKADFLKQTYTVERCNGLQRLQVAPATVTATCGVLKSLESGCTRNALTCRAGTRSPSPRIPDRFNKLLLQKKKVQTTKFKQLSDSFESSTFSHSSESVQAVLVQAPGQKPRKGYQQEQSKEQHFVQEQAFPCARTQALRVPVNYCNLTTSASLDPLLDPFRGIKSTVSLIKHSAELEEATNNRQKCAIYLEQVPGCSVYTTPALELRDASAQAAFPVHSRGRGSGEAGRAVGALEKQQQEGRQVMHGVAQCHPKKRQTKGDIAKNRWGEKDAANT

SEQ ID NO: 8163 - protein, 986 aa, Rattus norvegicus
MVGKARSSNFTLSEKLDLLNLVKPYVKILEEHTNKNSVIVEKNRCWDVIAVNYNAIGVDRPPRTAQGLRSLYKRLKEYAKQELLQQKEAQSDYKSSISEPTKKVVEMIPQISSFCLVRDRNHIQSTNLDEAAQAGTSSLQVMVDHHPVAITVEVKQEEDIKPSPALVSSPQHNDALEQQEEHELMRVAEGSVSPSLSSVDMRMTSSPSSVPRRDVFHQESGEHLRSLLRCDPQVLQMLKEEHQLILENQKKFGLYVQEKRDGLKRRQRLEEELLRAKIEVEKLRASRLRRDLPEYIHLASKEIIESKAQEEEASSLLKYFSVVWCKASKKKHKKWEGDAILIVKGRSFILKDMEGKDIGRGMGYKFKELENVEEGQTLMLGGKEIEILGTVSAEDFNSGKCFQAGSGSPAVPSSQAARKCFSNPFKSVCQSTQARRDRGNDWQNCKPRYDPYTPNALVMPRPDKSHQWAFNRSCLPTVDVVIDPHLVRHLRPHQKDGVAFLYECVMGMRAVGKCGAILADEMGLGKTLQCISLIWTLQCQGPYGGKPIVKRTLIVTPGSLVNNWRKEFQKWLGSERIKIFTVDQDHKVEEFINSAFHSVLIISYEMLLRSLDRIKTITFGLLICDEGHRLKNSGIKTTAALSSLSCEKRVILTGTPVQNDLQEFFALVDFVNPGILGSLSSYRRIYEEPIVMSREPSASKEERELGERRTTELTRLTGCFILRRTQEVINKYLPPKIENVVFCRPGALQIELYRKLLSSQSVRFCLQGLLGNSAHLICIGALKKLCNHPRLLFSFVKGKEFNSSRDENEERSLCQGLLTVFPAGYNLLQLSESESGKLQVLVKLLAAISELRPTEKVILVSNYRQTLNLLEEVCKCHGYACARLDGQTPVSQRQQIVDNFNSKYSTDFIFLLSSKAGGVGLNLIGGSHLILYDIDWNPATDIQRGGDLFSFQHEKALGHTVQLTCRVFTTTGDDSYGAMIELCRLQ

SEQ ID NO: 8164 - protein, 1371 aa, Rattus norvegicus
MGLGKTIQSITFLYEVLLTGIRGPFLIIAPLSTIANWEREFRTWTDINVVVYHGSLISRQMIQQYEMYFRDSQGRIIRGAYRFQAIITTFEMILGGCGELNAIEWRCVIIDEAHRLKNKNCKLLEGLKLMNLEHKVLLTGTPLQNTVEELFSLLHFLEPLRFPSESTFMQEFGDLKTEEQVQKLQAILKPMMLRRLKEDVEKRLAPKEETIIEVELTNIQKKYYRAILEKNFSFLSKGAGQTNVPNLVNTMMELRKCCNHPYLIKGAEEKIIGEFRDTYNPSASDFHLQAMIQSAGKLVLIDKLLPKMKAGGHKVLIFSQMVRCLDILEDYLIHKRYLYERIDGRVRGNLRQAAIDRFSKPDSDRFVFLLCTRAGGLGINLTAADTCIIFDSDWNPQNDLQAQARCHRIGQNKAVKVYRLVTRNSYEREMFDRASLKLGLDKAVLQSMSGRDSNVSGIQQLSKKEIEDLLRRGAYGAIMEEEDEGSKFCEEDIDQILLRRTKTITIESEGCGSTFAKASFVASGNRTDISLDDPNFWQKWAKKAELDLDAISGRNSLVIDTPRIRKQTRPFSATKDELAELSEAESEGEEKPKLRRPCDRSGGYGRTECFRVEKNLLVYGWGRWREILSHGRFKRQLNEHDVEVICRALLAYCLVHYRGDEKIKGFIWDLITPTEDGQTRELQNHLGLSAPVPRGRKGKKVKTQTSSFDIQKAEWLRKYNPEQLLQDEGYKKHVKHHCNKDVEDPEYKPAPAIFKDDIEVRSGSHCLKPQYSVFLIVNDQFKLTNIDDVSSPGDLVIADGEGQLMEGDKVYWPTPSALTTRLRRLITAYQRTNKNRHIQQAQPTFSVPASVMQPLYEEAALNPKMAAKIERQQRWTRREEADFYRVVSTFGVVFDPDRGQFDWTKFRALARLHKKTDNSLEKYLCAFMAMCRRVCRLPSKEELVDPNIFIQPITEERASRTLYRIELLRKVREQALRHPQLFERLKLCHPNPDLPIWWECGSHDRDLLIGAAKHGVSRTDYHILRDPELSFMAAQRSYSQSKVTHSRTSTPLLQQYQVVLSASPLTSSPRLLGAKGPLVEDVRVKSESLAEEPQSSEEESMSSMETRTRVKSEPVSPKNGVLSQAPGEQKSGGKSETDRRMVAARTEPLTPNPASKKQRVHKRGSSSSGTRTKPHQAWPGATVAYRASLSTGAGVPCHSSVDRVMINRLDSICQTVLKGKWPSARRHYDANTVASFYTTKLLDSPGAATEYSEPSVPTPPAVAVKEEHEQSPQMSKVKKHVREKEFTVKIKDEGGLKLTFQKQGLAQKRPFDGEDGAVGQQQCLPRPRELQSTSETSVVNTSKSIPASGKRDSVSSRCSCLCQITFYTHLK

SEQ ID NO: 8165 - protein, 1129 aa, Rattus norvegicus
MEPDTATEAATVAASDARATIVVLEDEQPGPSTFKEEGAAAAATEATTATEKGEKKEKITSPFQLKLAAKTSKSEKEMDPEYEEKMVNIPLKADRAKRFEFLLKQTELFAHFIQPSAQKSPTSPLNMKLARPRVKKDDKQSLISVGDYRHRRTEQEEDEELLSESRKTSNVCVRFEVSPSYVKGGPLRDYQIRGLNWLISLYENGVNGILADEMGLGKTLQTIALLGYLKHYRNFPGPHMVLVPKSTLHNWMNEFKRWVPSLRVICFVGDKDVRAAFIRDEMMPGEWDVCVTSYEMVIKEKSVFKKFHWRYLVIDEAHRIKNEKSKLSEIVREFKSTNRLLLTGTPLQNNLHELWALLNFLLPDVFNSADDFDSWFDTKNCLGDQKLVERLHAVLKPFLLRRIKTDVEKSLPPKKEIKIYLGLSKMQREWYTKILMKDIDVLNSSGKMDKMRLLNILMQLRKCCNHPYLFDGAEPGPPYTTDEHIVSNSGKMVALDKLLARIKEQGILLQSKNAKMTTTMALAWRISQCSEEEQSQHIVRSALHPAVEKRGIGNVFLVMIFEGKTGLQAGGSETDHSTGIYGMNRSTAICEFGSRVLIFSQMTRLLDILEDYCMWRGYEYCRLDGQTPHEEREEAIEAFNAPNSSKFIFMLSTRAGGLGINLASADVVILYDSDWNPQVDLQAMDRAHRIGQKKPVRVFRLITDNTVEERIVERAEIKLRLDSIVIQQGRLIDQQSNKLAKEEMLQMIRHGATHVFACKESELTDEDIVTILERGEKKTAEMNERMQKMGESSLRNFRMDLEQSLYKFEGEDYREKQKLGTVEWIEPPKRERKANYAVDAYFREALRVSEPKVPKAPRPPKQPNVQDFQFFPPRLFELLEKEILYYRKTIGYKVPRNPELPNPAIAQREEQKKIDGAEPLTPQESEEKDKLLTQGFTNWTKRDFNQFIKANEKYGRDDIDNVAREVEGKSPEEVMEYSAVFWERCNELQDIEKIMAQIERGEARIQRRISIKKALDAKIARYKAPFHQLRIQYGTSKGKNYTEEEDRFLICMLHKMGFDRENVYEELRQCVRNAPQFRFDWFIKSRTAMIFKFSDHICRKADINYISGYKCEPVFCLLILEMPVPFITV

SEQ ID NO: 8166 - protein, 332 aa, Rattus norvegicus
MGLGKTCQTIALLIYLVGRLNDEGPFLILCPLSVLSNWKEEMERFAPGLSCVTYTGDKEERARRQQDLRQESGFHVLLTTYEICLKDASFLKSFSWSVLAVDEAHRLKNQSSLLHRTLSENSLQELYSLLSVVEPDLFCREQVEDFVQCYQDIEKESKSASELHRLLRPFLLRRVKAQVATELPKKTEVVIYHGMSALQKKYYKAILMKDLDAFENETAKKVKLQNVLTQLRKCVDHPYLFDGVEPEPFEVGEHLIEASGKLHLLDRLLAFLYSGLLAFLYSGLLAFLYSGLLAFLYSGQWVYPGQAAAGFSVPWIDSGFTLDRLLAFLYPG

SEQ ID NO: 8167 - protein, 885 aa, Rattus norvegicus
MGLGKTIQAIAISYFYKEEWPLLIVVPSSLRYPWIEELEKWIPELEPEEINVITNKTDTGRIATSRVTVLGYGLLTTDAETLLEALDRQNFRVVIVDESHYMKSRTAARSKILLPMVQKAQRAILLTGTPALGRPEELFMQIEALFPQRFGTWVEYAKRYCNAHIRVRKSFTTCLRCCPAGAIQHHLGRLLIDNSMFPINVGVLRLSFLNTDTQQLYFGKRRQWDCRGASNLSELHQLLNDIMIRRLKSEVLSQLPPKVRQRIPFDLAPATVKELNASFEEWQKLMRAPDAGAMETVMGLITRMFKQTAIAKHSPVPGQCSPVPSQALVHCHSSSIAPPECSSNPSLVPVLAPLTLSSWALYMTATETGCSCAFHIASLGALRTETQFSGIVCFLASVEVVSFAGLRLRGNKGSAGAVKDYIKMLLQNDSLKFLVFAHHLSMLQACTEAVIESKARYIRIDGSVPSSERIHLVNQFQKDPDTRVAILSIQAAGQGLTFTAASHVVFAELFWDPGHIKQAEDRAHRIGQCSSVNIHYLIANGTLDSLMWAMLNRKAQVTGSTLNGRKEKLQATEDDKEKWGFLQFAEAWTPSDSFEELKDPVFTHGVKPFLYHLHPLMDLQSQSSRPFNLFLEASMLPQRSFLKQFEKEKQHDIRSFFLPKPRKRPLETSGDAAEAVKEKTTVASDPRNMATKEGTTDKNGVEPETKRLKSLSTRDHCSALEEKPSLQAKATSIDGVHEVKSPLASPALSEKRWQCGFCTFLNDPGLPYCEMCESPQGRAAGLNHRQDNNKEEKEESQKSTSKNDQARLHCVKPCSEQPEVERLARNKEETSKETSLNTRWLSAGINTIASQPINCSHHPNAALPNRSELIDRPLSAECRREGFVE

SEQ ID NO: 8168 - protein, 616 aa, Rattus norvegicus
MASELGAGDDGSCTELAKPLYLQYLERALRDDSEDGLDDNNPLLPESGDPLIQVKEEPPNSLLGETSGASSSGLLNPYSLNGVLQSESKSDKGNLYNFSKLKKSRKWLKVRAFKHMKHIQELLKRQIGVFGEKKLVWLVYSDLVAESILLSDESSEADSQSEDNDDEEEELSLSREELHNMLRLHKYKKLHQNKYSKDKELQQYQYYSAGLLSTCDPFYEQQRHLLGPKKKKFKEDKKLKAKLKKVKKKRRRDEEFSSEESPRHHHHQTKVFAKFSHDAPPPGTKKKHLSIEQLNARRRKVWLSIVKKELPKLAHQCMKEVRRAALQAQKNCKETLPRARRLTKEMLLYWKKYEKVEKEHRKRAEKEALEQRKLDEEMREAKRQQRKLNFLITQTELYAHFMSRKRDMGHDGIQEEILRKLEDSSTQRQIDIGGGVVVNITQEDYDSNHFKAQALKNAENAYHIHQARTRSFDEDAKESRAAALRAADKSGSGFGESYSLANPSIRAGEDIPQPTIFNGKLKGYQLKGMNWLANLYEQGINGILADEMGLGKTVQSIALLAHLAERENIWGPFLIISPASTLNNWHQEFTRFVPKFKGKLLLFFKISFLSLLLPPY

SEQ ID NO: 8169 - protein, 1875 aa, Rattus norvegicus
MELLCVLQEWTEPNNFHICITSYKQFFRGYTAFSRVHWKCLVVDEMQRVKGMTERHWEAIFKLQSQQRLLLIDVPLHNTFLELWTMVHFLIPGISRPYLSFPLKAPNEENQDYYHKMVIRLHRVIHLKLIYPLLHTPWQIGEKNGYYYLQVTQPFILRRTKRDVEKQLTRKYEHVLKCRLSSRQKALYEDVILQPRTQEALKSGHFVSVLSVLTRLQRICNHPGLVEPRVPGSSYAAGSLQYKSASLILRVLEREFWKETDLSMFDLIGLENKISRHEAELLYKKKVTRKLMEEVFTSPPPSARPAAVKLKASRLFQPVQYGQKPEGRTVAFPSTHPPRMANTNASTATPQGQVRGRPPIATFSANPDTKAAGPAHPSKLRAQTAVQASTPGPPLPPPQAPSLVAGQSAPPQRLVLTSQAQARLPSGEVVKIAQLASIAGPQSRVAQPETPVTLQFQGNKFTLSHSQLRQLTAGQPLQLQGSVLQIVSAPGQPYLRAPGPVVMQTVSQAGAVHSTLGSKPPTSGPSPAPLSTQVGVPGRVAVSAMAVGEPGLASKPASPAAGPTQAPVYGRDLLRICSLPGRRKRPLCWSLDSNLGKGPKGADYDTSLSKSEGDLILTLSQRQESLQDVLDRVACVIPPVVATPPSLWVERPPSLYSSRLRALRQCLREHTGPYHRQLQQLTALRSLQFPELRLVQFDSGKLEALAILLQKLKSEGRRVLILSQMVLMLDILEMFLNFHYLTYVRIDENANSEQRQELMRSFNRDRRIFCALLSTHSRATGINLVEADTVVFYDNDLNPVMDAKAQECGNSIEEKLLKNGTKDLIREVAAQGNDYSMAFLTQRTIQELFEVYSPMDDAGFPVKAEEFVVLSQEPSVSETIAPKIARPFIEALKSIECLEEDAQRSTEEAVPGSSTVAVSSDSDGSRYDEEPSQLEELADFMEQLTPIEKYALNYLELFHTTTEQEKERSSEDLVMATMKDWETRNARALQEREAQLQLEQEEAELLTYTREDAYSMEYVYEDADGQTEVMPLWTPPTPPQDDNDIYIDSVMCLMYETTPIPEAKLPPVYVRKERKRHKTDPSAVVYMPLCAFFPFRHLIGEEISLTNIAEFCSCLAAGRKKKQRHGEAVVPPRSLFDRATPGMLKIRREGKEQKKNLLLKQQTPFAKPLPTYVKSSGEPAQDSPDWLIGEDWALLQAVKQLLELPLNLTIVSPAHTPNWDLVSDVVNSCSRIYRSSKQCRNRYENVIIPREEGKLICEANPKKKAQNIYKSKNNRPLRTSQIYAQDENATHTQLYTSHFELMKMTAGKRSPPIKPLLGMNPFQKNPKHASVLAESGINYDKPLPPIQVASLRAERIAKEKKQPPPPVPQPQAASSQTPAGQPVVQPQVQAQPQPPPVQAQSKGQATMTTVGSAAVLAGTIKTSVTGTSIPTGTVSGNVIVNTIAGVPATFQSINKRLASPVAPGALTTSGGSAPAQVVHTQQRAVGSPATATTDLVSMTTTQGVRAVTSVTASAVVTTNLTPVQTPTRSLVTQEHIIKMQKQKMQLPPQPPPPQAQPGPPQQPAQVQVQTAQPPQQQQSPQLTTVTAPRPGALLTGTTVANLQVARLTRVPTSQLQAQGQMQTQTPQPAQVALAKPPVVSVPAAVVSSPGVTTLPMNVAGISVAIGQPQKTAGQTVVAQPVHVQQLLKLKQQAVQQQKAIQPQVAQGQAAVQQKLTTQQITTQGPQQKVAYAAQPALKTQFLTTPISQAQKLAGTQQVQTQIQVAKLPQVVQQQTPVASIQQVASASQQTVTLTQATAAGQQVQMIPTVTATAQVVQQKLIQQQVVTTASASLQTPGGPSPAQLPTSSDSPNQQPKLQMRVPAVRLKTPTKPPCQ

SEQ ID NO: 8170 - protein, 125 aa, Rattus norvegicus
MAQKKRVESIQCFQNTDAGSPTIMLLSLKAGGVGLNLCAASRVFLMDPAWNPAAEDQCFDRCHRLGQKQEVIITKFIVKDSVEENMLKIQNMKRELAAGAFGTKKTDADEMKQAKINEIRTLIDL

SEQ ID NO: 8171 - protein, 97 aa, Rattus norvegicus
MLQVVALHLRKNRLTYATIDGSVNPKQRMDLVEAFNHSQGPQVMLISLLAGGVGLNLTGGNHLFLLDMHWNPSLEDQACDRIYRVGQEKDVVMHRHT

SEQ ID NO: 8172 - protein, 183 aa, Rattus norvegicus
MDQFKAAERMSIGKSNTKDITEVTAVAEAILPKGSARVTTAVKFSAPSLLYGALRDYQKIGLDWLAKLYRKNLNGILADEAGLGKTVQIIAFFAHLACNEGNWGPHLVVMRSCNILKWELELKRWCPGLKTLSYVGTHRELKAKRQVVPPHCHCPLSFFVLHCWRCTQVPHFLDEACAGELCL

SEQ ID NO: 8173 - protein, 179 aa, Rattus norvegicus
MLSSKAGGCGLNLIGANRLVMFDPDWNPANDEQAMARVWRDGQKKICYIYRLLSAGTIEEKIFQRQSHKKALSSCVVDEEQDVERHFSLGELKELFTLDEASLSDTHDRLHCRRCVNNRQVWPPPDGSDCTSDLAQWNHNTDKRGLQDEVLQAAWDASSTAITFVFHQRSHEEQRGLHC

SEQ ID NO: 8174 - protein, 918 aa, Aegolius funereus
ELTDDLLKQYQIVERIIAHSNQKSAAGYPDYYCKWQGLPYSECSWEDGALIAKKFQACIDEYFSRNQSKTTPFKDCKILKQRPRFVALKKQPSYIGGHESLELRDYQLNGLNWLAHSWCKGNSCILADEMGLGKTIQTISFLNYLFHEHQLYGPFLLVVPLSTLTSWQREIQTWAPQMNSVVYLGDIISRNMIRTHEWMHPQTKRLKFNILLTTYEILLKDKSFLGGLNWVFIGVDEAHRLKNDDSLLYKTLIDFKSNHRLLITGTPLQNSLKELWSLLHFIMPEKFSSWEDFEEEHGKGREFGYASLHKELEPFLLRRVKKDVEKSLPAKVEQILRMEMSALQKQYYKWILTRNYKALSKGSKGSTSGFLNIMMELKKCCNHCYLIKPPDDNEFYNKQEALQHLIRSSGKLILLDKLLIRLRERGNRVLIFSQMVRMLDILAEYLKYRQFPFRRLDGSIKGELRKQALDHFNAEGSEDFCFLLSTRAGGLGINLASADTVVIFDSDWNPQNDLQAQARAHRIGQKKQVNIYRLVTKGSVEEDILERAKKKMVLDHLVIQRMDTTGKTVLHTGSTPSSSTPFNKEELSAILKFGAEELFKEPEGEEEEPQEMDIDEILKRAETRENEPGPLTVGDELLSQIKVANFSNMDEDDIELEPEQNFKKWEEIIPEVQRRRIEEEERQKELEEIYMLPRMRNCAKQISFNGSEGKRSRSRKYSGSDSDSISERKRPKKRGRPRTIPRENIKGFSDAEIRRFIKSYKKFGGPLERLDAIARDAELVDKSETDLRRLGELVHNGCIKALKDNSFGQERAGGRLGKVKGPTFRISGVQVNAKLVISHEEELAPLHKSIPSDPEDRKRYVIPCHTKAAHFDIDWGKEDDSNLLIGIYEYGYGSWEMIKMDPDLSLTQKILPDDPDKK

SEQ ID NO: 8175 - protein, 918 aa, Aegolius funereus
ELTDDLHKQYQIVERIIAHSNQKSAAGYPDYYCKWQGLPYSECSWEDGALIAKKFQTCIDEYFSRNQSKTTPFKDCKVLKQRPRFVALKKQPSYIGGHEGLELRDYQLNGLNWLAHSWCKGNSCILADEMGLGKTIQTISFLNYLFHEHQLYGPFLLVVPLSTLTSWQREIQTWAPQMNAVVYLGDITSRNMIRTHEWMHLQTKRLKFNILLTTYEILLKDKSFLGGLNWAFIGVDEAHRLKNDDSLLYKTLIDFKSNHRLLITGTPLQNSLKELWSLLHFIMPEKFSSWEDFEEEHGKGREYGYASLHKELEPFLLRRVKKDVEKSLPAKVEQILRMEMSALQKQYYKWILTRNYKALSKGSKGSTSGFLNIMMELKKCCNHCYLIKPPDGNEFYNKQEALQHLIRSSGKLILLDKLLIRLRERGNRVLIFSQMVRMLDILAEYLKYRQFPFQRLDGSIKGELRKQALDHFNAEGSEDFCFLLSTRAGGLGINLASADTVVIFDSDWNPQNDLQAQARAHRIGQKKQVNIYRLVTKGSVEEDILERAKKKMVLDHLVIQRMDTTGKTVLHTGSTPSSSTPFNKEELSAILKFGAEELFKEPEGEEQEPQEMDIDEILKRAETRENEPGPLTVGDELLSQFKVANFSNMDEDDIELEPERNSRNWEEIIPEVQRRRIEEEERQKELEEIYMLPRMRNCAKQISFNGSEGRRSRSRRYSGSDSDSISERKRPKKRGRPRTIPRENIKGFSDAEIRRFIKSYKKFGGPLERLDAVARDAELVDKSETDLRRLGELVHNGCIKALKDSSSGQERAGGRLGKVKGPTFRISGVQVNAKLVISHEEELAPLHKSIPSDPEERKRYVIPCHTKAAHFDIDWGKEDDSNLLIGIYEYGYGSWEMIKMDPDLSLTQKILPDDPDKK

SEQ ID NO: 8176 - protein, 1075 aa, Nostoc sp. PCC 7120
MAILHGSWILNEQESCLFIWGETWRSPQVDFNFAEISLNPLALSALELSEWLQSQHQAIAKLLPQQLEKRTSKAASSVKINLLTHSQIIALPTEISQPRKKETILISPVHSAALASESDSEVYLQTWRVEGFCLPPSAAIKLLTSLPLNITSGENAFLGGDLRFWSQIARWSLDLISRSKFLPIIQRQPNNSVSAKWQVLLDSAVDGTRLEKFAAKMPLVCRTYQEIGSGESPIYIDFPSQPQDLILGFLNSAIDTQLREMVGNQPVVETRLMASLPSAVRQWLQALIAASNSIDADAVGLERLEAALKAWTMPLQYQLASKNQFRTCFELRSPEPDETEWTLAYFLQAADDPEFLVDAATIWQNPVEQLIYQQRTIEEPQETFLRGLGLASRLYPVIAPTLDTESPQFCHLKPMQAYEFIKAVAWRFEDSGLGVILPPSLANREGWANRLGLKISAETPKKKPGRLGLQSLLNFQWHLAIGGQTISKAEFDRLVALKSPLVEINGEWVELRPQDIKTAEAFFTARKDQMALSLEDALRLSSGDTQVIEKLPVVSFEASGALQELIGALTNNQAVAPLPTPKNFQGQLRPYQERGAAWLAFLERWGLGACLADDMGLGKTIQFIAFLLHLKEQDVLEKPTLLVCPTSVLGNWEREVRKFAPTLKVLQYHGDKRPKGKAFQEAVKKHDLVITSYSLIHRDIKSLQGIPWQIIVLDEAQNVKNAEAKQSQAVRQLETTFRIALTGTPVENRLQELWSILDFLNPGYLGNKQFFQRRFAMPIEKYGDAASLNQLRALVQPFILRRLKTDRDIIQDLPDKQEMTVFCGLTGEQAALYQKAVETSLAEIESAEGLQRRGMILALLIKLKQICNHPAQYLKINTLEQHSSGKLQRLEEMLEEVLAESNTYGVAGAGRALIFTQFAEWGKLLKPHLEKQLGREIFFLYGGTSKKQREEMIDRFQHDPQGPPIMILSLKAGGVGLNLTRANHVFHFDRWWNPAVENQATDRVFRIGQTRNVQVHKFVCNGTLEEKIHDMIESKKQLAEQVVGAGEEWLTELDTDQLRNLLILDRSTVIDEEAD

SEQ ID NO: 8177 - protein, 1055 aa, Nostoc sp. PCC 7120
MKVLHGSWIPNQYSDFVQSGAFYLWVETPINNKKRTHTQVHPGHLSSLELLNFLTQTLGIKETEAQLKQRICSKYFALPTANNEPLPSPELVKYLEVEVPEEYENFQYWQVTCYETVTSVKAVIAINIIKLLKDIHFLALYNASEFQLGSDLLFWYHYTQSFRQIITKDQYIPSLKYRANAATTKKKPKQPPPGFEIYAGWEIISEQYEANIQKYIEYMPLICVAGNSTQTDKLEFFAPETLLRHFSEYLLNNLVSKTPLTAAFEKQIDDSLIHYCLYPQKHNPLKTHTALQEYQQWLGWKNRIIRTQAESPFHLCFQLHSPDAEQIDNWQMQFLVSSKKDPSLKLALADYWIMNSKTKAGVHKEFGKDFDTNLLLNLGYAARMYPKLWQGLETDSPTGMQLSLDEAFDFLKDSAWVLEDSGFKVIVPAWYTPAGRRRAKIRLKASSGRKVAATVGESKSYFGLDSLVQYQYELAIGEQTLTPQEWEQLINTKAPLVHFRGQWMELDRDKMQQLLEFWQSHGDEQPQMSLLEFMQRSAQGEDDWEIEYDAALSEIMAKLQDKSQLEPISEDLNLQGNLREYQKRGVAWLQYLEKLGLNGCLADDMGLGKSVQVIARLVQEKDSQSSPLPTLLIAPTSVVGNWQREIAKFAPHLKTMVHHGSDRLQDAAEFKSACQQHDVVISSFTLARLDEKLLNSVTWQRLVLDEAQNIKNPKAAQTKAILKLSAKHRLALTGTPVENRLLDLWSIFNFLNPGYLGKEAQFRKSFEIPIQKDNDKVKSTTLKKLVEPLILRRVKTDQSIIKDLPDKVEQKLYTNLTKEQASLYEVVVRDVEEKLQEAEGIQRKGLILSTLMKLKQICNHPRQFLQDNSEFLPERSHKLSRLVEMVDEAISEGESLLIFSQFTEVCEQIEKYLKHNLHCNTYYLHGGTSRQRREQMISDFQNPDTEASVFVLSLKAGGVGITLTKANHVFHFDRWWNPAVEDQATDRAFRIGQKKNVFVHKFVALGTLEERIDQMIEDKKKLSSAVVGSDESWLTELDNEAFKKLIALNKSTIME

SEQ ID NO: 8178 - protein, 869 aa, Nostoc sp. PCC 7120
MININYITPQDMRVCSCIETYGDGSYYGKVEYMFNEKAICALIGHPLVFWEDTPNVRVEIVKGEPELLVKKEKLGRLTLEFSPKLPPSQNILNIKETPTRIKVIEITSEHRRITEILGKDNKLNVPAIAEKQVLAAINAVSGIVTVHSDIGGGSEGAEEVPAQTLPHIHLLPANTGLKVTLLSRPFAQGGPYYRPGAGGETVIAEIDGKRLQTRRNLPEEKQLAKNAVAACPSLTRTEERDGEWLIEDPEECLELLLELQALGSSVVMAWPEGEKLRVSHQADLKDFNLSIQRQQDWFAATGELKLNQDLVLDMQQLLALLEKTPSRFIPLGDGQFLALTQAFRKRLDELRLFSEKHSKGIRFHPLATLGLEDFVDEVGKVKTDKHWKTHIQRLQEMKNLQPELPSTFGAELRDYQMDGFCWLARLAHWGVGACLADQMGLGKTVQALAVILRNAHEGPSLIIAPTSVCMNWVSEAQKFAPTLNIIQFTGANRQKLLDGLQPLDMLVCSYGLLQQEEVAQMLSGVQWQTIVLDEAQAIKNMTTKRSQAAMNLKANFKLLTTGTPIENHLGELWNLFRFINPGLLGSFESFNQRFAIPIEKYQDKQARNKLKKLIQPFLLRRTKNQVLEELPSRTEILLHVELSREEKAFYEALRRQAISKLSDSNAEAGNKHLQVLAEIMKLRRACCNPSLVMPDTELSSSKLQLFGEVLGELLENRHKALVFSQFVDHLHIIRNYLDKQGINYQYLDGSTSVSERKKRVDAFQAGNGDVFLISLKAGGTGLNLTAADYVIHTDPWWNPAVEDQASDRAHRIGQQRPVTIYRLVAKDTIEEKIVELHHHKRDLADSLLEGADMSGKISTEALLQLISEG

SEQ ID NO: 8179 - protein, 506 aa, Bombyx mori nuclear polyhedrosis virus
MDNYKLQLQKFFDQAPDNDDPNFEHQTPNLLAHQKKGIQWMINREKNGRPNGGVLADDMGLGKTLSVLMLIAKNNSVQLKTLIVCPLSLINHWVTENKKHNLNFNILKYYKSLNADTFEHYHIVVTTYDVLLAHFKLIKQNKHSSLFSTCWHRVVLDEAHIIKNCKTGVHNAACALTATNRWCITGTPIHNKHWDMYSMINFLQCRPFNDPRVWKMLNKNNDSTNRIKSIIKKIVLKRDKSEISFNIPKHTVEYVHVNFNEEEKTLYDKLKCESEEAYMKAVAARESENTLSRLQQMQHVLWLILKLRQICCHPYLAMHGRNLLETNDCFKMDYMSSKCKRVLDLVDDILNTSDDKIILVSQWVEYLKIFENFFKQKNIATLMYTGQLKVEDRILAETTFNNAADTQHRILLLSIKCGGVGLNLIGGNHIVMLEPHWNPQIELQAQDRISRMGQTKNTYVYKMLNVEDNSIEKYIKQRQDKKIAFVNTVFEETLINYEDIKKFFNL

SEQ ID NO: 8180 - protein, 606 aa, Chilo iridescent virus
MADAMNELCNLTQHLQVDDDQLSNLKLKNGYSLFPHQEKVMLWMKYRENLTKKECRKEGEKTWGVRGGIISLCMGLGKTLTALAYSFQNKASFPTLVITSKTVMHEWKTEGVEKFFDSDNIRVLYLHKSYIKNIDKISRDDIMTYDIVITTYDVCLFACKKGNYFLQCFEMGEEQSLMKNKIVAIHTRKRKDANLPNLKGTAVIYGTPWERVICDESQKFANPKTMTYKCIMAVYGKYKWCLTGTPIRNYETDIWAQLRFCGYKGVERSHDWNRNGQGLIAFKDHNLISAIFTMSYDDAQMSLPEKTENNLTVKLEGQHKEIYEGILTETREMYKKMMNDLCSFTYVLAMFTRLRQCAIAPYLITPDAKRNSKEKKNCSEWCLDKFGGAGIKSSKILKIVEIIKSVTLNDNPNCNSNPKSLQLLAKEKAYSCFGSDYIKSSNFEIMHPTKIIVFSMFTSCLDLLSEAIKEDYPNFKFVQVDGDTKNRSELFDQFKNDINTQGLFLTYKVGSEGLNLTEATHCICIEPWWTNAVHNQAKARLWRTGQTKQVYVHNVIIEGSIEEKIVEICKGKDDMAASYLEGKERIKSPVRAPKLDKFTLGKMLGI

SEQ ID NO: 8181 - protein, 458 aa, Paramecium bursaria Chlorella virus 1
MKFTGKLFSYQKEAMMWMLKRESSHRAPGGFLCLDPGMGKTILTMVTIAVHDLDHTLIVVPKNIMSQWVSEFAKFTDCTPLVVDARMNNKKEITHEMLKEHKVCITSISTFSSMIDTDDCALLSFKFDRLVIDEGHLIRNRRSKSFWAMNQIKSHIRWILTGTLINKNRNDFKSLLEFMDIFNVNLTQAAREFVYRRTKEDVGLSIPDLHIEEIRGDFETDAEKDLYAELVENGKILLRAYNAYGDGEGRMRLLEQLMRMRQCVTNPQILYANSEDEKWEGNRTKLNMLRKEIQNNPVEKTLIFCNWICEMDAIREMLHSIGHKSVTLNGKTPNSQRDVNIKSFNEDNDINFFIIQIESGGIGLNLQVATRVFINSLSWNATTEIQAIARAHRIGQTANVIVKRLIIDNTFDEHVLNLQQKKLEIASEIFDDKRIEKSLQQTRKQKNSTFKQLTNVFK

SEQ ID NO: 8182 - protein, 1209 aa, Rhodospirillum rubrum
MPGFLTADLIRARLAPKDFQRGEEYLKDGRVLKAEWVADDEISGQVAGSAGRRYVQTITLENGLGGLSIVGYCSCPVGFACKHVAAVLLTLAREAEPVVPAWDGSFGARPAQAAVSEPTLDPALAEWIAAVAGFEEVGDPEAYPPAIRHRLIYVVGPQGEGGVPQNGEGRSESRGGGRVSAEIEVTLWSIAVLKDGQMSSVERRILSADALVRSPARPAYLRPSDLALVPRLAALRAPGGGNALLLPQISGSELFAAMVASGRCRWGGPDGPTLYPGAARRAKLVWRSDGEGWQRPAIEPEAMAPEAADPETAQPDIGQPYIAQPAIPEIGALDGEAVEAPTRTDPDDASPAPEDGESGQSPEAEAWDLRALPIEPPAYVDPRSGETGPLDLGLDPRLAARLLSAPPIPPTSVDAVRSRLGALLPAAVPVLPAPIDAQPLSVAPQPILRLLALRAVPRMRGAEMPGETTQALVARPCFAYDSVILPADSSEPAPLRMVGASLMRIERDFAAEGTALRQLDRIGPLRVAEALGRVRVEGGISADRLIAPPFLPRGEERERAVDFLRDGVPDLEEAGWRIEIDPDFPVRPVVADSQDWWGGLNAVGGLEGTVGGWLSVGLGVTIDGERVDLLPALLTLLGEGEDLVEREEDELLYLPLGDGRVLPVAVRRLRPIFHALHAVAVPDERAGPGVRLSGRDLGPLALLEEAGKPLGVVWEGAEGARDIARRLAVVGLREAVAPPKGLVGSLRAYQNEGLDWLQFLRANNLGGILADDMGLGKTLQTLAHILVEKESGRLNDPVLIVAPTSVLGAWRREAAQFAPGLRLVVLHGPERAAGFSQMADQDVVVTSYALVRHDLEVLKAQPWHMLVLDEAQTIRNPQTVQYKAVAALKARHRLFLTGTPLENHLGDLWALMDLLMPGLLGDGATFRRVFRGPIEKRGDGPRRRALAVRVRPFILRRTKDEVATDLPAKTEMIDMVELEGGQRDLYEAVRLAAHKAIREVLAEKGLARGRIHILAALTRLRQVCCDPRLVKGGPRKPPPSAKLDRLEEMLRDLVDEGRRTLVFSAFPSMLALVEERLAAASIPWVSLTGETRDRDTPVTRFQSGAVPVFLISLKAGGTGLTLTAADTVIHYDPWWNPAVEAQATDRAHRIGQDKPVFVHKLVAAGTVEERILALQDRKRGLLDGLFDGEAGPSSLLSEEVIEEILRPLG

SEQ ID NO: 8183 - protein, 882 aa, Hordeum vulgare subsp. vulgare
MAATAYERRLLAAADLVLSADGKSQLPRLSSADLGVTADLKPHQLDGVHWLIRRYHLGVNVLLGDEMGLGKTLQAISLLSYLKIKSIAPGPFLVLCPLSVTDGWLSEFGKFCPTLKVIQYVGDKAHRRHIRRTMHDDVQKSSHSNELPFDVMLTSYDIALMDQDFLSQIPWLYVVIDEAQRLKNPSSVLYNVLEERFMMPRRLLLTGTPVQNNLSELWALMHFCMPSVFGPLDEFLSTFKEAGNLLSGSEANQANRQFKILKHILRAFMLRRTKALLIESGILELPPLTELTVMVPLAPLQKKIYLSVLRKELQTLLSFTGGSSRHQSLQNIVVQLRKACSHPYLFSGIEPEPYEEGEHLVQASGKLIVLDLVLEKLHRLGHRVVLFAQMTQTLDILQDFLELRNYTYERLDGSVRAEERFAAIRNFSSQPTKGVVRDDNNPSGAFIFMISTRAGGVGLNLIGADTVIFYEQDWNPQADKQALQRTHRIGQLNHVLSINLVSQRTIEEVIMRRAERKLKLSHNIFGDKDATDGKGKDFGNEANDMRSIILGLHQFDPADTAAETINEETLAKLKSMSENVIKMRTHEPSEKDDRAFEINPDLTDGSGAMITRACDSISIDPGVDEAAYLSWVERFKEASHSIEDVPVELERQRPAPEDKLLKREANKKKAEEKRLAKWKDLGYQTLGVKVPDNIPNQNISDSGSVQLVYGDCTDPSKVCAAKPAIIFSCVDNSGTWGHGGMFDALTSLSTYIPDAYHRASEVDDLHMGDLHLIELDEANCSRSLDAPLWVALAVVQSYNPKRKIPRSEISMSDLELCLSKAAFSAAQRSASIHMPRIGQRSGSQRSEWYTIERLLRKYASLHGIDIFVYYFRRPSRQQPDSD

SEQ ID NO: 8184 - protein, 1166 aa, Chlamydophila pneumoniae CWL029
MLNFRKLRRDFSANILQDGKKLFEQGAVIDAKILSMNGETVCISAQVRGLYDNIYECEIEVDRSESDTVDSNCDCSYNYDCQHIVALLFYLEQYFNEMVVAYARSADLETDHEINEEVKKELKETFVAAATKEEERKDREHQKEILREYVHAANALSANPFFLPLEYLEKDSAELAVLFVSVNEDTFAPANQPIEFQLVLRLPCRSKPFYISNIRTFLEGVLYQEPIVLNGRRFFFTMQSFNASDRKLIDLLIRYVRYPNHTTEEKLLKSAYLMPPALGVILAKMFEHQLADRGGGSLGEKESFSGLFCGNLEEPLCWSLTPAKMKFNLDFFDMPYKALLMTPVILVDDDEVQPEQTMLLESDAPGIIHHFVYHRFSPQIKRAHLRSFSRLRDIAIPEALFGSFRENALPVFQEYAEIANVHLLNSFVTLPYVDEVRAICDMSYLDGELEAKLHFLYGSLRVPAASLALQYQDVRAFISDEGILARNLVEERKMLEEVFSGFIYDERDGAFRVKSEKKIVEFMTETIPANQHRITFNCPENLSGQFIYDETIFELSFREGSDINYYEADLKVHGLLKGVPLDLLWDCISAKKRFLELPKAGQQSKGTRRGKVNSGKLPCILVLDLEKIAPVVQIFNEIGFKVLDDLVQKCPLWSLTGISLDQFEALPVNFSMSERLIEIQKQIRGEIEFDFQDVPQQIQATLRSYQTEGVHWLERLRKMHLNGILADDMGLGKTLQAIIAVTQSKLEKGSGCSLIVCPTSLVYNWKEEFRKFNPEFRTLVIDGVPSQRRKQLTALADRDVAITSYNLLQKDVELYKSFRFDYVVLDEAHHIKNRTTRNAKSVKMIQSDHRLILTGTPIENSLEELWSLFDFLMPGLLSSYDRFVGKYIRTGNYMGNKADNMVALKKKVSPFILRRMKEDVLKDLPPVSEILYHCHLTESQKELYQSYAASAKQELSRLVKQEGFERIHIHVLATLTRLKQICCHPAIFAKDAPEPGDSAKYDMLMDLLSSLVDSGHKTVVFSQYTKMLGIIKKDLESRGIPFVYLDGSTKNRLDLVNQFNEDPSLLVFLISLKAGGTGLNLVGADTVIHYDMWWNPAVENQATDRVHRIGQSRSVSSYKLVTLNTIEEKILTLQNRKKSLVKKVINSDDEVVSKLTWEEVLELLQI

SEQ ID NO: 8185 - protein, 1215 aa, Chlamydophila pneumoniae CWL029
MVLEALAIFRQDAMQHLLKHRKEIVVDFCEDSYTIRIPDEEAPEGYWLSTLKLQDIDRLTFASCSCPDGECCLHLMTAYFAVYDALGLHPLHDKFRHSFWYAVFSHFFLDSIPLQAQGEMVYTLESPHITLTIECLSEEVFQDWLRTIHASEEPTVFTNKTFLKSALYRTAKKFFFLNEEGAELTIGENSQGFPSHFSLQWQGLVFKAEILDFPTLEDIFPKLELAHTSLENVSHDISITNVTVCAEEAKVNFTLSPVIHKKDRENHPKTRIGSVEYVAKTHEMITGPKAIALPIYAIPLLADKFKDQLLSLLCYDSLEYRLRYDIRLLRDASFSFSAYLVTPGDLDNGSLIYPNYCYSPTKGLMQVVGMLSPKQAFIVKSEQVEDFLNERGHLIQEPGFQTFINERPEGHLTYNVTEQGVLLFHYDVGDPSSTEIRFGTWTYYTNQGFFLEKKNDLPIQDGLIVEPQDIPAFIVKNDAALRRLPNFFSSPPNLKDLLIEVHRQSRGKGLDLKPILVGLGESRCWLFGVFLYREDIGFSLIPTPLQGLCFLPRVIPPENVPQFLTQYAQHERILFPNPQTRPPESYELVIQSIHRPHPASPLHLQLELKTNLGSVPIGIALQGLKSKHTFLFTQAGFLDLKQNLFQFLKQFLSTQKCVIAENTVIANITDVFKLDALAPLSVTDDTIANPEDLQFFSQLKAACLPPIPQNLFSSDHQLRPYQNSGLLWMWFLYNHRLSGLLCDEMGLGKTHQATALLDIVFQSSQPSARPKFLIVCPTSVLPHWEHILSNHLPGVSIFSFHGPNKPSELPPADILLTSYGTLRQNYDKFYKIAFTIVVFDEIHMAKNKSSQIHKILCRIDAQMKLGLTGTPIENNLLEFKGLLDIILPNYLPSDALFKKLFTKRCSSEELEEIIPSQDLLLKLTRPFILRRTKKLVLPELPDKVESIIACSLSPDQEKLYMATLQREKSHIQKLETPEEPATNFLHIFALLNHLKQICDHPAVFFKDPDQYKNYESGKWNAFVKLLKESLNAGYKVVVFSQYIHMIRIITLYLEEIGIKYASIQGKSLNRKEEIETFTTDPNCQVFVGSLLAAGTGINLTAGNVVIMYDRWWNPAKENQALDRVHRIGQKNTVFIYKLITEDTLEERIHYLIEKKIRLLDKVIASQDSNILHMLNREDLLTILSYKDEHGTSDSEESPVDAPVEDDTGVLPPEDS

SEQ ID NO: 8186 - protein, 1025 aa, Ralstonia metallidurans
MVVSLCSPGKCRKGTIVSRASLRANEGRRIERSTIAPSDLPPFRSRVSQPELPVERADHDADSVADGGWQATLCALEALAGGVDEAAGTGDGRRLLWALTLDADGVVGTIEPLEQTHGARGWSKPRPVPLARVAEDDTLPQWDVRVARAIRRDASRNRRHVLDRAAAVVALVGHPAVVLSHAPTVPMEVVESAPSLEAVREGDRYVLRIVPPLREALAMEDFLPAAARQEAESLRQITVLQDGPRRLRVVRFTPAQQGAAKLIAGGLSVPADAQARLDSTLRALAGHFQIHADSSGEARERDPESRLRAEVAPVGRGISLRLVVTPLGVLGPRLAPGHGRAQLMATIGGETHVTYRDLDAEHAHVAEVFEALPFLVQQAPAGGEHTWTLDDPEDALTAIEVLPGLAGVIDLEWPRGRELRVLPADIAQLAVSVETGSEWFKLVGELRVAEGLVISLEKLVAWAHGHAGRFMPMAHGVYVALTRQLRDRLRDLAGVGDGVRDGIRVPLVAAPWLDDVLAGAGIDPDAHFRTRVKQLRAARGHDAPVPPTLVAELRPYQLEGFRWMMSLAEAGFGACLADDMGLGKTLQSLAVLLARAAGGPALVVAPTSVCGNWATEARRFAPALRVHVYADGDREAIVGQAAAHDLVIVSYNLLQQARKAFCDRHWHTVVADEAQSFKNPSSRRAQAMFALPADCRIALSGTPVENRLAELWAVMRFCVPGLLGSLARFNEHFANPIERSGARDPRQRLRRMIAPFVLRRTKAQVLDELPPRTELVIRVTPEPTEAAHYEALRRQALSEAERALLRPRKDKKAPAAMTEPEARIHVLAQLMRMRRAACDPRLVTPDVGQPGAKVRAFAELAATLAANGHKTLVFSQFVDFLQMLRQALVDAGLAWQYLDGATPAGERTRRVAAFQAGEGDVFLISLKAGGFGLNLTAADYIVIADPWWNPAAEDQAMGRAHRIGQQRPVTVYRLIAAGTIEERIVDLHQGKRALADGVLDAMDGEAIGRDVPLPDVDELVGLLRR

SEQ ID NO: 8187 - protein, 600 aa, Deinococcus radiodurans
MGWGCMARAGATNSFPRITCWEAPRSRLAVLQGLLDTDGHAGVVVEYVSVSEHLARGVVELVQSLGGVARIRQKATSHTYGGEKKTGLAWRATLKLPPELEPFRLAAKRAAYRRPTKYPPTRGIKSIEWVGHKPAQCIAVDAPDHLYVTEGYIVTHNTLQTLAHLLKEKEEGRADRPSLVIAPTSVIGNWQAEAARFTPDLKVLVLHGKDRHADFEKIPHADVVLTTYPLLPRDIDELRQHEYHLVILDEAQNIKNNKTAAAKAAGSLGARHRLALTGTPLENHLGELWSQFNFLAPGLLHDEKTFQKLYRTPIEKRGDTARQAALSARVRPFILRREKRDVARELPPKTEIPVRVTLEGDQRDLYETVRVTMQSRVREELAARGLARSTIAILDALLKLRQAVTDPRLVKLEAAREVQGNAKLDWLETNLPQMVEEGRRVLIFSGFATLLGHLEEFLKREGIPYSKITGQTKDRQKQIDAFQAGETHVFLITLKAGGVGLNLTAADTVIHYDPWWNPAAEDQATDRAYRIGQDKPVFVYKLIAAGSVEERILDLQARKAALARGVLDGGLTDATQLTVQDLDRLFAPLELEEEPEVVAS

SEQ ID NO: 8188 - protein, 918 aa, Nymphicus hollandicus
ELTDDLHKQYQIVERIIAHSNQKSEAGYPDYYCKWQGLPYSECSWEDGALIAKKFQACIDEYFSRNLSKTTPFKDCKILRQRPRFVALKKQPSYIGGHESLELRDYQLNGLNWLAHSWCKGNSCILADEMGLGKTIQTISFMNYLFHEHQLYGPFLLVVPLSTLTSWQREIQTWAPQMNAVVYLGDITSRNMIRTHEWMHPQTKRLKFNILLTTYEILLKDKSFLGGLNWVFIGVDEAHRLKNDDSLLYKTLIDFKSNHRLLITGTPLQNSLRELWSLLHFIMPEKFSSWEDFEEEHGKGREFGYASLHKELEPFLLRRVKKDVEKSLPAKVEQILRMEMSALQKQYYKWILTRNYKALSKGSKGSTSGFLNIMMELKKCCNHCYLIKPPDDNEFYNKQEALQHLIRSSGKLILLDKLLIRLRERGNRVLIFSQMVRMLDILAEYLKYRQFPFQRLDGSIKGELRKQALDHFNAEGSEDFCFLLSTRAGGLGINLASADTVVIFDSDWNPQNDLQAQARAHRIGQKKQVNIYRLVTKGSVEEDILERAKKKMVLDHLVIQRMDTTGKTVLHTGSTPSSSTPFNKEELSAILKFGAEELFKEPEGEEEEPQEMDIDEILKRAETRENEPGPITVGEELLSQFKVANFSNMDEDDIELEPEQNLRNWEEIIPEVQRRRIEEEERQKELEKIYMLPRMRNCAKQISFNGSERRHSRSRRYSGSDSDSISERKRPRKRGRPRTIPRENIKGFSDAEIRRFIKSYKKFGGPLERLDAIARDAELVDKSETDLRRLGELVHNGCIKALNDNSFVQERAAGRLGKVKGPTFRISGVQVNAKLVISHEEELAPLHKSIPSDPEERKRYVIPCHTKAAHFDIDWCKEDDSNLLIGIYEYGYGSWEMIKMDPDLSLTQKILPDDPDKK

SEQ ID NO: 8189 - protein, 918 aa, Nymphicus hollandicus
ELTDDLHKQYQIVERIIAHSNQKSAAGYPDHYCKWQGLPYSECSWEDGALIAKKFQARIDEYFSRNQSKTTPFKDCKVLKQRPRFVALKKQPLYIGGHESLELRDYQLNGLNWLAHSWCKGNSCILADEMGLGKTIQTISFLNYLFHEHQLYGPFLLVVPLSTLTSWQREIQTWASQMNAVVYLGDITSRNMIRTHEWMHPQTKRLKFNILLTTYEILLKDKSFLGGLNWAFIGVDEAHRLKNDDSLLYKTLIDFKSNHRLLITGTPLQNSLKELWSLLHFIMPEKFSSWEGFEEEHGKGREYGYASLHKELEPFLLRRVKKDVEKSLPAKVEQILRMEMSALQKQYYKWILTRNYKALSKGSKGSTSGFLNIMMELKKCCNHCYLIKPPDDNEFYNKQEALQHLIRSSGKLILLDKLLIRLRERGNRVLIFSQMVRMLDILAEYLKYRQFPFQRLDGSIKGELRKQALDHFNAEGSEDFCFLLSTRAGGLGINLASADTVVIFDSDWNPQNDLQAQARAHRIGQKKQVNIYRLVTKGSVEEDILERAKKKMVLDHLVIQRMDTTGKTVLHTGSTPSSSTPFNKEELSAILKFGAEELFKEPEGEEQEPQEMDIDEILKRAETRENEPGPLTVGDELLSQFKVANFSNMDEDDIELEPERNCRNWEEIIPEVQRRRIEEEERQKELEEIYMLPRMRNCAKQISFNGSEGRRSRSRRYSGSDSDSISERKRPKKRGRPRTIPRENIKGFSDAEIRRFIKSYKKFGGPLERLDAVARDAELVDKSEIDLRRLGELVHNGCIKALKDSSSGQERAGGRLGKVKGPTFRISGVQVNAKLVISHEEELAPLHKSIPSDPEERKRYVIPCHTKAAHFDIDWGKEDDSNLLIGIYEYGYGSWEMIKMDPDLSLTQKILPDDPDKK

SEQ ID NO: 8190 - protein, 1150 aa, Burkholderia fungorum
MSSVFFDRDRIAEWLGEHTVAKARSVGPVTHVQWHGSTLSGEVQGTQPLPYKTRVRFRTDGGSPWAQGECSCPVGRNCKHVAALLFAELDYHDEMDHVTHVRLDDEGETARGLAREPMANPGSPAGVRPELVSWLERFRARAEAADADAQKASAPRTQTLAYRLTWSRFHMRHEVVLYRARCNPDGAIVDVAEPWGNVEAALLKQPKFVSDEDLSILRGLWLGRSREDFGQFILRGTSGAEMLQKLIATGRLFVDFTPGSGHDGPIPLSRGADRAGRIEWEPLADERLRPVLRTEPRASMVLPTEPVWYVDGIANEAGIVQSSLPFQQLPDYLAMPPISLAEAPLVASVLREIAPELPLPPTHDASAIRVIDVDPVPVLTLNSHALPSAASKAGLRQAAAVELAGVSFDYDGVSINVDSSVTLVPMPGGDVIHIRRRYEAEKKRLLELRKTGLQKVPTSRVHASRLLPDTMLGLPDAEAWSAFVNDSVPELVSKGWRVTMAPEFRYNVIEIDAIEGTAHQAGDGWFDLEMGIRIGERNVRLEPLLADLFRRDRRWLSGALESIRDDEPIELKTEENKRLRLRADRLKPVVRVLVDLFDALGGSLAEGAPLRVASVDAGRLEALNGTGRWQFRGEDSIRQLAQRLQAGPGLREVPVPRGLKAELRTYQQQGLNWMQFLREQDLAGVLADDMGLGKTVQTLAHILAEKEAGRLDRPALIVVPTTLVHNWREEARRFAPELRVLVLNGPQRKERFEQIGQHELILTTYALLWRDQKVLAEHDYHLLILDEAQYVKNATTKAAQAIRGLRARHRLCLTGTPLENHLGELWSQFDFLLPGFLGSQKDFTKRWRNPIEKNGDGVRRALLARRIRPFMLRRRKDEVARELPAKTTILCSVDLEGAQRDLYETVRTAMQEKVRAAVSAQGLARSHIIVLDALLKLRQVCCDPRLVRMLKAAGDAHETHDRTDRVEKGARAMRSAKLDLLLSMLPELIEEGRRVLLFSQFTGMLSLIAEALEEAAIPYVILTGDTADRVTPVERFQQGEVPLFLISLKAGGVGLNLTAADTVIHYDPWWNPAAENQATDRAHRLGQDKPVFVYKLIAAGSIEEKIVELQEQKAGLADSILSEDAAGAAKFSDDDLDALFAPMPEIESGR

SEQ ID NO: 8191 - protein, 1064 aa, Enterococcus faecium
MKWSIPEKVIARGRQYLQEGRVLSVVPDQEENVWHAEVLGSELYMVDLDGTAKEIDYCQCPYWEEHKYCKHTVAVELYLRSKNLSRIMKKDQPMLEPVKATSEGEIIAKGFSRLKTQNNPQAVQPLIIEYQVETIETNQYHPELSILALYLRIGSLASPKKTYIVKNIYDFLQAYTEKETYTVNKQYQFRLDKRAFQKEDQKILTHLAGSAQTHQLLGTNGLQVKGKLDKRYLLLPVEQARFLLEQMNQTTRLHLQINEQNDQGIQFSDQNKPLSFKVEKFGEDYLLQALNDFDFFFMHYQWGVIQGTFYSLTKYQQTVYQTWKQLIRRLEKPEVVFKKKELPSLFKEIIPLLSEIGDVAIAPAVEEEVADIPVEFIFFFRKAKGKIQARVDFVYGEVIYSTDPKHEVSTEQAFQVLRDTVEEKRVLDLFRMYRYQKNETGYERPLPSGEELYAFFRTELSVFRQFGEVRLGRKLRELYLDAHKHQPKIEVTETGSWLDIRFDVTGIEEQEIDHVLQSLLRNDAFYTLENGQVLSFDSEEFQQTSQVLQQLRESIRTEEGTIHVPKNQGLIIQNQLEKSNATFSESFQTMVQDLIHPERYQAQLPKGLNATMRDYQKQGFRWLKMLGHYQFGGILADEMGLGKTLQTIAFLLSEKEERKSFSALIVAPASLIYNWQAEVRKFAPSLSIQVINGNKKEREELLAKDTDIRVTSYASLRQDLANYQSQKIDYLILDEAQMVKNSSTKTAQALRELAVPQRFALSGTPIENNLEELWSLFATIMPGFFPTKTKFRELAAEEIAQMIRPFILRRDKQTVLKDLPEKTEMNLYSALTEEQKTVYLAYLRQMREEITSMDSEAFKKNRIGILAGLTRLRQICCDPRLFIEDYQGGSGKLEQVKDLLVAAKENKRRVLLFSQFTGMLTILQEELAELGISTFYLRGSTKPQDRLSMVDAFNAGEKDVFLISLKAGGTGLNLTGADTVILYDLWWNPAIEEQAAGRAHRIGQKNVVEVWRMISEGTIEERMDSLQQEKRELFQKVIQGNEEQLTKLTEEDIRMILSVGEIEE

SEQ ID NO: 8192 - protein, 116 aa, Enterococcus faecium
MVDAFNAGEKDVFLISLKAGGTGLNLTGADTVILYDLWWNPAIEEQAAGRAHRIGQKNVVEVWRMISEGTIEERMDSLQQEKRELFQKVIQGNEEQLTKLTEEDIRMILSVGEIEE

SEQ ID NO: 8193 - protein, 1034 aa, Lactococcus lactis subsp. lactis
MSRMMPARVRSEGIALYAKGFLNDPIETDFKLTAEIDGEEVSYDLDGAQDSCTCAVFQQNHRYCKHIAAIEEYLKNQDKGSQETKDKEIKGAERALFGENVAFLDAVNGETQLNFNTDQYSIEVQIEDNSQLYDYFSMDYFLYFDLKLRSKNLGRSYVIKDIPYFLRALKNYSQYSLGSLHYIDLFFDNFDEASQEFLTFLLKIDSKSDEALTKSLYIKNGRYLNIPFLFLEEAMDLVSALENYQLQITGRTVNYFTFIALDNDSEIFKFKVESQQDYIELKLYSEDYHNFYDYSLLYANNVFYKLNQEQRRLLLVLDKQFAKKSQIKFSYADKDKLAQALQQLSTLGEIEAPDHFVVRPFDAKFTFDLLEDQTISLAMTFDYGSFSIDSFHDLETLEFSRDLRKEQKIFALMERLQFAKAFNSSLNIPENLSEHFFLKILPAFQKLGQIELSPTLRNMRMDEVPEIHIDSQGGLLDISFDIPQVEDGEFANVIAKLQENAEFYISESGKFYHFNEKFDRLKAALNELDDQFVIQGSSLHVNINRSFQISKIFENIGGASFSEKFKSLYQHLTHPEEFPYEKPEHIKASLRSYQETGVRWMSMLSHYNLGGILADDMGLGKTVQAITFILSNLKKDESVLITAPASLTYNWASEFEKFTDEIDFAVIDGTKAERSKEIQEKHQIYITSYGSFLKDFEDYQDKKLNYLLLDEAQVVKNYSSKTNKSLSALNVEHTFALSGTPLENRIEEIWAIFQVVMPGFLPKREKFNKMEPSVISRLIQPFIMRRKKEDVLEELPEKMEITVYNQLADDQKVIYLAQLELMQKQVLEMDSAALSRSRIEILAGITRLRQICNTPALFMDDYKGSSGKLERLRELLAQIKDSGHRPLIFSQFTKVFPHIEKLMEEQEMTAYKLTGSTPIKDRLSMVQAFNAGSRDAFLVSLKAGGVGLNLTSADVVILVDLWWNPAVEEQAIARAHRMGQKNTVEVIRLITKGTIEEKIMEIQERKKDLIANVLEGDTVDKVLSEAEIREILGV

SEQ ID NO: 8194 - protein, 1166 aa, Chlamydophila pneumoniae J138
MLNFRKLRRDFSANILQDGKKLFEQGAVIDAKILSMNGETVCISAQVRGLYDNIYECEIEVDRSESDTVDSNCDCSYNYDCQHIVALLFYLEQYFNEMVVAYARSADLETDHEINEEVKKELKETFVAAATKEEERKDREHQKEILREYVHAANALSANPFFLPLEYLEKDSAELAVLFVSVNEDTFAPANQPIEFQLVLRLPCRSKPFYISNIRTFLEGVLYQEPIVLNGRRFFFTMQSFNASDRKLIDLLIRYVRYPNHTTEEKLLKSAYLMPPALGVILAKMFEHQLADRGGGSLGEKESFSGLFCGNLEEPLCWSLTPAKMKFNLDFFDMPYKALLMTPVILVDDDEVQPEQTMLLESDAPGIIHHFVYHRFSPQIKRAHLRSFSRLRDIAIPEALFGSFRENALPVFQEYAEIANVHLLNSFVTLPYVDEVRAICDMSYLDGELEAKLHFLYGSLRVPAASLALQYQDVRAFISDEGILARNLVEERKMLEEVFSGFIYDERDGAFRVKSEKKIVEFMTETIPANQHRITFNCPENLSGQFIYDETIFELSFREGSDINYYEADLKVHGLLKGVPLDLLWDCISAKKRFLELPKAGQQSKGTRRGKVNSGKLPCILVLDLEKIAPVVQIFNEIGFKVLDDLVQKCPLWSLTGISLDQFEALPVNFSMSERLIEIQKQIRGEIEFDFQDVPQQIQATLRSYQTEGVHWLERLRKMHLNGILADDMGLGKTLQAIIAVTQSKLEKGSGCSLIVCPTSLVYNWKEEFRKFNPEFRTLVIDGVPSQRRKQLTALADRDVAITSYNLLQKDVELYKSFRLDYVVLDEAHHIKNRTTRNAKSVKMIQSDHRLILTGTPIENSLEELWSLFDFLMPGLLSSYDRFVGKYIRTGNYMGNKADNMVALKKKVSPFILRRMKEDVLKDLPPVSEILYHCHLTESQKELYQSYAASAKQELSRLVKQEGFERIHIHVLATLTRLKQICCHPAIFAKDAPEPGDSAKYDMLMDLLSSLVDSGHKTVVFSQYTKMLGIIKKDLESRGIPFVYLDGSTKNRLDLVNQFNEDPSLLVFLISLKAGGTGLNLVGADTVIHYDMWWNPAVENQATDRVHRIGQSRSVSSYKLVTLNTIEEKILTLQNRKKSLVKKVINSDDEVVSKLTWEEVLELLQI

SEQ ID NO: 8195 - protein, 1215 aa, Chlamydophila pneumoniae J138
MVLEALAIFRQDAMQHLLKHRKEIVVDFCEDSYTIRIPDEEAPEGYWLSTLKLQDIDRLTFASCSCPDGECCLHLMTAYFAVYDALGLHPLHDKFRHSFWYAVFSHFFLDSIPLQAQGEMVYTLESPHITLTIECLSEEVFQDWLRTIHASEEPTVFTNKTFLKSALYRTAKKFFFLNEEGAELTIGENSQGFPSHFSLQWQGLVFKAEILDFPTLEDIFPKLELAHTSLENVSHDISITNVTVCAEEAKVNFTLSPVIHKKDRENHPKTRIGSVEYVAKTHEMITGPKAIALPIYAIPLLADKFKDQLLSLLCYDSLEYRLRYDIRLLRDASFSFSAYLVTPGDLDNGSLIYPNYCYSPTKGLMQVVGMLSPKQAFIVKSEQVEDFLNERGHLIQEPGFQTFINERPEGHLTYNVTEQGVLLFHYDVGDPSSTEIRFGTWTYYTNQGFFLEKKNDLPIQDGLIVEPQDIPAFIVKNDAALRRLPNFFSSPPNLKDLLIEVHRQSRGKGLDLKPILVGLGESRCWLFGVFLYREDIGFSLIPTPLQGLCFLPRVIPPENVPQFLTQYAQHERILFPNPQTRPPESYELVIQSIHRPHPASPLHLQLELKTNLGSVPIGIALQGLKSKHTFLFTQAGFLDLKQNLFQFLKQFLSTQKCVIAENTVIANITDVFKLDALAPLSVTDDTIANPEDLQFFSQLKAACLPPIPQNLFSSDHQLRPYQNSGLLWMWFLYNHRLSGLLCDEMGLGKTHQATALLDIVFQSSQPSARPKFLIVCPTSVLPHWEHILSNHLPGVSIFSFHGPNKPSELPPADILLTSYGTLRQNYDKFYKIAFTIVVFDEIHMAKNKSSQIHKILCRIDAQMKLGLTGTPIENNLLEFKGLLDIILPNYLPSDALFKKLFTKRCSSEELEEIIPSQDLLLKLTRPFILRRTKKLVLPELPDKVESIIACSLSPDQEKLYMATLQREKSHIQKLETPEEPATNFLHIFALLNHLKQICDHPAVFFKDPDQYKNYESGKWNAFVKLLKESLNAGYKVVVFSQYIHMIRIITLYLEEIGIKYASIQGKSLNRKEEIETFTTDPNCQVFVGSLLAAGTGINLTAGNVVIMYDRWWNPAKEIQALDRVHRIGQKNTVFIYKLITEDTLEERIHYLIEKKIRLLDKVIASQDSNILHMLNREDLLTILSYKDEHGTSDSEESPVDAPVEDDTGVLPPEDS

SEQ ID NO: 8196 - protein, 1064 aa, Bacillus cereus
MSFTLNKSIIKEVCGETSYKRGEAYYKSNKVIVNYYDETKEICEATVKGNEDFRVTVEKAKKGDVVARCSCPSLASFQTYCQHVAAVLIQINYNQQTGGMGSVSSRNDQLTNGMFQLFADKPLRPKSKQHRFDTREILDVAFICSPVAKKSGGALLGIQLKLAKTYFINHIREFLSKVEKREAFHCSNEFTYTPDVHSFKQETDAIIQQFIKIYHNEKMYEDALEVHAKQDESMIFIPPASWNDMLSALSRAEYVQLKQNEQLFQGLHISKGLLPLHFEFTKGNNGGFTLHIDGLNRVRVMEMYNNALYDGKLYHLPMEDCMRLIELQKMMSRSNSNQFYIPENKMEHFVAKVVPGLMKLGTVRIDEVISDRVETPSLKAKLYLDRVKNRLLAGLEFHYGNVVINPLEEDGQPSVFNRDEKKEKEILDIMSESAFAKTEGGYFMHNEEAEYNFLYHIVPTLKGLVDIYATTAIKLRIHKGDTAPLIRVRRKERIDWLSFRFDIKGIPEAEIKGVLAALEEKRKYYRLANGSLLSLESKEFNEINQFVKESGIRKEFLHGEEVNVPLIRSVKWMNGLHEGNVLSLDESVQDLVESIQNPKKLKFTVPPTLHAVMREYQVYGFEWMKTLAYYRFGGILADDMGLGKTLQSIAYIDSVLPEIREKKLPILVVSPSSLVYNWFSELKKFAPHIRAVIADGNQTERRKILKDVAEFDVVITSYPLLRRDVRSYARPFHTLFLDEAQAFKNPTTQTARAVKTIQAEYRFGLTGTPVENSLEELWSIFHVVFPELLPGRKEFGDLRREDIANAVKPFVLRRLKEDVLQELPDKIEHLQSSELLPDQKRLYAAYLAKLREETLKHLDKDTLRKNKIRILAGLTRLRQICNHPALFVDDYKGSSAKLEQLLDILEECRSTGKRILIFSQFTKMLSIIGRELNRQAIPYFYLDGNTPSQERVELCNRFNEGEGDLFLISLKAGGTGLNLTGADTVILYDLWWNPAVEQQAADRAYRMGQKNTVQVIKLVAHGTIEEKMHELQESKKHLIAEVIEPGEEKLSSITEEEIRDILMI

SEQ ID NO: 8197 - protein, 634 aa, Bacillus cereus
LKLAKTYFINHIREFLSKVEKREAFHCSNEFTYTPDVHSFKQETDAIIQQFIKIYHNEKMYEDALEVHAKQDESMIFIPPASWNDMLSALSRAEYVQLKQNEQLFQGLHISKGLLPLHFEFTKGNNGGFTLHIDGLNRVRVMEMYNNALYDGKLYHLPMEDCMRLIELQKMMSRSNSNQFYIPENKMEHFVAKVVPGLMKLGTVRIDEVISDRVETPSLKAKLYLDRVKNRLLAGLEFHYGNVVINPLEEDGQPSVFNRDEKKEKEILDIMSESAFAKTEGGYFMHNEEAEYNFLYHIVPTLKGLVDIYATTAIKLRIHKGDTAPLIRVRRKERIDWLSFRFDIKGIPEAEIKGVLAALEEKRKYYRLANGSLLSLESKEFNEINQFVKESGIRKEFLHGEEVNVPLIRSVKWMNGLHEGNVLSLDESVQDLVESIQNPKKLKFTVPPTLHAVMREYQVYGFEWMKTLAYYRFGGILADDMGLGKTLQSIAYIDSVLPEIREKKLPILVVSPSSLVYNWFSELKKFAPHIRAVIADGNQTERRKILKDVAEFDVVITSYPLLRRDVRSYARPFHTLFLDEAQAFKNPTTQTARAVKTIQAEYRFGLTGTPVENSLEELWSIFHVVFPELLPGRK

SEQ ID NO: 8198 - protein, 538 aa, Bacillus cereus
IQLKLAKVYFINHIREFLSKVEKRESFHCSNEFTYTPDVHSFKQETDAIIQQLIKMYHNEKMYEDTLEVHAKQDESMIFIPPASWKDMLFSLSKAEYVQLKQNEQLFQGLQVSKGLLPLHFEFTKGNNGGFTLHIEGLNRVQVMDMYNNALYDGKLYHLHIEDCMRLIELQKMMSRSNSNQFYIPESKMEHFVAKVVPGLMKLGTVHIDEVISDRVETPSLKAKLYLDRVKNRLLAGLEFHYGNVMINPLEEDGQPSVFNRDEKKEKEILDIMSESAFAKTEGGYFMHNEEAEYNFLYHVVPTLKGLVDIYATTAIKLRISKGDAVPLIRVRRKERIDWLSFRFDIKGIPEAEIKGVLAALEEKRKYYRLANGSFLSLESKEFNEINQFIKESGIRKEFLHGEEVNVPLIRSVKWMNGLHEGNVLSLDDSVQELVENIQNPKKLKFAVPNTLNAEMRKYQVYGFEWMKTLAHYRFGGILADDMGLGKTLQSIAFIDSVLTEVREKKLPILVVSPSSLVYNWFSELKKFAPHIRAVIAD

SEQ ID NO: 8199 - protein, 867 aa, Bacillus subtilis
VSFIGTTAVLLSPWMTVELLGKNSFNSFSSVQLTEETEPLIEAASTIYEFIADGDFMPDYDAWTNGVFRWKDRDNILEGFTAEWFSAAVQDYIQYDDDLREKWEHIKEKSPAVTTFRGHFLDEEDFLEGIGWIDDQSPFTVGLRLNEPDFDGDEWKIEMFLRDKKSGAVEFFDGLKSLKKSWQAYSDKIAREQDRFHRTVPWLSFDSGTTLISEEEAWIFLSEASETLVDMGVEILLPSWWQIVRDSNMMLKAKVSSSPRGESFVGMNALLDFNWRFATNGIELTEAEFNELVASNRRLVNIRGQWVKIDPQFIKQMKRLMEKAESEGLHMSDILARELMDQQDGGLEDSDLIDTSAFAGIQFDLSKQLRSLIRKLTAAENLPEHKVSPSFKGTLRPYQKYGMNWLLFLRESGFGACLADDMGLGKTIQMIAYFLHVKESGRQKTPHLIIAPTSVLGNWQRELQTFAPDLSVALHYGPRRPKGDDFAAHYENADVVLTSYGLSHADTEELSSVTWNTICLDEAQNIKNAHTKQSRAIRKLKGLHHIALSGTPMENRLTELWSIFDFMNKGYLGSLTGFHKRYVLPIEKDRDEKRIGQLQQLIRPFLLRRTKRDEEVALNLPEKLEEKEFIPLSAEQASLYEQLVKDTFDHMTSLTGMQRKALILSMLGRLKQICDHPALYLKEEQTELLAGRSVKLEKLLELMTAIRAQNESCLIFTQYIQMGNMMKRLLEKTFGEPVQFLNGSLSKQERDTLVEKFQRKEYPTLILSLKAGGTGLNLTAANHVIHYDRWWNPAVENQATDRAYRIGQERFVHVHKMITTGTIEEKIDVMLESKQTLNDQIIQSENWITELSTQELEELFTLSATAQ

SEQ ID NO: 8200 - protein, 803 aa, Magnaporthe grisea
MTVGTATPSANKENAPRSRFPTPQSLEKLHKPFKCPGSATRRPEADRPARKRRKVDYKGADGADDTGESYTSIERLALANRDVNKYPVFKPKDKDTIFRKSFVVPLVNKNVASYNPNRPPPTLGLRQGAVFVAKALHDPSGEFAIVLYDPTVDDRPKEPEKPVEEPDKPSPSQEKLDAPLVHKSLAEILGIKKKVEGEHPRVPVVIDPRLAKVLRPHQIEGVKFMYRCVTGMIDEKANGCIMADEMGLGKTLQCITLLWTLLKQSPEAGKPAIQKAIVACPSSLVRNWANELVKWLGADAITPFAIDGKASKEELTRQLRQWAISSGRAVTRPVIIVSYETLRLNVEELKHTKIGLMLCDEGHRLKNGDSQTFTALNNLNVSRRVILSGTPIQNDLSEYFSLISFANPDLLGTRLEFRKRFELPILRGRDADASEKERVKGDECLKELLALVNKFIIRRTNDILSKYLPVKYEHVVFCNLAPFQLDLYNYFITSPDIQALLRGKGSQPLKAIGILKKLCNHPDLLNLSDDLPGSEAHWPSDYVPKESRGRDREIKPWYSGKMQVLDRMLARIRADTNDKIVLISNYTSTLDLFERLCRNRGYGSLRLDGTMNVTKRQKLVDKFNDPEGSEFVFLLSSKAGGCGLNLIGANRLVLFDPDWNPAADQQALARVWRDGQKKDCFVYRFIATGSIEEKIFQRQSHKQSLSSCVVDSAEDVERHFSLDSLKELFQYRGNTRSDTHDTFKCKRCKPDGKQYIKAPAMLYGDTSTWNHFNNEGLKPIQDLLLRQECGETEVSAVFQYISH

SEQ ID NO: 8201 - protein, 949 aa, Clostridium acetobutylicum
MKEEGKSALKMGLVTYFKGKKIDDTYHIYSRVKDKIKPLEFNTHIKINLVTKRLEVECSCDEFKEFKSKGYTLKCSHIVATSYKFLSLVSKGKKAPEKKIIKRHEEPGGESAFKLIRKKEKNFVYYELQSGFRGENRIIEPNDLREFLKQVESKKIKFKFDYIEFVVPIFNKDLPLTFNLKEKNNSIVVTTHKKLPISLSPNNDVFYFKDELYLPSERQIEKYIDIHHKLENNKQIAYRKDIDNYIKLVSHLSSISQDINIDEELKKFAATMLKYEFFVYEEKDKIYCDVLLKYGNIKINILNKKNSVLRDYKEEEKLIMKIERNSFVKHGNRFMFTGKDKELLNILKRSQDSICSLGKVTMGKELEDLKVYKFESIKGDFYKRDGYYDFSYSIGNMTEKELEHAFKAYKNKKKFYKTKENNFLDFEDSSIRGFFNTLEALRMSDNEEYGHIKLEEGKALFLYKTIKDGEFKAVNGYADIKAIEDKLSSINNREIAIPKGFKGKLREYQIKGFKWFKTLSELGFGGILADEMGLGKTIQTIAFLLSEKSKKALIVCPTSLIYNWKEEILRFAPELRVLIVHGPKRTYDMDEYDIILTSYGTLRMDIHKYKNVIFDYCIIDEAQNIKNPSAKNTIVIKRIKAYTRFALTGTPIENNLTELWSIFDFLMPGYLYSREKFEEKFVFGEEDNLESLKLLIAPFILRRTKKEVVAELPDKIEKKFIVEMTSAQRIVYAEYIKSVKAMMKNHKDGRVQIFSYLTRLRQICLDPSLILEDYNGGSGKLKTALEIIRGHEGKVLLFSQFTSALYKIEECLRKEKIKFFHLDGSTKPQDRINMVNDFNSNNAIKVFLISLKAGGTGLNLTSANLVIHFDPWWNPAVENQATDRAHRIGQKNVVEVIKLVAKGTIEEKIILLQEDKKELIDNVITGELQNSKLLGSLSKEELIELFDRE

SEQ ID NO: 8202 - protein, 1052 aa, Clostridium acetobutylicum
MFNITKDNIRKLMKPKTYKEALDLYNGNKVFNIVVNENHNDFYDANFVKINAEVMDGSGNDYTCMILFNNKTGINIIKCNCSNVKNNDICSHVGAVLIKYIDGKNNVKSDYSKRLLYGLKQSIIKREIKGKPINIEVKLHYFTETTKKSYINIRVGEDRLYVVKDVSTFLKSILENKQIKIGEKFTYYPYKYSIKKRDEELFELLFAIYHDNEDVVKDKEKSILGKNIYLTESGLSRLMIILEDRDFSILINDEGITDCYIVVDEFPKINLTIEEKEESVKLTLSGGEPISLVRGNKYVFYQGKVYKLDQYKINIYSLLIKVFSNSKVVKYYKEDRQDVLSYVYPVLKELGIAACKNVINYDYLKPKVYMDKIDENMLINIKFENNDKKLKDVNGEVYIIKILQDFGFYKDGEIIYINDSLDKMVEFMSVGLDKIQSKGYEIYYSENIKKFKVYSPHMYKGSLKVNEGNMIEVSFEIDGIDNSELYNIFEALRLKKKYYKLKEGEIVDLSNKVIKKIADMFKYMDLDYSKINQKPAILSKENAAYINRYIDEENLMFFDKDTRFERMVKLSKGLENMKVGIPNEFNSIMRDYQKRGFRWFKSLDHFGVGGILADEMGLGKTLQTIAFISSGTGHKETSIIIVPTSIVYNWKEEIEKFSKNLKTLIISGTKRERAEAIGEYYNYDVLITSYSLIRMDIEEYSKIKFKYCILDEAQYIKNKNSLITKAVKKIRAKNCFALTGTPIENCLSELWSIFDFIMPGYLLSYSKFVNKYENPIIKEKDKRALYELNRHIEPFILRRLKESVVKELPSKVEHKILIEMSQKQKEVYYAYLKNAREKIYRSIEEKGINNSKFIIFSLLTRLRQICSNPRTVVENYNGKNAKMDVLMDTIKTSIANRHRILVFSQFTSVLKSIKDKLIEKDIDVMYLDGNTKMKDRFQLADEFNKGKGEVFLISLKAGGTGLNLTGADIVVHFDPWWNPAVENQASDRAHRIGQKKNVEIIKLITRGTIEEKIYKLQQEKKKMVDNVLGDKMFSEENVLLNLDEQKIKNIFG

SEQ ID NO: 8203 - protein, 1077 aa, Clostridium acetobutylicum
MDKNELLQIFNESVAGKNQSKGQRVFENDLVSSVDIKDDEDSICIKGNVISESLFSQYSTEIQMDPTDKSIVGTYCSCADYEKNAAKKNYCCKHLIATFYSSLEELSKNTRLKKAEKRKLNKLLGIKDTLDILLGGDSSKEELKIEVYINKDRWDNRIYFELKIGLKTMTSNNLYVLKDINSFLLGIYQNIPIPYGKKLILNMKEQKLSVKDKKLVDFIQMIINIDKPFSYNRKIKKSFIDGKYVYVPDYLVREFFQVIKNHRVYLNEGFDLSTDVEIIEEKPPIEISLRDVEDDYVLSVPSGMPISLSSKNNVFLYGLGIYIPDYEYCEKIGPYFEVFNKAEEVRLSGEKEETILRKLVPDLKRLSNSISLSSNITDKIVVAKCEFKFYFDNEDGNTILTVKVKYGAFEFNIFEDFNEKVIYRDSKREIEVLETVRALRFERIKNKFLLGFGDDYAFTFFKTEIVRLQKIGEVFYSENFKGIKHISSKGISGHIKTGKYNYFEMKFKIDDIPPGETVMILRAFRDNLKYYKLKNGEFIDLEELQLKNFLKLLDSISPKKLDENNIKIPKSKSIYVDEYLEEKGIRYIKGQEELKKIREKFKEEKSLEFELPRTLKGHPREYQKKGYNWLKTLDYFGFGGILGDEMGLGKTFQVISFLLSSPGKKSLIVVPTSLVYNWIQEFERFAPSIKVAASVGTKKEREVIIENLNEFQVIITTYNLLKRDLSSYMALEFDYCILDEAQNIKNPHSQNAISVKKINAVNRFALSGTPMENSVMELWSIFDFIMPEYLYDEDRFSVRYYKKLKEEPAVIEDLNRLIKPFILRRKKKEVVKELPNKIEKIVAVDMESKQKKVYSTYAKYAVSLIEKRVEYDEFNKSKIEILSYITRLRQICLDPSVVMEDYTGGSAKINALIELLNHSIDEGHKILVFSQFTSVLKNIAERFREEKIKYSYLDGSINSKNRMNMVQDFNEGNNSVFLISLKAGGTGLNLTSADVVIHFDPWWNPAVEEQATDRAHRIGQKNIVEVIKLVAKGTIEEKIIRLQEEKKRLVDSLLSEDLSTSEVFSGLDENEIIELFK

SEQ ID NO: 8204 - protein, 670 aa, Bacteriophage RM 378
MSYIISRLTAKDRAVMGYVTYNNRFEWKGTYEERLIPKNAGWKWDPDKRVWYTTILDYASKLKGYFDEKAAQQYNLLLEEKNHKLELSSVTSSDFAVPAPTGYDYFPFQKAGVHFVTEVFKEYPGALIADEMGTGKTIQSAGVINVMNPDRVLVVCPASLKYNWERELKRWVVHEKEIIVVNGNEVDFSLKNTIYIINYDILHRISEEDYAYDLVIVDECHYIKNPKTKRSGFVKSIVKSSIEQGGKVLFLTGTPIVNRPIELYPILEMAAPKVFGNFWGYAKRYCNAYYNGYGWDFRGASNLEELQGKLRSTIMIRRLKKDVLKELPPKSRKIVPVKLNKMFAEEEIFKLAEDLQNLKNYISVLREFERVGVESADLAEAMAEFDEKMKVMFERVAEMRRFYAIHKAPFAADYIVSLVKEEEVDGLVVFAHHHDVFEIIQKVLEAKGITYARITGEENVVQRQKAVEDFQSGKVDVVLCSILAAGVGITLTRAKTAVFVELDWVPGNILQAEDRLHRIGQEAECVDIHYIVARHTLDENFADYLTRKIEIIEKALNHERMKTQLEKPVSLLDVITTSEQKQQREEEEESKTISEEERGYALELQQKLAIVAALDKDRAAQRNNVGFNRFDTRIGHFLVETPVEKWSNKMLRVAEKLVTNSRKQIYEGGV

SEQ ID NO: 8205 - protein, 914 aa, Lactobacillus gasseri
MDKFEAKKLLQKLDTIQNFLSEKDLPRLERKLDAEADNLKRNMFDDWLRSIPKSVKEIFYGKLTYDQLYSKFFPSVLHSSFSKNEIVLVFSILKSRNKMEQYQLKYSEKLSNLKVCLQFIKENDRSKFLSIFQNHDIKQKLLKAKEFAEENKNVLSNIQYKRENEWDEIAESFEDLDISLKNKRFEYLNPFVNLDTEKSKEDIIFKIIRDFLKNKILFLSEQSRNGVEESIRGIWKNLKEEELSNQLNSLPIEMLKKQIDNEQIGDVLDNFDNVGQVISLSLAEVSERYGLNMQQSAEILKQSKEILNDLKSNVYPKLTLDKLKGQRLQLLHLLNAYKNYPDEQAIEEKVVIENYRKLEEKLGNLEDIAPNRYLTNFIDSITFKYWCESEAEIYRILDGCIQVNSTFRDCLNDNLNDQEIKALFEKDSATFYALIEEITGNKKSYNPSDLPDYIVHEVQKTKLNLKGFKAHLRSYQAFGSKYIFYFQRTLLGDEMGLGKTIQALAVATHLSNQGQTHCLVISPLSVLENWKREIEKWTNIKCFVFRGDKAIKEQNLSKWEESGGILLTNYSHCRILKESRKNIDIDFAIVDEAHLIKNPATKRSKNVNALIKNCKYKLLMTGTALENRLDEMINLIDFLNESLAEKVANNLNNKTYKTDIAQVYLRRKRKEVLHELPALGLTTMWSTFNEKEQDFYDQAVSEGIAGLMKMRRAAFIDEDSQKIEQIINICVDSHENSEKVIVFSFFKNYVLKLLKKKLPFLADDIISGDLSSNQRQEVIDKFSENPNQNVLLVQIDAGGFGLNIQAANRVILCEPQWKPSTENQAISRAYRMGQNRNVMVYRLLTKESVDETMMEIIHEKEDIFNTYANDSVVADAFMNNDSDKEENEAVMKKKVFQIERDRLEKKQEVVNVSE

SEQ ID NO: 8206 - protein, 666 aa, Pseudomonas putida KT2440
MYQLPDDEAWLRFAREGLPRLREAGWDIDIHRDFAFNLQEVDDWYATIDEAPGHEWFDLELGIVVDGQRHSLLPIVLHLLRSSPELLRPSELARRSDDEPLLIDLNRGRLDAPALRVALPYGRIKAVMGTLGELYLHEDTAGPSLRMERADAARLNEIEGLPLHWEGGEHVRDLGRRLRDARDLQVEPPTGLQASLRPYQQQGLNWLQALREMGTGGILGDDMGLGKTLQALAHLLLEKQSGRLSAPALAVMPTSLIPNWLDEAQRFAPDLRVLALHGPGRSKHFTKLHEYDLVLTTYALMPRDLEQLRPQAWHVLILDEAQNIKSSSSKAALAVCELQAGQRLCLTGTPMENNLGELWSIFHFLMPGWLGDLKRFNQDYRNPIERHGDSERMAHLASRIRPFLLRRTKEQVATELPAKTEMVHWVELSDAQRDTYEAVRVAMDQKVRDEIARNGAARSQIVILDALLKLRQVCCDLRLVKGVESKGNQADKGKLGALLEMLEELLSEGRRVLLFSQFTSMLALIEQELEKRKIRYSLLTGDTRDRRTPVQQFQQGESEVFLISLKAGGVGLNLTAADTVIHFDPWWNPASENQATDRAYRIGQDKPVFVFKLITRGTVEEKIQLLQQEKAALAASLLDGGQAGQWRLGDEEIEALFAPLPGKRGR

SEQ ID NO: 8207 - protein, 1032 aa, Streptococcus pyogenes M1 GAS
MMARLIPGRVRNEGIKLYEQGLVSFQDDNKGILQIEVETYQVQYGADDEDITCQCDTFHMKHYCKHIAAVEYFLKNDQKGKLFLKQLTNQTKIKETTKKMTSFGSLFLDSLAMNEDDSVKYRLSALGSRSPFSSDYWWSLKINRLPDDRSYVIRDIKGFLQLIKKEGFYQIGKNYFEQLSWLQFDPSSQALIEFLWRLASDTDKGDNENIFPNHARHLRLPSGFFEEGIHYLTSLYDFTFEGPSQTYHHLFVRSLEAEAGLYEFKVEVHRKSIELQIAEKNVQYLFDNDYLLYQDTFYHLTLKQRKMVQAIRSLPIEADLAKHIHFDLDDHAKLAASLSDFKQIGLVEAPKSFAIRDFEVTFQFDLLNRDEISCQLMFDYGNYQVSDKASLEALPFASHLKKEEKINRSLLAFGFSPQFYSKKRLTSAKELYTFFEETVPCFERLGNVALSTAIQALQVKEMPKIAIRRNQGLLDISFDFSTIIENDIDQAVTALFQNNPYFVSQTGQLVVFDDETQKVSKSLQELRARQLKNGHLQLDGIRALQVSKLFEGMTSVHFSKELEELAYHLQHPETFSIKPLPVKAQMRDYQRNGVQWLSMLNHYGFGGILADDMGLGKTLQTLAFLASHLKSDSKVLILSPSSLIYNWFDECQKFTPQLDVVVSYGLKQIRDQIIEEGHQITITSYSSFRQDFETYQAFHYDYLILDEAQVIKNAQTKISHCLRAFNTANCFALSGTPIENKMLEIWSIFQIVLPGLLPTKKEFLKLTAEQVSRYIKPFVMRRKKEDVLPELPDLIEINYSNEMTDEQKAIYLAQLRQMQDQIRNSSDVDISRQKIEILSGITRLRQICDTPSLFMDYQGKSGKLDSLRILLTQIKENGHRALIFSQFRGMLDLAKQEMTALGLTSYQMTGSTPANERQEMTRAFNNGSKDAFLISLKAGGVGINLTGADTVILIDLWWNPAVEMQAISRAYRIGQKENVEVYRLITRGTIEEKILELQESKRNLVTTVLDGNESRASMSIEEIKEILGLNTH

SEQ ID NO: 8208 - protein, 472 aa, Xylella fastidiosa 9a5c
MNLRPYQHTMVDFILTHPRCNLFVPMGLGKTVATLTALDVLLVVEDVAPMLVIAPLRVAATTWPDEVAKFPHLRHLRVAVVVGSAAARRRALEQDADIYCINYDNLKWLAEFYQDRWPFRTVVADECSKLKGFRLRQGTRRARALAKYVHTKVERYIGLTGTPAPNGLQDLWALMWMVDRGARLGTHFKAFIDRWFRAVQIGSDPHAVRLVPAPNASKEMQDKIRDLCLSLDPQAYFDLRQPIVNTIRVVLPERARRLYKTMEQEMLIALECGAEVEAFNAASKTIKCLQLANGALYTDDTRQAWEVVHDAKLEALHEIIEEAAGMPVLVAYHFKSDVARLQRAFPKGRVLDQHPDTLRDWNAGNIPVLFVHPASAGHGLNLQDGGNILAFFGHWWDLEQYQQIIERIGPTRQAQAGHDRPVFIHHIVAAGTVDELVMARRESKREVQDLLLEAVKRRDTCKPLTSQGAITL

SEQ ID NO: 8209 - protein, 1072 aa, Listeria innocua
MEHFTAIQNKMIPYSVKQAGKKLMEDGEIIQFREKDASDHFLTYFIDQNVVEDAGSENYACSCADFQLNAICKHIYATHLKMEKEKQKAAKQDFKNRILTQESNTLLSLFQQNMAQQLEVEEDITNKIPLQTQYIIRLKPDDSSYIMTIEVKVGTERTYVVKNMNTFLAAIRDRQWLVFTKNFAYDPNEHFFLEEDKQILDKLLQISEIAKMYDTDSFYWSKSYAEEKNLTIPPSMAGELLELLTERDTTCIIMKERVEDIKYRGINVRRDNLDFIFELKKSADDKYQLEMEDLQQAIFFEAYQLLFFDGTFFIPVKEVWESLKPLIEFHKVTKNEVVQFSESQLSEVISYVLPALQKSGKLKLDDSIEDRITQQPLDCKLFIALEYGEHTLRLEYHYGNQLFDPFAITEEENEKIMIRDVEKEARVMNIIESAPVHFSGTKMVVNKQEKDLYQFYYRTIPKLAEYAEIYMEDGLEEMVEDNVRPVTTLDVSSDNDYLSVSFDFKGIPEEEVQNVLESLREKRSYHRLKNGRFLSLESENYKQMEDVLQMLEVRKKDVQPNMQVPLYRGMQIYDILGAGTQDEHHKFSRSFRELLTDITTQSEDSFSLPKGLKAELRDYQLTGFEWMKSLAKYNLGGILADDMGLGKTVQTISFLASELEENPNLKPVLIVTPASLLYNWQSELEKFAPEIPVTVLHGTKQARMAEMEEIKHGHVYLISYPSLRQDIIHFADVAFSSVIIDESQAIKNYHTKASQAVRALKRNHVFALSGTPLENSIDELWAIFQTLMPGFFPSLRKFKEIPYENIAKMIRPFLLRRLKQDVVKELPDKIETNLYSELTDEQKTIYLAYLEKIQADLEESNGNASEERIKLLAGLTRLRQICCDPSLFVENYQGESGKLLQLFDTIQTARENGKRILIFSQFTGMLAIIRRKLEEDGQPLFYMDGKTPAKTRLDMVNAFNEGENDIFLISLKAGGTGLNLVGADTVILYDLWWNPAVEEQATGRAHRIGQKRVVQVFRMITKGTIEERIFDLQKKKQALVDELIQPGEQMLGKLNTEEIKQILQLDNGRDDK

SEQ ID NO: 8210 - protein, 498 aa, Orgyia pseudotsugata multicapsid nucleopolyhedrovirus
MDTFKVQLQEFFSAGDGADDAPCLDAPNLLEHQKRGIEWMRRRERRGRPHGGVLADDMGLGKTLSVMRLIANDGDDAHKTLIVCPLSLLNHWTAEAKKHNLPLNLRQFHGGDLDESFDDAKAVAITYDTLRAHHKHYKTAGRASGLLARHWHRVVLDEAHVIKNHQTGVHAAACALSADNRWCITGTPIHNRHWDMYAIIHFLRCRPFDNVGVWRMLNRNNDTNRIKSVVNKIVLKRNKAEIALDIPQHDVQDVHVRFDEAEARVYNELKSASQRAYDDAVASADKAGGMQDVLWLLCRLRQVCCHPALTKCAAMFPEHAHIFEPAYESSKCRRALELVQRVLDTPDDKVVLVSQWVEFLQLVAGLLRRRGVPILLYTGQLRVEERTAVENQFNAADSPYRVLLMSIKCGGVGLNLTGGNHIIMLEPHWNPQIELQAQDRIHRMGQKKRTYVYKMIVDEENSIERYMKARQDKKLTFVNKVFDRTALNYEDIKKFFSL

SEQ ID NO: 8211 - protein, 1072 aa, Listeria monocytogenes EGD-e
MEHFTAIQNKMIPYSVKQAGKKLMEDGEIIQFREKDAADHFLTYFIDQNVVEDAGNENYACSCADFQLNAICKHIYATHLKMEKEKQKAAKQDFKNRILTQESNTLLSLFQQNMAQQLEVEEDNTNKTPLQTQYIIRLKPDDSSYIMTIEVKVGTERTYVVKNMNTFLAAIRDRQWLVFTKNFAYDPNEHFFLEEDKQILDKLLQISEIAKMYDTDSFYWSKSYAEEKNLTIPPSMASDLLELLTERDTTCIIMKERVEDIKYRGINVRHDNLDFIFELKKSADDKYQLEMEDLQQAIFFEAYQLLFFDGTFFIPAKEVWESLKPLMEFHKVTKNEVVQFSESQLSEVISYVLPALQKSGKLKLDDSIEDRITQQPLDCKLFIALEYGEHTLRLEYHYGNQLFDPFATSEEENEKIMIRDVEKEARVMNIIESAPVHFSGTKMVVNKQEKDLYQFYYRTIPKLAEYAEIYMEDGLEEMVEENVRPVTTLDVSGDNDYLSVSFDFKGIPEEEVQNVLESLREKRSYHRLKSGRFLSLESENYKQMEDVLQMLEVRKKDVQANMQVPLYRGMQIYDILGAGTQDEHHKFSRSFRELLTDITTQSEDSFALPKGLKAELRDYQLTGFEWMKSLAKYNLGGILADDMGLGKTVQTISFLASELEDNPNLKPVLIITPASLLYNWQSELEKFAPAIPVTVLHGTKQSRMAEMEEMKRGHVYLISYPSLRQDIVHFADVAFSSVIIDESQAIKNYHTKASQAVRALKRNHVFALSGTPLENSIDELWAIFQTLMPGFFPSLRKFKEIPYDNIAKMIRPFLLRRLKQDVVKELPDKIETNLYSELTDEQKTIYLAYLEKIQADLEASNGNAGEERIKLLAGLTRLRQICCDPSLFVENYQGESGKLLQLFDTIQTARENGKRILLFSQFTGMLGIIRQKLEEEGQPLFYMDGKTPSKTRLDMVNAFNEGENDIFLISLKAGGTGLNLVGADTVILYDLWWNPAVEEQATGRAHRIGQKRVVQVFRMITKGTIEERIFELQKKKQALVDELIQPGEQMLGKLSTEEIKQILQLDNGRDDK

SEQ ID NO: 8212 - protein, 1032 aa, Streptococcus pneumoniae TIGR4
MAKLIPGKIRIEGVALYETGKVDIIKEKNNRLYARVAEEELRYSLEDDLVFCACDFFQKRGYCVHLAALEHFLKNDERGQEILWSLEEGHEEKEAVETKVTLGGKFLDRILSPKSECAYELSAVGQVEAGTNHILWTLRIGQINSQKYYVIRDIPLFLRIVEQRKSYMIGKIYEESLSWEAFDDASQELLTFLHGLTEEGLVPDLFFQNQGRHLFFPLTFFEQGVNLLMALPHFQFDHQVDSYQTLLFQDMHADANLFAFTVTEYSDYFEMEISESPRVNVFYQGAVLFHKGQVYFLTDQQMRLLKEIKALPVGQQGKKYLQFDSSDRDKLASCLTLFIQMGTVSAPERLQIKTFAPSFYFDREEDNRIRLEIQFDYGNRQVSSRQELEELPFSSDADLEERIFQVCLAAGFEADFQSWRQALKAESVYHFFHDIIPVFEKLGHVDLSDKLEELYSLASPQVQIASKGGLLEIQFDFQNIVQEEIDQAMQALVANQDFYIDSSNQVYFFDEETKKIRQNLQELGQFELKDGTLQARKSLAYSLAHLFEGRDRVSFSQEFQNLAQDLTHPEDFPLQATQVKADLRDYQEKGIGWLQMLHHYGFGGILADDMGLGKTLQTIAFLTSQVTKESRVLILAPSGLIYNWADEFQKFAPQLDVTVVHGLKASREEILAESHQIYVTSYATFRQDSEFYQGMAFDFLFLDEAQVMKNAQTKIAQTLRQFVVPSVFALSGTPIENHLGELWSIFQIVMPGLLPSKKEFMKLPAERVAQFIKPFVMRRKKEEVLTELPDLIEVVYKNELEDQQKAIYLAQLQQMRDHLAQVSEQEFQRSRVEILSGLMRLRQICDTPALFMEDYQGASGKLDSLRDLLVQVADGGHRVLIFSQFKGMLEKIEQELPDLGLTSFKITGSTPAKERQDMTKAFNQGERDAFLISLKAGGVGLNLTGADTVILVDLWWNPAVEAQAIGRAHRMGQEETVEVYRLVTKGTIEEKIQELQEQKKHLVSQVLDGTESRGSLTLAEIREILGISEAST

SEQ ID NO: 8213 - protein, 1032 aa, Streptococcus pneumoniae R6
MAKLIPGKIRIEGVALYETGKVDIIKEKNNRLYARVAEEELRYSLEDDLVFCACDSFQKRGYCVHLAALEHFLKNDERGQEILWSLEEGHEEKEAVETKVTLGGKFLDRILSPKSECAYELSAVGQVEAGTNHILWTLRIGQINSQKYYIIRDIPLFLRIVEQRKSYMIGKIYEESLSWEAFDDASQELLTFLHGLTEEGLVPDLFFQNQGRHLFFPLTFFEQGVNLLMALPHFQFDHQVDSYQTLLFQDMHADANLFAFAVTEYSDYFEMEISESPRVNVFYQGAVLFHKGQVYFLTDQQMRLLKEIKALPVGQQGKKYLQFDSSDRDKLASCLTLFIQMGTVSAPERLQIKTFAPSFYFDREEDNRIRLEIQFDYGNRQVSSRQELEELPFSSDADLEERIFQVCLAAGFEADFQSWRQALKAESVYHFFHDIIPVFEKLGHVDLSDKLEELYSLASPQVQIASKGGLLEIQFDFQNIAQEEIDQAMQALVANQDFYIDSSNQVYFFDEETKKIRQNLQELGQFELKDGTLQARKSLAYSLAHLFEGRDRVSFSQEFQNLAQDLTHPEDFPLQATQVKADLRDYQEKGIGWLQMLHHYDFGGILADDMGLGKTLQTIAFLTSQVTKESRVLILAPSGLIYNWADEFQKFAPQLDVAVVHGLKASREEILAESHQIYVTSYATFRQDSELYQGMAFDFLFLDEAQVMKNAQTKIAQTLRQFVVPSVFALSGTPIENHLGELWSIFQIVMPGLLPSKKEFMKLPAERVAQFIKPFVMRRKKEEVLTELPDLIEVVYKNELEDQQKAIYLAQLQQMRDHLAQVSEQEFQRSRVEILSGLMRLRQICDTPALFMEDYQGASGKLDSLRDLLVQVADGGHRVLIFSQFKGMLEKIEQELPDLGLTSFKITGSTPAKERQDMTKAFNQGERDAFLISLKAGGVGLNLTGADTVILVDLWWNPAVEAQAIGRAHRMGQEETVEVYRLVTKGTIEEKIQELQEQKKHLVSQVLDGTESRGSLTLAEIREILGISEAST

SEQ ID NO: 8214 - protein, 606 aa, Invertebrate iridescent virus 6
MADAMNELCNLTQHLQVDDDQLSNLKLKNGYSLFPHQEKVMLWMKYRENLTKKECRKEGEKTWGVRGGIISLCMGLGKTLTALAYSFQNKASFPTLVITSKTVMHEWKTEGVEKFFDSDNIRVLYLHRDYIKNIDKISRDDIMTYDIVITTYDVCLFACKKGNYFLQCFEMGEEQSLMKNKIVAIHTRKRKDANLPNLKGTAVIYGTPWERVICDESQKFANPKTMTYKCIMAVYGKYKWCLTGTPIRNYETDIWAQLRFCGYKGVERSHDWNRNGQGLIAFKDHNLISAIFTMSYDDAQMSLPEKTENNLTVKLEGQHKEIYEGILTETREMYKKMMNDLCSFTYVLAMFTRLRQCAIAPYLITPDAKRNSKEKKNCSEWCLDKFGGAGIKSSKILKIVEIIKSVTLNDNPNCNSNPKSLQLLAKEKAYSCFGSDYIKSSNFEISHPTKIIVFSMFTSCLDLLSEAIKEDYPNFKFVQVDGDTKNRSELFDQFKNDINTQGLFLTYKVGSEGLNLTEATHCICIEPWWTNAVHNQAKARLWRTGQTKQVYVHNVIIEGSIEEKIVEICKGKDDMAASYLEGKERIKSPVRAPKLDKFTLGKMLGI

SEQ ID NO: 8215 - protein, 1920 aa, Anopheles gambiae str. PEST
ICRLDRLFILLESGSAAVTRKAAAKQIGEVQKLHPHELHNLLSRLLTYLHSNSWDTRIAASQAVQAILENVPQWEPKPLPNLLSAHASGSRNGHQHHRLSFDSFDLNAVLFKGARLMGSEGSEFDPLDEGEVVDLREKLARQRALLNEKLGLSSGLNLEELVTLDDVRNNGGGGGGGSNRDHHQTGATGERLVPVQEILKLSRADSVEGLSCREKNRARRKARQQQQAFQNPIAAVIGAGGGGTTTVGGGTAAGNGSNGATAPGTATIGANEPLEPDRKRIKTEKGVEPGTPGGAANSVPAAGTWTGEAVPDLTGAWVDAVDWPLDSFCSKLFLDLFSPRWETRHGSATALRELLKSHADGGGKSVYMTRAEMERQHQLWLEDATLRLLCVLALDRFGDFVSDQVVAPVRETCAQVLGTVLRQLPLAKVHQTVAILLTFVKQKEWEVRHGGLLGIKYMLVVREDLIQTFLPVIINDVLTGLFDAVDDVGAVAASTLIPIATWLPKLLSRAQVSHIVKLLWDLLLDQDELASACNSFMGLLASILSLPSASSWIQMEPMSMLVPRLWPFLSHCSSSVRRSTLQTLKTLKSRLGLNFGVKDWPPPLLQEALRHIFQRVLVEHVEDIQALAEDVWNNLVVNAELSALLHASCPYVSSWLCLAMQPVRLAFDPGSLIYAKPNQPGGGPNRERRPRQFDSFDTGGGTAACGAGHLSSSSGALHQKLFLGGAETVPLDVREKNVVRARCKAARMIGLLSRYLVLPAPGVTYTPETESPIDCYTKVLVGYLQSRSALQRLISSLVIAYWCSFDGTIQPGPSVLQERLRACLTEYVYYDEVGILFTRLLQECRDYLATLKQHRVQLAEYEQLKVLTLDQIYQIATAVGGWSADEMRTRYNLKAKVAELLEERRRSLLGSHSATALEQTTLHVSTQSSVSGAVVSLRCLPDRLNPVVKPLMESIKREECELLQRLSAKYLSDLLDQVTVRTPCPNSKIVTNLCTLLKSDAEFTPRVLCPDQELQHFDPANTDDSNPYHGILTLAKQHQRCKESGGGGGGAALDLSASSSSSAAAASSSSAATATTNAALDELLGGPSESEEMQRKHARTQRLGATAAITTICAQFGAQLPAKLPILWQLLLDKLQSRVDEPYVERLAQDVIAQDETNDFMTALQLLEVAAPYLHAALHRELFELLPKLCLLLRHPLKGVRHMVGRCLATLAAVDAASVMTMVINEVVPLLSCIESVIKRQGAAEAITCIVNRLQFEIVPYVVLLVVPLLGRMSDPDQSVRLVSTHCFATLIQLMPLDGLGTSGDGGASGRHLSDDLRQRKMKDRRFLEYLFSPKTIPDVELPVKINAELRSYQQSGVNWLWFLNRYKLHGILCDDMGLGKTLQAICILAADHHQRSLDRGCAQLPSIVICPPTLTGHWVYEVEKFLPSRFLRPLHYVGLPGNREQLRQKLGTYNLIVASYDIVRKDIEFFSSVNWNYCILDEGHIIKNGRTKSSKAIKQLVANHRLILSGTPIQNNVLELWSLFDFLMPGFLGTEKQFSTRFSRPILASRDPKSSPKEQEAGALAMEALHRQVLPFLLRRVKEDVLTDLPPKITQDLLCELSPLQERLYEDFSRMHLHSSDIRECLENIDGQMAGPANKKTHVFQALRYLQNVCNHPKLVLSPSHPEYQMIVGEFTRNGSSMDDIEHSAKLPVLKQLLLDCGIGTNEDVSVNQHRALIFCQLKAMLDIVENDLLKKHLPAVSYLRLDGSVPPSTRHHIVTKFNGDPSIDVLLLTTQVGGLGLNLTGADTVIFVEHDWNPMKDLQAMDRAHRIGQKKVVNVYRLITRKSLEEKIMGLQKFKLLTANTVVSDENASMDTMGTDQLLDLFTLADDSGKQQRAANGSNGGAAIKTVLENLPELWDDSQYHEEYDLSQFLEGLK

SEQ ID NO: 8216 - protein, 1008 aa, Anopheles gambiae str. PEST
NESNSDTTSSNTKEPDYDATLETDRGKRFEFLLKQTEIFAHFMNSAPSKSSPPKAPRGRKPKVDKNADSSDHRHRKTEQEEDEELLAETNQKAKTQFRFEESPPYIKAGEMRDYQIRGLNWMISLYENGINGILADEMGLGKTLQTISLLGYLKNIRNNPGPHIVIVPKSTLQNWVNEFGRWCPSIRAVCLIGDQETRTAFIRDVLMPGEWDVCITSYEMCIREKAVFKKFNWRYMVIDEAHRIKNEKSKLSEILREFKTANRLLLTGTPLQNNLHELWALLNFLLPDIFNSADDFDSWFDANQCMGDNSLIERLHAVLKPFLLRRLKSEVEKRLLPKKEVKIFVGLSKMQREWYTKILMKDIDVVNGAGKVEKMRLQNILMQLRKCTNHPYLFDGAEPGPPYTTDYHLLENAGKMVVLDKLLRKLQEQDSRVLIFSQMTRMLDILEDFCHWRGYQYCRLDGQTPHEDRSNMIADYNAENSTKFIFMLSTRAGGLGINLATADVVIIYDSDWNPQMDLQAMDRAHRIGQKKQVRVFRLITENTVEEKIVERAEVKLKLDKLVIQQGRLVDNKTTQLNKDEMLNIIRFGANHVFQSRDSEITDEDIDAILQKGEEKTQEQNEKLDKLGESSLRSFTLDTDNLENRSVYQFEGEDYREKQKLQTLGSWIEPPKRERKANYAVDAYFKEALRVAEPKAPKAPRPPKQPIVQDFQFFPPRLFELLDQEIYHYRKTVNYKVPKNSDLGAEANKVQREEQRKIDEAEPLTEEELVEKESLLTQGFTNWTKRDFNQFIKANEKYGRDDIENIAREVEGKSPDEVMEYSTVFWERCHELQDIDRIMGQIERGEAKIQRRASIKRALDSKMARYRAPFHQLRIAYANNKGKNYTEEEDRFLVCMLHKLGFDKENVYEELRAAVRTAPQFRFDWFLKSRTALELQRRCNTLITLIERENQELEEKERLEKKKKTGGGNAAAGGGTVGAGGGGAQKSNQKRKAETTPAANDKNKKKKKT

SEQ ID NO: 8217 - protein, 1643 aa, Anopheles gambiae str. PEST
MASPTPQNSPMPPPQAPSQSPAPSPSPHSPYQQAPPPHPGQSQGPPHMPTPGHHVPPQAGPPPGPHMSMQGPPTPHGGQPPNPHGPPPPQHPSHMNGPPPGPQGAPGHGPGGPPHHMPPSGPQHMPQHPPHPVMGHPVPPHPGMAGHPTQGPPLPPGMVPGGYPGHSMPPNAGPPPPGPMQGVGGPGPGPVMPPGAANPGMMPGSAPPPPPGQENLNALQRAIDSMEEKGLQEDPRYSQLLALRANSKQQNLNAPQLHQLRGQIMAYRLLVRHQPITSPYPNAAGGPSPQPGIPPQPSQQQQSQPPHQQQGQPQPQGPSTVPSHPGAPQTAMQGPPGKPGGPPGPPDAIGSNKPPLGTGGGMPPNQSPMPGMTMGGPPQVGHGQHHQQQQQQMQQPPHSAASHGHPQQQMLPTVGQPARPNSQGPAGGPGPRPAAQAPTMQPMPKQNRVTTVAKPAGLDPLTILQERENRLAARIALRLEELNNLPASMPEDLRMKALIELRALRVLNFQRQLRSEIVQCTRRDTTLETAVNVKAYKRTKRQGLREARATEKLEKQQKLEAERKRRQKHQEFLASVLQHGKDFKEYHRNNIAKLGRLNKAVMNYHANAEREQKKEQERIEKERMRRLMAEDEEGYRKLIDQKKDKRLAFLLSQTDEYISNLTEMVKQHKVDQKKKQDDEIQRKKQLKRHILESGDIEHLDEHCEASDCRVTVMETATGKMISGDDAPFLRDLHSWLQLHPGWEYVISDGDADDDEEESEGGKKKTPEEELSDDAKTKEVIQKAKVEDDEYKTEEQTYYSIAHTVHEKVTEQASILVNGKLKEYQIKGLEWLVSLFNNNLNGILADEMGLGKTIQTIALVTYLMEKKKNNGPYLVIVPLSTLSNWVLEFEKWAPAVGVVAYKGSPAGRRAVQNQMKATKFNVLLTTYEYVIKDKAVLAKISWKYMIIDEGHRMKNHHCKLTQVLNTHYNAPHRLLLTGTPLQNKLPELWALLNFLLPSIFKSCSTFEQWFNAPFATTGEKVELNEEETILIIRRLHKVLRPFLLRRLKKEVESQLPDKVEYIVKCDMSGLQRVLYKHMQSKGVLLTDGSEKGNKGKGGAKALMNTIVQLRKLCNHPFMFQHIEEKYCDHIGVQGTVTGPDLYRASGKFELLDRILPKLKATGHRVLLFCQMTQCMTIIEDYLSWRGFGYLRLDGTTKSEERGDLLKKFNSKNSDYFLFLLSTRAGGLGLNLQTADTVVIFDSDWNPHQDLQAQDRAHRIGQRNEVRVLRLMTVNSVEERILAAARYKLNMDEKVIQAGMFDQKSTGSERQQFLQSILHQDEMDEEEENEVPDDEMINLMISRTDDELELFKKMDAERKAEEVKPRLLDEAELPDWLVKDDEEVDRWDYEEETSILGRGSRQRKEVDYTDSLTEKEWLKAIDDGADFDEELEEEEREKKRKGRKRKGRGRDDSDDESIVSTMTKRKKGITDPKIRKQMKKVLKAVIKYTDADGRVLSKPFLKLPSRRDLPDYYEVIKKPIDIKKILARIEEAKYVDFADLENDFFLLCQNAQTYNEEASLIYEDSLELQSVFSNAKAKILDNHEEEESNEEEEEESDEEGGSVKMKLKISKGSTSSTSSAKKATPVRRKRAQKKYTISDDDDDID

SEQ ID NO: 8218 - protein, 2010 aa, Anopheles gambiae str. PEST
DEGADASLAADADDGSDEETNTKGNAQQDEDDDYEPEDNRKKKKGKKRKARSSDEKRGRKKKKRKKNDSGDESDQKQSDDGGSSAAAAAAAAAAAAAAAAAESDYESRPKRGRDRKKGSSSRSGAAAAAASEVEKKSEEKEKMPTIQEVCSSFDLTDVKIEYTEEDFENLVTFKMFQTHVRPILTKENPRVPMAKLMMLVAAKWREFCTLNPNISSEDATSGETGGREEETAAAAPPTPEYVPKSSRSRSKTENKHDDMVYDDEDEEEEEEVERERTRKSKKGKSGGGGGGGGSSSSNKKGGGGGNSRKQKVPTLKIKFGKRKNASSDEEQDASGGSERESDAEFEKMLQQSEPDTPERAKSAIGGSGGADGGAADEASDQPAVRKKAKTKIGNKSKKKNKSKKSKFPDGGEEGEHEHQDYCEVCQQGGEIILCDTCPKAYHLVCLDPELEDTPEGKWSCPTCEAEGPADEDDDEHQEFCRVCKDGGELLCCDNCPSAYHTFCLNPPLDDIPDGEWRCPRCSCPPLADKVQKILTWRWTDKPINPDEPSTSKGAAAAAGGSTRRREYFVKWHEKSYWHCDWITELQLDVHHPLMFRYYTRKNDMEEPPKLEEALDEEDNRYKRIQRMRETNCQLNETELEEKYYRYGVKPEWLMVHRVINHRTMRDGRTLYLVKWRELSYDQATWEDEEDDIAGLKMAIEYYLDLRANCSQDIGGSGSGGSGSSKKNKKKGRRRLRELEEEERTAGVKRYTPPPEKPTTDLKRKFEVQPPYLDETGMRLHPYQLEGINWLRYSWANGTDTILADEMGLGKTIQTATFLYSLYKEGHCRGPFLVAVPLSTIINWEREFETWAPDFYCITYVGDKESRAVIRENELSFEEGAVRGGKASRIRASSIKFNVLLTSYELISIDAACLGSIDWSVLVVDEAHRLKSNQSKFFKVLNAYNIAYKLLLTGTPLQNNLEELFHLLNFLNKSKFNELAEFQNEFADISKEEQVKRLHEMLGPHMLRRLKADVLKNMPTKSEFIVRVELSPLQKKYYKYILTRNYEALNPKGGGGACSLINIMMDLKKCCNHPYLFAAAAEEAQLGPGGNYELQSLTKAAGKLVLLEKMLRLLKSQGHRVLIFSQMTKMLDILEDFLEGLGYKYERIDGGITGSIRQEAIDRFNAPGAPQFCFLLSTRAGGLGINLATADTVIIYDSDWNPHNDIQAFSRAHRIGQANKVMIYRFVTRNSVEERVTQVAKRKMMLTHLVVRPGMGGKGTNFTKQELDDILRFGTEELFKEDGKDEEAIHYDDKAVAELLDRSNKGVEEKENWANEYLSSFKVASYSTKEDVEEEAETEVIKQEAENSDPAYWVKLLRHHYEQHQEDLSRTLGKGKRVRKQVNYTDGGVIQADPVKEDSTWQENVSDYNNSDYSGASDEDRDEDDEESELGRRSRRRIERKEAERDNRPLPPLLARVGGNIEVLGFNARQRKSFLNAIMRYGMPPQDAFHSQWLVRDLRGKSERIFKAYVSLFMRHLCEPGADNAETFADGVPREGLSRQHVLTRIGVMSLIRKKVQEFEHINGYYSMPELIKRPCEPVKIAVAAPAAVGAAPGASGETSKSATTSTSATPATSAAPSPAPNASASGDKEEEQQSGEKATDGGDKEKPTDSGNGTTPAEEGEKAAEVKKEVKEEGADDATDKKSAGDNKKDESSGEVSAKDEPMDTDGEKKDDKQPSATTTTTTTTIDDDDDDVVFVKDDDDDVKKPEPVQENLEVHKRAFMFNIADGGFTELHTLWINEEKAAVPGREYEIWHRRHDYWLLAGIVTHGYGRWQDIQNDIRFAIINEPFKMDVGKGNFLEIKNKFLARRFKLLEQSLVIEEQLRRAALLNLAQDPAHPAMALNARFAEVECLAESHQHLSKESLAGNKPANAVLHKVLNQLEELLSDMKSDVSRLPATLARIPPVAQRLQMSERSILSRLAATGNTVQQNPPMSQFPPGYQGTTLPGFAAAAAANFATFRPTFSVPGQPTN

SEQ ID NO: 8219 - protein, 5029 aa, Anopheles gambiae str. PEST
DAYYRYDPTAPRGMGPPGSNAGGPYARHRAPHPMQQQQPPPQSQYPSYHQPAGTDSMYSMPDHTAAGMAGMGDVVWGAQPPPPPQANPYASPMGYGLPQGPPQGPTQRQTPSGYRQHMGGYPQQDPQKLQYPTQQSMMVYGAYGPAAAAMQQHAARSAQHVYNQHQLDPSGGYGQHLVSGGQVPTSLHQLGAPQQQPPGGGGVVPGGLAPTHPSQQPSHLPPQSQQQLHQTHNSQPQQHPQQHPGLAGLGGGPQPSQQQQQQQGQHPGMVHPGAQQPNAPVAGLHGLGGPLGPQQQHPMTHGAGMPGVPGGGGGGAGGAGGPGGGGYGASAPQQQSYLPNAATKQQPTQHGGSPQYRAPFPQLSPQMSPRPPQMSPHTQMSPRPVMSPAKPPGGGPPVVTSQSPQATITSTHSPHLGAGIVAGSGGMQSPRPQTGTKLTASSSGGSVVSGPGAGVNTTLQALEQMVMPPSGATGMDGGINGSAHHGMAGPIAPPGSHMPPMHAPHAPHLHPGAHGPPPSHAQQQQISQLNDISSLIPPVSQTSMPVIPPPSAAGPSGPQAYGSLDDKGQHGVGGVDVATSVATVQQQQQPVHSLHQPHLSQPSAAQAPQQPPQLSAMQQQMQQQQQMLTQLQPGAHLPPPSATQHHAPGGPQHQQQSAMHHSTLAAMQPASGAGGSSLSHSISQQLHSPLASSNANEAPSSLGSSLMANAGAAAAGVVPSVYSHDANITPLATGESRDSIVPAPAESNTDESKSSNSNSLMSGTDFEALHHQQQNSSTAGMLLGQDNLQVGGGGAGVLDESMKDAAGLGDGSSLLDSAKQAGEETLGGYHSDAGMLQTGGNTDPSALEQQQLLLDSVASDVVGPAGLTDLQAPEVTTATKSPLETLVPTSTTTAVSDSTISPGGEPIISTSSSTGLMAGVGVQPTNVTGAPATYAQAMSGQMPQTTPGTGMYGMHQVGGVPPAGQTVTGAGDMMVPPPPPPYQTPPMMSHSQERAAIKQQMQDMYKLPMADNQEKMMRMQERLAMLQQHEADGCQGLGPQPCILMQPPHPLYPVAPTMTSAAAAAAAAMIDSPQVTSTTGRGRGRTPSSKPRKPRAKKGDKLLAQQEAAVAAATVVGQTGLITSGDETSQSNLVMPFSGAPAATGMTTPTPTTLLPVSEDSVTAGTGLPEVSPDGSSFHELMSLESSGGAIGAAGAGDLSQDNLSCSGTGDLDTSTDASGKKIKKPRKPREPKKPAKGAAAAAADGDAATSSNADGEAEVAKEDEASAPDASVKDGEDHEGGEVDGGDDQSKAAAITTTSEATEGSGSGVPMEEVTDFDDIPVSKISKTEPTKEEDEKKEAVEEGATAEPEPETPTKSKSKKSSKKSKEPGSEGGSSSSSRNRSRPSGGGSSSSRRSGGSKSSGGGSKSRSRRSRMIVTESDGEGDDLLSTPPPSPPPDMEADSSKRRSARNTQRKKYVDDVMLRFSDDESGMMSPAPSGSRKDRRSDGGSDRKEGLAPTEVALAGGEAGAVAADGSVAGVAGEASSVVGTGSEQAGDENKVSTSEGAKAAPEAVELGPDGKPIDDSSKPNANYVYVNTSEEDSMVVQYVLAVRKGRRELKPDPPPPPPKEKTPEPAEDVPMETSEETKSTEEKISPESDTANTDAEPEQKPSAEDASKAEEKMETDEQESVAVAAEKDTPAEEKEGEEKKEASADVDQQQVKEPVADAATAKESMETDAEEPHKTESVNTAAEDKTAEQPNGEPAVEEKPARVADKPEAEATEATADGVEKMEVEGESEGTEKKPEGDDAAADVVKKESAEGGESTDEKSSEAVKKEEGESASTETDEKKPEPVYIDVEEYFVKYRNFSYLHCEWRTEDELLKGDKRVGNKIKRFLMKQQQQLNIFESLDEEPFNPDFVEVDRVLDVSELVDDEGKTVKHYLVKWKSLPYEDSTWELEDDVDQLKIEQYYKFNKIPPKSEWKTKKRPHPDQWKALPESPTFKGGNKLRPYQLEGLNWLRYSWYKGNNCILADEMGLGKTIQSLTFVNSVYEYGIRGPFLVIAPLSTIPNWQREFEGWTEMNVIVYHGSATSRQMIQDYEVHYRTETGKLIRDITKFNVLITTFEMIVTDYQDLKNFTWRACVIDEAHRLKNRNCKLLEGLRQLNLEHRVLLSGTPLQNNVNELFSLLNFLEPSQFACSEEFLREFGSLKTESEVLKLQALLKPMMLRRLKDDVEKSLAPKEETIVEVELTNIQKKYYRGILEQNFSFLMKGTTSANIPNLMNTMMELRKCCIHPYLLNGAEDQIQYDYRQQHGEDAESYYKNLIVSSGKMVLIDKLLPKLRANGHRVLIFSQMVRCLDILEDYLMYKKYPFERIDGRIRGNLRQAAIDRYSKPDSDRFVFLLCTKAGGLGINLTAADTVIIYDSDWNPQNDLQAQARCHRIGQQKMVKIYRLLCRNTYEREMFDKASLKLGLDKAVLQSMNTGQNKDGTQRQLSKKEIEDLLKKGAYGAVMDDDAGDKFCEEDIDSILLRRTQVITMESEKGSTFSKASFAASANRSDINIDDPDFWNKWAKKAEIDPTACEKDETEDLVIAEPRRRTQIKRYGHDDGVMDISDESSGEQGSDGEEGGIGLKTRSKRTRGAKERKKLQQQMQHDDYVPRDRETLAVLGADEVSYGNWARSECFKVEKGLLSHGWARWTEILEQGQFKRGWREQDVEDCARVILLYCLERYQGDEKIKNFIWDLITPNEGGEQREIARNHSGLHNLVPRGRNAKGRKSTSTCTTPKRDSSNSAATGSNGGGGGSPVIAQPAGSTTPAPQCSGTADANEDASSNSSGTKAEKSAKSGSDTGGTTTPVSDPHHWSKDEKYDTETLLDINYKKHLTRHANKVLLRVRMLYYIKHEVLGDLVNQINEGANASDLPIRPPPTPDQLPCSWWNPNCCDRSLLVGTYKHGCENYRGMRADPMLCFQSHCGPGDGTVEETTIVKETDDDANSKLGDNEEDPEDGVPSETTRSASVGIESKDDLIYPNNGPRFVTTNTNLDDEESTVGTASAAPTPAPSDMNPELAWPTMQDLNTRLRRVITSYQRNYKKEELKQQQKAKLQTIVPPAGTPTLTGQTSSSPSTPSTTPGPLGAAVGGAAVSGAVGIGLGTAGSPQGKGVQQQQSLPSTSGNSGTGGLQAPTAGMPTAADFSLMLSLGLGLNPADPNQLANIDLQKLAMYLVSIVHIPNKMERREKNELVMRERERIRLEQIPKRWTRREENEFIRVLTGYGIDLQPNATVPTPDWSRFKVFAKLDKKTDENLSDFYKVFIAMCKRQAGVKLSDDEKGLEGLVDDVTEDHAKLILDRLELLSKARQIVKHPKLDENIRLCENNLDTPDWWIPGRHDRELLRAVLKYGIYRSEQLILADPDFPFYESAKKYLQQLEMQIQLQNQQLLKMQADAAAKADAAAAAAANATTVKPAASPEKMAAAAVGGDLPVKQEKDAVAPVVASMEVDGEKAVTEVVLPKVEPVAPLSPVKKEVEEVVEPIVSTTSDDKPSEEKNATMEKSPKAKENVDSSKDTVENKDKEESSEEAKKEDVPEEAAKEVVDAVEKEKSDEEPAVEKELVEAPTEKTADKEEAKAETVEAPSSPTKDTSDVVPAVNEQEKPAEPEPEQVKEAVKEVVAEAAEKSAESTDEKPAEKPAEQPAEKPVEKPVEKAVEATAEVVAVEKPVDDVVVVASTDGKEVVEAAKPPARSPSPDVIIVEDKKPVEVKAIVNLTDEERCSQQTAALKARFPDLEVFQPLMKLKHMIDTSMIVKWFRDFALERRVGHIIYCVEHGEWPVGKSYSAYTGCLGIDLDIPLYETIKRIIPVNDDVRRSASSTPDVITITTDHQNAKQISNQAAAIQQQASGIGGIGSVGANISTGSGSSVGAGGKRKRHIAIDVETERAKLHALLNNTQSPVEDDDVQEVVSSRSNARSGSSSANSNVLQPPPAHQHGPRNQMSYPKPTLIPGTSSTLTPIDLSSSLPKVNIADMIKNSSSMGGSGGAMDLSEVQDFSIGKNKKSSSSNQQLPSAAAAGKGKLNDMLSKLMKKNNVSVPIEEPPLGKEKKRRKLDEIVLGLSAAKEHKTIFGDPTPPGGSFSGSSMKKPQIPPSVSVTPASAPTSVSQQPPQKPFTITVTSVPGNPKGGQGSSGVGGGSSSASGNSAAAAAASMQAALQGMSGMSGAMSTKDSLNALFAQAAQVEQQSFLKQQQKLIQSLPANSPQRKAYEAMFAEMKQAAELSSKLGQYGSAHDAKVKNWLAEQTAVLTEQAMGMDYLSRSRGSRGSSSAQNSPQGGSSSRNPMAFNWKNLTGDEYVAVINKINGKRLTGNKAPQLKRLTQWLADNPAYEIDPKWAESITLPGGPASMSSSKGSDGGGSTAKQMRAANAAAAAAANQYGSAGGGGGGSGQQSSSGSASSSSSKKHSQSSSNAAAAAAAAAAANMQFPGLAGLNANLLSSIPGLGSFDPKNNPLLMPFGGMPGLAGLGGLGNLNNMNLFSNLAGLGGLGGAGGGMDAQSLAAMMAAAGLDPTAALGAAAAAAAGGTPTKGGSSGSKSRGKSSAAQSSAVNDGAGTSGSGGSGQQGGGSSSKNQQQQAAAAAAAAAAASSQFPFFFPNPSLLYTPLGLGGLNPYGLPGVSGTTTGTSTSTTTSRQSQSSKQNSRGGGMGSGGSSSQSASSPGGSGKGRGSSSLTAREAAQLQQLLLPHDTHLLESLTRSAGLDISAAAAAAAAAAAGQGSGSGSGGGRGGSSSSASEKQRARESAAAQQANKQALEKLERERRKILETLTAGGFPADLAAMQAAFSATGKMPSSSHSSSSSSKALDTAEFSQALFAGMAAHALSASAGGSGGAGSSGAGGRSSSPSAAKKAREHQDLKDAFEQLSKNPIELLARSLGVGPAISLIPTSSTSSSSTQSVSESKRARQEAAQLQHHLAKLDAKALLMGAGGGSGQDEMKSSSRSSRNSASASASSSEASAAALLGLDKVTLTPVAAASIAASLPSQTTISLAPSPLPGSSSSLNLSSKS

SEQ ID NO: 8220 - protein, 1912 aa, Anopheles gambiae str. PEST
TKEDKSDSENESSSGGSKSGSSSDSESESGSGSSSSSSSDNEHDASNNNNGLSRNTSGTTSTTTHNTSTGLICFFFPPRGPNTQDEDYAANKLRRKSARKKAVAAARKRPAAQPTSKAKKKKSSNNRWKSETSESDGSDGDSDDSREQRHRRKPSGAAAAAAAAAKKRSTASNAKSKAAAAAAASKKKKSNAYSSDDGSNSDDDRKRSSAATRRKNNTVSYKEESGDEPTDSDDLLEVDQEAEEAAAALAAEEEKAETIERIIGRRKGRRGATGAVTTVYAIEENGDPNVLGGEGVGREQEEEEEQFLIKWTGWSYLHCTWESEETLREQKVKGMKKLENYIKREQQLEYWRKYQAGPEDIDYYECQQELQQDLLKSYYHVERIIAQANKAEEGDSGLEYLCKWESLPYSDSTWEDAGLIRRKWQQKIVEFHEREESRRTPSKHCKAIRYRPNFKHLKQQPEYLGEERGLKLRDYQMDGLNWLILTWCKDNSVILADEMGLGKTIQTICFLYYLFKSQQLYGPFLCVVPLSTMPAWQREFGIWAPELNVVTYLGDVQSREIIRQYEWCYESTKKLKFNAILTTYEILLKDKTFLGSIGWASLLVDEAHRLKNDDSLLYKALKEFDTNHRLLITGTPLQNSLKELWALLHFIMPERFESWDDFERNYGNTTNDKSYTKLHKELEPYILRRVKKDVEKSLPAKVEQILRVEMTSIQRQYYKWILSKNFDALRKGMKGSVGTFLNIVIELKKCCNHAALTRPIEFETQRNSQQDVVQQLLKGSGKLVLLDKLLCRLKETGHRVLIFSQMVRMLDILAEYLQKRHFSFQRLDGSIKGELRKQALDHFNAEGSTDFCFLLSTRAGGLGINLATADTVIIFDSDWNPQNDLQAQARAHRIGQKNQVNIYRLVTAHSVEENIVERAKQKMVLDHLVIQRMDTTGRTVLDKNGGSNTSNPFNKDELSAILKFGAEELFKEEEDGDEELVCDIDEILRRAETRDEAPGMPGDELLSAFNVTTFDFDEDKVVSGAKPIGGAPGGGAADQDQDTKDWDEIIPKSYRELVEAEERDREIKDLYLPPRRPAVKPGGNSQHGGEPDGRKGGGKAGGKKRKGAADEDSDEALDSDGASGAEDGKAKRSRGRPSNKEKINGFSDAELRRLIKSYKKFPAPLKRLEAIACDAELQEKPLSDLRRVAQLLHDRCLQTMREIAKDAEAEAGGKHHGGGGIAAAAAGADAKKKCARAAYSSKIGGASFNVKTMMQCVEELQPLDEVIPSDAAERARWTLNIKTRPPNFDVDWGGEDDSRLLRGIYQFGIGSWEAMKMDPSLGLADKILSNDASRKPQGKHLQSRAEYLLKVLRKTLELKRGPSKPRKQRKPKEMKSALGGAGMAPVPVVSSPLRDGGDASFSCSISATIAAVAAGEDVTMGGGVAAGGNGASGAGAAALGGGGAVAPGGGAAGGAVHSNGSRAADEHAAVGSSNHATPAPDKKDKKKSKKDRQKDAKKDKKNKNTGPMHFTANNEPCALNILGDLDPTVFNECKEKMRPVKKALKTLDNPDESLSQEEQLRQTRACLLSIGDQINLCLAEYRDPEKAKEWRSNLWYFVSKFTEFDARKLFKLYKHALKRSEGSATSGGEAGGGGGGTTNSTPVKGDGSSGGKGRKAGTKKDNGHGEAGAPPGDSPDEGKGGGSSHRDRDKKWDEYGSERDRMRNVPPSSRGSAPGTPQSMRGAYPDERSPAPYPADGGAWRDHRFGPDHKRDRYDGYGSSRHSSSSGGYHRDRDRERDRDRDRDREWDRDRDRDRDRDRDRGDRAYKDKRRYPPPGSGGYSGGHGYGMSPSGGYYPPGSDSSYRYPMGSGGGGGGYPPSSRPSGTAPPVAVVMPTGAGGGVVAAPGVVVPPADYLDYRRSEYDRRPPPAANN

SEQ ID NO: 8221 - protein, 662 aa, Anopheles gambiae str. PEST
LDHSCTRSVDVTLCVKRFVKMQSPVNDSAPSSPVDENVLIEKTAFKEELSRKRQLQLEALEKKLAGFAKFSQEHSKKKAQPTNGKRKLKSIENLRKDDYDNNNNEDAIEFTETPSYMNAVMRDYQIAGLNWLISLYNNNLNGILADEMGLGKTIQSISMIGYLLNVRKLKGPFLVVVPLSTLPNWLNEFNKFLPGAKVLRAHMVGPQKTEIFRKLRASKPTWNVAITSYEFMANNRGSFTSTNFHYAIIDEGHRAKNENTIFAGVLRRCKIQSMVMLTGTPVHNNLHELWALLNLLMPLFFNSADNFDSWFKVEDCVDPKHEQTIRLKKLLKPLLLRRTKKEVTSDIPPKVHIDIYVPPTEQMCLWTHKVLHREVKLIMGSGETKEMRIASRLPHMRKVIQHPYLIPGAENLNTNLVTDEIVQFSSKMIVLDKLLARLRARGSKVLIFSQFVTVLYLLMDYLDWREYEYCMLEGHTDIAERQEQMNEFNRPDSTKFVFLLSTRAGGLGINLPAADTVIFYDMDFNPQMDFQAEDRAHRIGQQRKVHVFRLLVRGSIDELLYLHSERKRQLDEAVIRTETKPSKKLLMSAYEYQRTSLMADGLIDEAAVDTKLDELFHKMGSLTRVTASTDSGIMEDCQIIVPGVSCDLKFDTVLSTAQMIEK

SEQ ID NO: 8222 - protein, 936 aa, Anopheles gambiae str. PEST
VFVVLVGSWFENYVYCACVCVCLLCVRKKTRLAGSRKVLSTRDLQTEAFTICNQGVLLGRFISTATEIMSLRGFRKPAQNGNADGNEAGDGKLSLIPGRKRIQMMGDSDSESDASTTPIKPVPIPVVGAVKENGATKSPAALTIKEKELRLQMVRQACMDVDAMLLQSSLVSNEWDVDKAIEELKKTAVKRKIIVSPSPVKPATAETATNGKEKNQQQAKKRRVQEPNRSDDESDVDSDRPAEQVFDSDEDSDGHGGSYSHGKLSNERKNVLEFLNTAGLNEMICVKTLSMKKIELLLEQRPFKDWSNLVDKLKSHRSLQTDILNYTQEYLTRRKNIAAMMSKCKKITKKLEEAIASGSGTLVEQPGNIADGFKLAEYQLVGLNWLTIMYRHKMNAILADEMGLGKTIQIIAFLAWLKENNHQERPNLVVVPSSTMDNWEQELVKWCPELVILKYYGSQAERRMIRVDWAKNGINEVDVVLTTYHMMGASGEEKKMWRVTQFDYVVFDEAHMLKNVHSQRYQNLIRINAKYRILLTGTPLQNNLLELMSLLCFVMPKLIGSKVEDIKTLFQGKVKTNKGEGEEELSSFEKNQIDRAKLIMKPFVLRRLKKDVLAFLPPKKEVVLKTSMIDSQQEKYNEIVNEYQNATGKVKDYTEISGMSIMMDLRKLANHPLLLRYYYSDDDVRNIARKLATDPDYKGTKEDDIFYDIAYLSDFKLYEMRDKYTTLYDLQLPEKLITSSGKFRQLDELLPKMKEEGHRVLIFSQFTMMLDIMERYLKIRKHGFLRLDGSTAVTERQELIDQYTQDPDLFIFLLSTKAGGLGINLTAADTVIIHDIDFNPYNDKQAEDRAHRMGQKKPVTIYKLISEGTIEEGMLMIAQQKLQLEKDVTEQDGKNPMDDHKCMVGLLTMALGLDEKKAETILKNESPMKKPMQEEF

SEQ ID NO: 8223 - protein, 690 aa, Anopheles gambiae str. PEST
FKVVWGKISTRKHKTWEGDGTLEVSGRSAVLKDEAGKVITTASGLKIDEVTEGIQLVVGSKEVEVLEKCNENQQPRLENSSTVVSSTGEASPRIDAVPLVDTTNFSRDSSCRVQNNFKSVFTTREDEQEAVQPLIMKKPSFEHQFQHNAQNEPVVEVQVPLCVTRHLRPHQREGVAFLYECVTGLRMLEPPGCGAILADEMGLGKTLQCIALMYTLLKTGPYGKPLAKRVLIVTPSSLVDNWDREITKWLRSERIFTFIVGPNNKLKRYAQSPHIPILIISYEMLAKQIGELETVKFDLMFCDEGHRLKNSNVKAFGVLNRLECRRRVLLTGTPIQNDLQEFFSLINFVNPGAIGTYQDFKARYETPIVVSQRPGVLPQSIELGIERLNELNAITGRFVLRRTQEVINRYLPDKHEVVVFCHPSALQTQLTRTALSFYDSEKGADNAVSPLQLITILKKICNHPSLVSVQGKGDPESLVHLLAEQLPPWQRMGPTDSAKLGIVEALLEAMLAMQEKIVIVSYYSKTLDMIGGLCDHYNYKYCRLDGSTAGPDRSRIVAAFNNPANDSFILLLSAKAGGAGLNLIGASRLVLYDNDWNPANDLQAMSRVWRDGQRKPVFIYRLLTAYSIEERIFQRQISKTSLSGTVVDQRQNLSNLKLSEEELKDLFSIIDPNAEADCLTHSLLECPCAG

SEQ ID NO: 8224 - protein, 767 aa, Anopheles gambiae str. PEST
MRKSLVPQRCTPSNAVHSPFKSPLSAQKRQRECRKRLPDKGGTADQPPTPKLSVSEHELMIMKILTQPFKIPIANYVPEHSTRCLGMKRSAARRALHDPYACNALVLFSPPELTEHDKLKMDKSKIQVHVVVDPLLGNILRPHQREGVRFMYDCVTGAKGDFNGCIMADEMGLGKTLQCITLLWTLLRQSPDCKPTINKAIIVCPSSLVKNWYKEFGKWLGCRVNCLSIDGGSKEQTTKELEQYMANQSQRHGTPVLIISYETFRLYAHILNSSEVGAVLCDEGHRLKNCENLTYQALMGLKTKRRVLLSGTPIQNDLTEYYSLLHFVNPGMLGSTAEFRKQFENPILRGQDANSTDAEREKAAERLQELAALVNRCMIRRTSALLTKYLPVKFEMVVCVRMTEVQAALYKSFLQSDTIRRSVMEKNATKASLTALSNITSLKKLCNHPDLVYEKIQERADGFENAATILPDNYSPRELRPELGAKLMLLDCMLASIKTNTTDKIVLVSNYTQTLDLFEKLCRKRGYGYVRLDGTMTIKKRGKVVDQFNQPDSADFIFMLSSKAGGCGLNLIGANRLVMFDPDWNPANDEQAMARVWRDGQKKPCFIYRLLATGTIEEKIFQRQTHKKALSTTVVDNAEDGERHFTQDDLKDLFKLDEQTRSDTHDIFRCKRCTNGVQMKLPPDDSDCMSDLAHWYHCANNKGIPDDILSKSWDITRCVSFVFHHRSNSAVVEQQLAEQRRQQTLAKEQEEKEEEEEDEEDKENKGY

SEQ ID NO: 8225 - protein, 451 aa, Anopheles gambiae str. PEST
DTLADPPKLLKIELMDHQRHALAWMLWRETQKPRGGILADDMGLGKTLSMISLVLNKGRKDYYAGGTLIVCPASLMRQWEGEITNRVKRNSLAVCVHHGTQRESKPRHLAKYDVVITTYNLVSRESRAGTARGASGVYGVNWERIILDEAHVIRNHKSAMSEACCGLKGRYRWLLTGTPIQNKEMDVYALMKFLRCTPFNDLVHWKRWIDNKTAGGAMRLNTIMKSIMLRRTKKQLQERGALTSLPSKTIEIIEVQLEKDEMNVYQKVLMYSKHLFAHMHAAKDGSEVKQHQILVLLLRLRQVCCHPGLIYEMLSDSEQFGHDGRRSKIEKTMQLLEEKIFHTDDKAIIVSQWTSMLDILATHLSERNVPFVSLTGKVQVKFRNDIVLDFNKPSGKSKVMLLSLTAGGVGLNLVGANHLLLLDPHWNPQLEAQAQDRVYRVGQTKPVYIWK

SEQ ID NO: 8226 - protein, 2089 aa, Anopheles gambiae str. PEST
DISALKKLILEHKYMRLRSIKERYNEHVAELFFLQTGGNMMEYPVWRKKPPTPAFTSFVRSYKLEPLSSNLEEAGEALKQVSTHTIAFLNAVFNRPTSTGRTKHPIRCIMVFFFSCLSFQLLQQSTRALSGISTTPGSTNLGSVVTPVVVSGNGSSSSSGGDDTLTGLPQGAEIKIPGVGATPVAVSTTLPAAVAQLSQQGGTPIIPDRVGIGISPAAASAVDRKRQISSASSALGGHMIKSELLETANASPSVTTIGTNGPNVPSVRQGGSLTGGAGGVPAGTNSNGPPDQYTNKARQEVFVMQRIQELQKEGLWTEKRLPKVQEPPRPKAHWDYLLEEMVWLAADFAQERKWKKAAARKCARMVQKHFQDKALAAQRAEKAQELQLKRIAAFVAKEIKTFWSNAEKLVEYKQQTKLDERRKKALDQQLSFIVDQTEKYSQQLVEGMNKAAPVPGGAAAALLPPGSKAESLNSSRLSSPLRGSGGLAGGSDDEFCPEAESSDDDEETIAKAEAEAAAEAEDGTKDEVAALQKESEMDLDDFLKNLPKDYLENRDKIVLKKKQGATREEGEEEDGDKDFSADEDSMDDEDTIREQEKKEKNQDHKKEIDELNADNDLTIEELMAKYKNLPPAVPANDRKRRRTRSQPMYESSDDEDKEEEDDNDESEGLTGSDDDEQEEDDDDITEDESDESEEAMDAEEDAFGLKHLLDDETGSGETAATSAAAAAGSSGASSAAKSQSDKDDMLNDAAAIAESIQPKGNTLSSTSVVTPIPTLLKHSLREYQHIGLDWLVTMHDRKLNGILADEMGLGKTIQTISLLAHLACVKGNWGPHLIIVPSSVMLNWEMEFKKWCPGFKILTYYGTPKERKQKRTGWTKVNAFHVCITSYKLVIQDHQSFRRKKWKYLILDEAQNIKNFKSQRWQLLLNFQTEQRLLLTGTPLQNNLMELWSLMHFLMPHVFQSHREFKEWFSNPMTGMIEGNSEYNETIIKRLHKVLRPFLLRRLKCEVEKQMPKKYEHVVMCRLSKRQRFLYDDFMSRAKTRETLASGNLLSVINVLMQLRKVCNHPNMFEERPTISPFRMEGISIKTASLVYNMFSYDPFTQIDLSSLNLVLIQLELLLPAYVAHRAQHLCMPKRLIEEIDSTPLPPPRCPTGKLRLHVRIPDVRVQESLGGNRAGVSITTGVRVGTSPAMKTEGTKFVPLVNHEASLDKKSSLIGSGGSSSSSIQSRVIDIRRRGSSTVMMMMGGGSSAGLDSSSMVAAAGSNRSMSPGLLLRKRSDIAGGGATHQSMGGQSSAAATSAAAAAAATVSGATANRMVQNVGQKTQISSTLAATIMKQLKHSKSLAGSSGDAAARSAEAAEMDERQRTEFYLACIEESRKERRREVLELLGRINAKRCDATPIYGRDLRETLCALIEEEFRHRPDELIPFGVASSYHTRRATMARSCLSEAIKSIDQRAGELRATISNFVLFVPAVCAPTPYLQVSHPHPSKLNAEQQWEATMAEQIQPAIQLLHPIISAMSTQFPDPRLIQYDCGKLQTLDRLLKKLKSEGHRVLIFTQMTRMLDVLEAFLNYHGHIYLRLDGTTKVEQRQVLMERFNNDRRMFAFILSTRSGGVGINLTGADTVIFYDSDWNPTMDAQAQDRCHRIGQTRDVHIYRLVSEKTIEENILKKANQKRILGDLAIEGGNFTTAYFKSSTTIQDLFTVDSAEQDASARLAEVLDRDRERKERLNANLATGPGQPQPATGGEPVVDSSKSAINVFESALAAAEDDQDVQAAKFAKAEASADLDEFDETIPIDEEKVAAAGDAEGKEPELSKAEKEVQNLIKQLSPVERYAMRFVEDTEGTWTAVQLKAVEQEIEQQKRDWEANRLAEQRRNEEAARKREAEEHADLLTFSREDAKNQVNKTHPSNRVSSGGSSKHRLRTMRRNDRTSRVTTATTTAKTMTNRDGGALKNRANSRGHQVAASKYDGGSRSGGRADGGQKLTTATGRRVMASAKQQSKHHSGGVGAKHSGLGNNKAAGSILGKRKYQESAVAKGGARSQSSKAAVATAANQRRAKGATRNAKHARRNVSKASLTDDEDEDELESD

SEQ ID NO: 8227 - protein, 1207 aa, Anopheles gambiae str. PEST
DRERMFDFSTVGPERMWLKNLLLSETETESEISDVDEYIHEMLKNHLREKKIREKYNDSSQNSQYGYYSAGLLSDNDLFPDHRRTIAGKRKCKIDHGTGKTKGVRKKLKHSKKRSGVEGSSYPAEGTSMRSSISSTAGGKRGRKMRLKTPEVMNIRRRKMWQLMAKKEVGKLQRAKANNHKDTITNCRRVAALCMRVARQKAMQSQKLMKDTVWRAKRLTREMQVYWKRYDKVERETKRRMEREAEEQRKMDVEIVEAKRQQRKLNFLITQTELYAHFMSRKLGNVSAEEQLKILSQLDEESNPRLAAIDNYDCERMKQLAQKNATEAFRSERARTNQFDVLQHAEPASTSKDSPVPMEQPNLPSTTDEMPVAIKTEPNAGIAELPQPAMFQGHLKGYQLKGVAWLANLYDQGISGILADEMGLGKTVQSIAFLCHIAEHYGVWGPFLVISPASTLHNWQQEMERFVPDFNVVPYWGSPNERKILRQFWEQKHLHTKDASFHVVITSYQLVVTDYKYFNRIKWQYMVLDEAQAIKSSSSMRWKLLLGFNCRNRLLLSGTPIQNSMAELWALLHFIMPTLFDSHEEFNEWFSKDIESHAENKTGIDEKQISRLHMILKPFMLRRIKKDVENELSDKIEIMVYCPLTTRQKLLYVALKKEICIEDLLHLTTVGGGNSSSSDGQSIDRNFTSNLMNLVMQFRKVCNHPELFERRDVRSPFCMKWNYELAERPIFRRQLLMDYTVPSKRHWLHNRFYIFKALQVQSRLVMDEGGRSVPEDKSRSGLSKAIHYDDWCAPFSCARYHLIQEWMNWISVLHFKWVWRDRQSDRWTDPRYLLLEPTAERWTTRCFPWKTMDRLLFTHGSHTSSIPVYTHRDHVLHFMSETLDHRIMRSRKQQIPGQPLSLLPEIPYVPTRKRSPTVLPDEPTTMPKFLCRHYTKVLNTSGCTGTALRRMYGNRASHAVCRWSCNENALAAERQLNEHVHASYPPHGWSNIIIPDKQTLVSDAGKLAVLDSLLARLKEQGHRVLIYSQMTKMIDLLEEYMWHRKHRYMRLDGSSKISERRDMVADFQNRADIFVFLLSTRAGGLGINLTAADTVIFYDSDWNPTVDQQAMDRAHRLGQTKQVTVYRLICKGTIEERILQRAREKSEIQRMVINGDNFKPDTLKPKEVVSLLLDDEEIELKYRQKTEERRLMEDPVAKSAKDRKQKQ

SEQ ID NO: 8228 - protein, 821 aa, Anopheles gambiae str. PEST
SDSSDDAELITGDLEENKTVPDKEPKRRIRAMLTNDELAEETKKAQKEEEGRTARLKKKHEQLKKFLASYLPGPGESELVLDYDSVRKQAICVHPEIVKLLKPHQIEGIKFMYDNTYGSVDALPKHSGSGCILAHCMGLGKTLQMISLLHTVMRYPQLMTNRVLVICPKSTVMNWKEEIARWQGTIRTGYQMKVYCFPDVCTQNDKIGVLKRWYYCKSPNCGVMLIGYEAFRALINYERRKGSVGLRSAKLGLIKEYLLNPGADLVICDEGHQIKNKRSAISEAVSKIKTRRRIMLTGTPIQNNLKEYYCMVNFIKPSFLGSDKEFSNLYANPIKNGQCKDSDHQSIKIMKQRSYVLHNKLSKFVQRKEAAVLKEFLPEKFEYVLFVPLTPVQEKMYEVFLQMNDYTNNDVTGEPGRTKKFKLIADYTSLRKIWTHPKVLEKAWESANLEKNRRDAARKTATPDSDDESPDDHNDIKSGQLSVTNDWWRQYLQIADLESLFPSNKLWILFEILKHCNERGEKVLIFTAFVSVLNMVEHFMAKIHHQEENPQLSDAYAYSAFKGPWEPGKDYYRLDGKTQKSIRHQMITSFNDPQNKRTKCFLISAKAGGQGINLTGANRVIILDTSWNPSNDQQNIFRIFRLGQKRKCYVYRLIAAGTMEEKVYSRSVTKQALSFRVVDEQQIDRHYSYGELAELYTLTKVSEMTRETPILPADDILASLLRTYPNKILKYHEHDSLLENKPEQDLSEEEKKEAWAAYEREIQNNENRSYLSQLNSMGAAAAAQLGGLLGSSAYGSPMAPYYASAMGYPGAMGLPMGGAGD

SEQ ID NO: 8229 - protein, 544 aa, Anopheles gambiae str. PEST
VAPVFVRTVTCACSIVSDTRFVVETNGFNEQMIDIFKQIPSKSYEPNTKKWTFEMKDYSLLQERIATLNPHVVLGGIPKFVMQEFASGPKPKPSRICLNAIEPSLVESLLAFQKEGVAFAIDKGGRALIADEMGLGKTYQAIAVADFYQQDWPLLVCTTASTRDSWAHKIRQLLPHIPVHSIAALNSGQDYIGECRVLIASYSMMERCGEKLLDRGFGMLIFDESHTLKNFKAKCTTVAMALAKRARRVVLLSGTPALSRPVELFTQLQMLDGKFCSFKEYSTRYCAGKQSNFGWDATGQSNLAELNLLLARKFMIRRTKDEVMSELTEKNRETVVLDPSYLWTNEELEGNMSSYAADYSTSKGRQREEALIKYYSVTAEAKAPAVCAYLKEVVKENKKFIVFAHHHVMLDAIEKSLSKQNVDFIRIDGSTRSDLRGALVERFQSKATCRAAVLSLKACNAGITLTAAHLVLFAELDWNPSTLAQAESRAHRIGQADNVTVRYLLAKKTADDIIWTMLQRKQETLSRVGLCNEDFSDASSVQAP

SEQ ID NO: 8230 - protein, 1385 aa, Anopheles gambiae str. PEST
LRMKKSSLRDKRKQQPKTLRRRNGVDSGSDVDHENERMHVKQDSDTVKSSSIVKLGDNLTTAAAAATTTPTGLLENGASISGSGDSGEAAAPVEKNNSPAPDEQDAARVDSPTDDTVKTIRLVSLDKLLRPSLVGKVPEEGKGEEEKQPHESRRSSSNRAGKKNISIIELSDDSEEESLQQYVIDKSSTKSENDAGKEGVAASPPPPSSASKVSGKSAKKATSGEGRAKSSTLLPLATKELSIVVTPLPADLSTIKATHGLKEIRDHRNNVIETFVPNSSRLSNRTRKNKAAKRKKMASPEEEQQSDAVALENADTGSNSKQHRQEDDNGGSGNENQSDVEEGSKRNESDSDAPITRGRNKSKTSIPKEKKNTLITRKRRAVSDSDEEQDTGKPSTPVANGNTDKDSESGSDFEFAKRNTATSRSQRAAERSKRGRAGATKAAAPSADEASNDEEADKEKNDFQTRKKRTRIRRNSTSSSGEDGKPVSKRKKRKQTKKKNSDSEGDSPNKGRKNIRKLLKKSDLEETTKNAEQEERERKQRIAERQKLYNQVYDEKPEEACTLDQLVLDFDEETKEPLLEVDRKLVKQLKPHQANGIKFMFDACFESLEQMNQSKGSGCILAHCMGLGKTLQVVTLAHTLLASADLTGVERILVVCPLSTVLNWANEFHMWMKHVKKGTEVEVYEISKYKDNVTRANKLMEWHNEGGVMIMGYDMFRNLANPTATRIRKKVRESLQTSLIDPGPELIVCDEGHLLKNEKTSLSQAVNRISTMRRIVLTGTPIQNNMKEYYCMVQFVKPKLLGTYTEYMNRFVNPITNGQYTDSTPYDIQLMRKRAHVLHKLLDGCVQRRDYAVLAPFLPPKLEFVVSIKLTPLQSTLYKYYMENMAGKRNDDDPTLKRSSMLFNDFQNLQRIWTHPRVLRYNSDRYEIKQQRKRDLDSENESEGSMKDFIDDEDTAESTPASSDSESDVQSVHDDSSRDAKSSGDSTSNKRKATVGTRSTRNNPNFNGGDDDDVIMQKPENPTEWWMQMCPETELDNLEHSGKLVVLMEILKECEAIGDKLLVFSQSLYSLDVIEHFLSLLDENLQKDEDERDEQLSKYPGSWSLGLDYFRLDGSTSIDNRNDACKVFNDESNTRARLFLISTRAGGLGINLVAANRVVIFDVSWNPSHDIQSIFRVYRFGQSKPCYIYRFIAMGTMEEKIYERQVTKQAISKRVIDEQQIDRHYKENDLQELYRYEVETSEPRPTPNVPKDRLFAELLKRFDPLIYKYHEHDSLLENKEEETLNEEERKAAWEEFEQEKNRPPMPAYGTSGMLGIGGMGGRGVNGPVTSSTTFGFRNDVLLKLLHLKAREDNPTFNDATINAMIPYLMQQLSQQMRDGELTVRK

SEQ ID NO: 8231 - protein, 1166 aa, Anopheles gambiae str. PEST
RKVSNLRKNIKEVMDDNQLDASTLAAQRQELERLARVQEQQRIIREVQRQLALERQTNKTEQKVMQFLQGHASILKSQQPSTSSTAASGSGSGGVASTTPIRVGYVKNPFETRGRPPKNRQLLISTATTSLLTTTTTVAASTTAATSTTNLTPSVSIAPVKASSVASAVTPVGPPSTTISASASPSPSIIPVRTFEEMVDSEEELEPEEEPEDEDEDSDGEVIALPEKKEIVTIDSSSDDDCIVLSDDDEEPEDESDDDPQNSGLHVNDAYNVPDEQGRVVINVGHTDGEEDIFLAPQIARIIKPHQIGGVRFLFDNIIESIERYDSSTGFGCILAHSMGLGKTLQLVCFCDIFLRHTSSKTVLIIMPINTLQNWLNEFNTWLPEDADNSPLRNHGEVRPRNFRIHILNDSHKTLKSRSKVVLEWARNGGVLLIGYEMYRLLSQKKMTKKKKKKKGVAVELEEEKESTEEQRNMFDDIHEALVKPGPDLVVCDEGHRIKNSHASISVALKQIKSKRRVVLTGYPLQNNLLEYWCMVDFVRPNYLGTKTEFSNMFERPIQNGQCIDSTPQDIKLMRYRAHVLHSLLLGFVQRRSHSVLQTSLPQKEEYVLLIRMTEFQRKLYSVFMNEVVRTKAVPNPLKAFAVCCKIWNHPDVLYNFLKQSERDLDLELEEPEPPPVPGGVPGAVKPVEEKESPTADKDPLSTTSTTTSTTTSTTITTTTTTTTATAGTKEGKGKDAKDEIPYEWAFELMKGYIPDLLENSPKMDIFFCILEESIRLGDRLLVFSQSLLTLNLIERFLQHNKIPGTENYWAKNISYFRLDGSTVAQEREKLINEFNSNPNVHLFLVSTRAGSLGINLVGANRVVVFDASWNPCHDTQAVCRVYRYGQKKPCFVYRLVMDNCLEKKIYDRQINKQGMSDRIVDECNPDAHLSMKEITSLCYDDGEDGEMKDFSEDKDKFIDIVMQHLLESHSKKLTKAPFAHESLLIDRKEKKLSSAEKRQAQRGYELEKQAATKPQYSYTSMGTTYRAIRTSDGSIIHRPVASVRPMQAGDANKTTTTGARPTRWIAAEVWQRQGMTAQEMTLPIDVVIPTSSADKSNIVLKAGQKVMVLKSPKGIYMQLESGKIIAIRTAFKVGQSKETPPAKGGIITTTPAAATGRRTSNLSFG

SEQ ID NO: 8232 - protein, 2645 aa, Giardia lamblia ATCC 50803
MADPQYSQQLLNIDAKLQSIYDECVCEVIGRHSVDANNAFSPAIRDDLYLLHQRVLTKQATEDDNARYRPLYLEISTAYTHKLRQLSTVDPALAQYLQYQQLQATQQMAQRSQQVQQVHQPPVQQQTQQQVQQQRNASDRLSQTSYMLEFAYQTQGQHTKDILRTLRAYYDSYAQQSHMPQVVESVFAQMKLIFCYLFCMIKLSGDSTKAAEIEQAYSLLCQEKSRAGAPLFASPELYKELEEETQMFLNSKQAQAQQYSYSQGSFASDAAQPLSIFQPVKEEALSYAHFGYVLLHPATQKQLYEVLKILCAQPSASQQQYQSVKAALVKYLYIFPRKTKNCWLNLNVDLYAKICPSSQTFPSAGLYQVLDYLKVQCYSLFQCIYEISRYIVTAIQVKSSGQDLSQAAAIINNFRINMFYDFKYNLYRPPYYNELPQPDPHLNEYYAEFVQPTVESLPNIESQISLMTQGPTGDPGLPLHQPQARAETKAEPQGLGKAEQQTRLQSELQNDSHRSFLNKYRELCIQVFQVSNITKPARDSYSKVIKDYNVAYNHLLSFGNTNSAEKQNAEFAARALYNKALAIQEDMRQKEQAYYTSLQQLSAYEQSITGSDDLRAEMEQIKQSVMDMYINKAAYQKAPPPTMQQRQRASTRQLTRSTTPSITPLHSLSSEAVSTMEESSESSEASPVFDDTEDTQNQAVSDELSDVPDHDTDVEEENYIGCVLDCKRIPMTSAWLYTPSLLIKPDPDPSTIGKYDFLRPKGIQRLGRSDGGIATVRIDFLYEDLDNVNNVIEISPEEENIKRSVDSSSRMSKGVRDLERSVIKESPQGEKQRTGITKVPSKDSLDDNIVSVQNASPLTAEKADVVDNHSIIADAELLTVKDSDQNGSLPQGEYQDPESKEKDDNPEKLDEANEPDGQEGHEDLTESSDTVVTPRTEERRAAAENEHVYIFLIKWQRKAHCHATWELEDYLMHLSSYVKVKNYKKKYEKIQGFIYNKDTDDISKEDVKDKIRSQKLQIRSYMIPEKIVGMRIDTELATHYNEKLTKIFNYMRTDSELNLRYSEAFAGAFTRNVGDGKLHYYPEFNNSDSEPVAITEFNFNDPDVFCNRQLDEDGYLPSYPIAHSSDGQGLLSEASQSSAIDKISGYIYLVKWRDLPYSQVTDEYYEDLLANPYIRHEYLHKLINDFKARSDAISQTLSKESSIGYDARPILSGDPQSEVDAVICSPHPSFLIDVSDNLVLRDHQIDGVKFLLISWLQKRNVILADDLGVGKTIQTIAFISALHNHFHVPGPFLIVVPISTLSAWQMALSDWCPNMTVVTLIGTKEDREVIVTHEFYFKPEGDQAELLSGDAAERSIPEKIPRFHILLTTPQMAVKHEDDLMSFQWRLLAIDEAHSLKNSASIRTTTFSRYKTDAKLLITGTPMQNSIEELFNLLNFIEPEVFPNIDVFACRDDKSVELFKNALQSWENTISTSAPSLNSCSEILSSQQRVDTIRSTIQPYILRRVKSVVEKCIPPRKELILRIHMTPLQISCSEWLLEQNYEMLTAKSYNSVKLQNLLMQLRKVCNHPYIIHDLKLHTANLKDIVDGSGKFQVLDKLLDKLNSEGHRVLIFSQLIKTLDILERYCFYKKYKFQRLQGSMTSEQRRRAINNFNEKNSKDFIFLLSTRSGGQGINLATADTVIIFDADYNPHNDLQAAGRVHRIGQSKPVTIYRLVTRDSVEERILDIGHRKLMLDYAIIQKKNESINLTISDQPAFGNKTPITGDSSQRSSADDPTRVDTSGSQAQAELSLLNKGTLAVNQPVETFSVINEQGEVVGTDTLSSVTVTNLKSITPAANEQEEQIMRHVVRFGAEQLTKMDHNAGSQQSSTSPETNFLDIEQILSGAEEVNYEDLSQNKFGKLPGNIFQLSDLSPDKSVKENKHENDQDFWRRIKDTIAANTSNDGARQITTGPLEQLLSPGKPAVNLVQFSFLQTREIMKIVKLLRRFGTTTNAHIQQIYSMDKTIATTLVSDINLKHFCDSILELCKKSCIRRNHDPLHIAKSATSPIPFMATTINPTDLCKSHYTMLILESIVLDDKFLFPASLAPPKPSWATIYPSIIDTKLLLLTISDGFFITENDIPLMNLEEVMNTPGLEVPEDPPRGSILKRIQQLMRLVLRIPSHSAYSAIDTDNVRISLTPDLSVYDDQHFLEYYQKAQGLSSDKEQLRAEISRLVESISQVRGMNMVQAEELDDFNDYTTVNTTLRRSKNYIPQDIISELGVETAMSMSKTALHNYLERQAQNKSLLNTCFKVPNQQRSFRTCLNIIKKHVTSERRKRMTILLRDVLIALGNDRKYLLGVKVPIASSILLNDKYVHKLDSLLAEKEGAYNSTNAASTLTKCVTIPRINLEKFRPIATLTQVELAEAHTAEAKISTYAQNVNPSTLHFYIDNILAEIIATQKYKVTYLNTLKADFLAVSTSILNTIASRSWDIMLHCYEYLHDNKTYYTNIYPSEEDALYILMREFEADLANFLLKYVISIIFPSQQEPACILWYICQYFLMDAQHVSHDDSGFKISTTTWKITESSDTTMYSSMSSLSFTAEVQISFSEEKELEYKQYLIDSKAELARSVSKQELDNASYLAAESSNDSSPDEDLSVASTSNNDRHS

SEQ ID NO: 8233 - protein, 1859 aa, Giardia lamblia ATCC 50803
MDPLSRSSVAPQSCGTSALSPRELAQHLYQMYVLPQRVGPSLAYAASHAPSNETSACPAPEKPQEAKDIQQLFYDRDTWTELYHSIAIQQRELLSRIQLEALDHYGRLSMPPLSRPYDCENLSADVISSCTFEICEYLQGERALAPMEDPFPPINDDTEKFLLTCVHTSLDVMDAPVGTAPVLPTPTYSFDNLLQRPCCIDWSIFYLSSNRAEPYTEVSIADILSLPSNLVSKVPRDTSTIFVDIHRLLFQCIKHASSMLTRSFGLDSSTPPCFRTSTAATLSANEFWSLQVLTDRPQAYLLLVPSTFQSSQFSANIYLCFLSLFFTSYIGLAQLLFERVSDFSNLYTLHSISFFQSPAIEHEDQDMLTSMQFLHLPLLENFSQVFTSYNALLFLLSDTSIQSQILQTNVAVGLTALDSSVLSTLEVMTNEESLLLTLTLCKKLGTNLKNYGGFSQRLLYIDAKERYSQNISALPYPSWVQFCRGSLSWYEDYGLHSITPHACLYPLLTETPSSLISNTGKEFHYDPQLSSYCTKEALSNSTFLQRSIPLKPLRVSTLRHHDTSLKSSRTKRRTVPDVQKRSRSHDQSSDLKDIGNSHSAAWALTDALHQGSALGLNPGTTDGGILTINSLSQLAIGSTTEFKTLYNHTDEYIDSAVTLFDYTNYSFEERLQRNKAFLPPHVITATTIQNRLISYATKHMMKRLRSNKQAFAPGAELARIRRVVKDQISTYKRLLREGRDAYNRDSKIRVKLESKRAEQLQEKHQRERLDFLIRQTEQYTFDNIKSKTGVTLVNTGAEKANLDSTDLFKLKILREDLENEYTDEEEALSKAKDNPRTLNISGLNIDLKKQPTKFIGKLKKYQIIGFSWLVNRFELELNSILSDEMGLGKSVQTIAFFQHLVEKYHYHGPFLIIAPNSLLINWIKELKKFVPSLLLWPYWGTQRERMLIKRGWATTLNFGHNIDTAMEKNESVLGKSDSILHVVITSYQIAVSDIKTLAAIPWKTIVLDEAQLIKSSGTQRWRTIMKYKSRCKVLLSGTPIQNSLEELWALLHFVMPELFERKDDFAEWFSKDIESAASRLGAVKLNADQLRRLQGILAPFVLRRVKGDVEKDLGSKKEIIIKCSMSYHQARLYKTVQQQFSLDTMRSSKDDADIRNIVMQLRKICCHPDLFEHTSSVGPFMLYFFISQSRWCQGTKYLEVMKADMEGDPDDDDDRLSTVTSATGLVAAGQKQQKNLRRVSTSSQTSGLAGVSSLSSIHNGPAAQDAVLPTTSSMPLISGLSDLPGVFQLDGDQISTVDSQSSLVATGADDSLGNSKLLNARRDLIFKRTAQSDVEAFTDIFVKIGIPDIARANYIGRRINPSNACSDIELSLPSPVLLGFCSDLAQKILECTIAKYFNIWNTDVPVLRTISRFLALSVQDLGFLAYCPLLIAHNAAWPALFPMIAHFPFDTKYETRFSIVLHLYSLIGSQLMSFDRSILSSTFSSTLPSILVNPSSLLIVSPMSHLLVSDALENGQSDTSAEHFAIEKTSCVFTNTLSKEYHVRYTQRDLLALHQFKQHWLIKAANDFLESQHLNHLLVYDAIAPKVFGLQPQVHIPTIFKPMHTHDVQALLRGEELYRESTFMGSLITPQSYLPLKLYDQKYVSNSLLNCPVYSKSVLRLIKDSGKLTALDKLLHNLYKTREPVLIYCQMTKMLDLLEDYLVFRRYNYVRLDGGDAVNKRGQIVERFMTDDTIFVFLLSTRAASLGLNLTRASTVIFYENDWNPTQDAQAMDRVHRLGQKKSVVIYRLVTEGSIDEKILEKARSKEIVQELVLRGQRRDEFGNLVHVDAYDNQPSKTNVRRMTRDDYLDLLLPSKGDK

SEQ ID NO: 8234 - protein, 646 aa, Giardia lamblia ATCC 50803
MHAAGMDVEDQLFQQELQSYYDEISSLKDKLTAETNQVKQKSLELKLLDVRKRLNFFLKRTNGTKRTFEDALGELEQRADTAYEPEIKHVCIEPDQKAEATTDFTPSSDEFSQFDADTFQSGNSQEYFFDSQNDLEVERYLERIRRQTWINGELAITDLTNLTEVAPGHKLYGPLYASLRKYQQTGVRWILRLFSLNSGGLLADEPGVGKTVQTIVALSSLFLSGRLRYVLLVVPSTLQTQWLEMVRSWWPLTRCILLNRASAVAYGINESDSDIYTSFLSSLATDLRKCSSTTCTYAGKTMTIGECGTIFISSYDFAMRNASALNTFFKVLTPKSLSSQEPCIQYAIFDEVHYLKNTETIRIKALRALRISCKLGISATPVQNSLVEIYSLITFIQPNILGDYDSFLQEYDIPIRKGSMENSNYEDISLAASLAQRLANRLKPYILRRLKSDVERSLPPKVEHLVFIRLSDTQEQLYLQLLSSDEAIIKLRQLSATSRSFGEGITKLTMAKLVQLQHICDHPGLLSTAPFDDSELYESSCKLTYLMEQLTTLWSQSQDKILVFCQGRMMLNIVEKALLETASFKNAYLRMDGNIPVDARPALYIEVFYGSADSAFPPYNTRRRSRAQPYCCKSCLSLKPQLEPND

SEQ ID NO: 8235 - protein, 1276 aa, Giardia lamblia ATCC 50803
MDLSTFKGLSLPKKLSLVFQRDILPENIKEDDMKNVPSMVEISKRNRERVQDDASDELAEEASDDSAPGSSLSTKNAFAGPRHEVEVLGQPHCLSGGLLKSYQLESLQWLVSINQICTHFRAQFVSLPDDLTSLIPVGATHRRTTHYAEINAAQIGAILGDEMGLGKTIQTISLLAFSHETLKVKIPHLVIVPKSTLPQWEAEFAKWIPSFQVLTVIGDKFQREEIIKTKLINVETRPHVCLTTYDVVRLEFKELSRILWYYMILDEGHKLKDNMSQISHVLRGFTTLHKVILSGTPLQNNLHELWALLNFISPLIFNVPEDFVGLVRGELPDGSAMEPSLRGEQIGEESVTLEVNEELSEITEIATDTTTDTTNTQPVSSVLTTDESVAAKMHDVLKLFILRREKKDVESLPAKREYLINCGMTSLQRSLYKSLLAKDLGCLDKVLRSKSSTSSIGKTSLINIVMQLRKCADHPYLFNGVEPQPFKEGDHIVNVSGKMVVLDKLITRIKAINEKVLVFCQMTSMLNIIEDYLRYREYLYCRIDGSTDLETRAKYMQMFNTPTNPAFVFLLSTRAGCLGLNLTAANHVIIYQQDFNPQADLQAVARAYRLLQTKEVFVYRLLAENTVDTRIYERAQLKLGLDNLIIQTGNFANNPHIDKLLGDADLKSKTMTRNQLLDMIAVSSENLFTESQKNTEDAEEAHNYDIPEIQINDSKLDELLNTALRRKDDVSGQLNQKIKSANEIISKLASDGKLEHINTDELYQFEGMSYTKSNLKKITDFLHRERTEKEEAERLKRIAAISLIADVAEKGSGRAAKDKRQYPTMRKLKLAADVYKADIQLLPPRYYELLGKIANEISSQIEPTMNANKELEYADFARERGYVRPELPGLNQEELTEFYSFLGDGCPYLADGKEISRREFNLLLTALCDYDVELYADITGVRRVSYDKSEKLLHGGPKGPGVPPGTENSAQKALRMAVTAVAAQTRGLSASPGVRIPLVLDGAEGKLVHINRTENLLPDVIEQVGSDGKIRRIRQTLGPGLSENDRIRVIAEIPNDCPVIIDSEYCIEISGRENLDIVFLAFAEKLRTGRESALRFSKAEVVNYCNALLQNINCLDEADRIKARIDRTRKKRRAYFKRVLLLRRWIDSYTNPLYQLPVPIVVNQKRFYSDLEDRFILVMLDLFGYGCWHEIVMQIRLSPLFAFDWWFKTRTEDEIAHRAERLVRYLEQDFKQVSDDEDEYSDLPFVQQKRRGPRPKDGSDYEPDDAKPATARKRKQ

SEQ ID NO: 8236 - protein, 1367 aa, Giardia lamblia ATCC 50803
MSEASPQGIQVENLRATLADDLIPNELRDTFNGKLHFYQKETVNFLILRYNEYMRNLDNPDIKSTQQHIKKLTGFIVGHEMGLGKTVMVLFFLRCIIKHPHPVMRPQRIVIVVQKVLIPQWKQEISRWCQAIPLYTYHGSHQQRRQKLMRAKNERVCIILTTYAMISNDGEYIMSVLKDTNPSYSSLLPSVASDSSSSTSIDSISAQPITAVTPNAIGNAETGSTDQVDQELSSSSSFLDPVSEFSWMIKKRSETPGKSAAAEAAHRLKHLSLQSPSEPKPKHNNTNEIIHPSSQLPTLPASQAQTTNSTSVQGNDSNPENLMYLAPPPSSKLPKHCIDILIMDEATAIKNTATKISRGLKSIDAGFKLALTGTPVINNLGELWAIADYINPGYFGNRTQFDKNIAKPINTGELQDATARERFIAQKVRRALKAKLYPILIRRTTADLGSLDVNKITITFWIPLNEVQFILYGSALRAKAFQEIYCNSSNYTKMIYLLHLLRKVCDNPCELSTEDAGFFKGNLEKAILNIKQKATQPQARDGDYLQILEDLQISKASDQDLPQQDPPRLARSSSANDTDIPLINGQPTLSHDMEHVKRTGEMDAVDTPERAGLNEEDSSDNEQDAQEWALARSFDEYIHKSPDHYDLTVRSITALSSKYSLFMELITHIKNNNHRALIFCDYQIIFSMLEHLLSHNDIPYLRLDGTIADVSERDRICKSFNANKRYTALLISIKLGSMGLNLTGANRVILFAPAWSLQVEEQAIARAYRMGQKHNVVVYKLACINTLEEKMVVRQLQKAGIANVTLDDEKHRSVIKKTDLGNLFEFSPSKRLEGQLPENIKHHATSEHVRWTIQQALGSSWCGDEQTEADKELEFVNSLITRDFCIDVSVLDYLHSKANIDKEMDISEQASSQLGASDFDRILSVGLEASSKPEEDNSGGENHANLVFIYIESHRTNYFRSIMVAIFTYCKVRPSNLDDALNAYSKRLRDSIYTMKKNSNHTRTYIPRPFVPFVNPKNLAHVAEWQCYLAWAVLRASIHTADAEAFPPELQDFKITSRERLAFATSDPKIQELYAYFNFQLNSIISHFTIEIKGSLIAEMPDICEICSTNTVEEYVIYLHNLVVSRIKLLMSNKSTFRPTPTYPATLNIICSLCQANKIPLATLIAAYDNPQNWINSRFKQAPQIEKEKKKIPLLWGPMANEFEKVQKSTLTKLLQKMYGHINYAILDTCLLDSKPLDPAGQATTNTISLSDVTTCFEDEIVIMQANDTFSKILSQYRLMSNEVRAVILQDTYQKLCHYQTLLPDNAHHIAPAQFTNLIAVSAPNAPQHTYEPESNVSVREKLQTEAQPSGSNAKGYEDEESIDILA

SEQ ID NO: 8237 - protein, 333 aa, Giardia lamblia ATCC 50803
MHAQHFISKFSTDPQIRLFLLTTRVGGLGLNLTAANHVFLLNPNWNPTIDDQSVERCWRITQTKKVIVYKVFTGGTIEEKIFNRQIYKRLLVSRVLDNASVTSLKLFKSDLFQLFTYNQPDVPINVITKEINVSVSGAKAGEPIQDERREHREKAIRNKVAELFSDDLKKFMKQEGCHKSRVTKEFLTFLRIQQPQNYLKLIDTICEDFCNEKAYVYTSKVEDGPSTGLFAIMGYCDEDEEHSVARPKEVSKEALQTSIKEVVEIACSASSNTVTLYAIKESLQRLKSSTQKDLVDHLFSKASSEELQTHTLLELKDTVARKINLAGVVQGKK

SEQ ID NO: 8238 - protein, 2079 aa, Giardia lamblia ATCC 50803
MKTSLADLLRKPLLRHAFDPHERGSNLSGDRDRQGTVDHGQNHAHCVQTHHSSPSSASGECIKMEPAQSHKNQVDPEDRLQPRSDGPKPPQSQEAGVCLTYQLPYLSFGKRMIKVFPNLNITNAHREFMVLYEFDYRLTEFSLITYLTQKRRAFLSEVDLYAETDLGSPEDVEASQYLILANLISRPRLRGFYRPLNSYYAVNCLLYHDPQPAKTLKTSFLQSLQQQSLLNMRFAAEKREMAATLKQKMLSLTTGNFKLSIVCRHESPLIGKIFGSGLQKYMLPRSQILTTTGKQGSSGVNKYSNLPDFAFKTYTDDMINSLIYMYLRQFENVYTLEDARQKRIFLPPVFLTLLLEITRYELHVMSRLGVDPTVTLETTTNRSTVEAHEISAMLDSILARTNPSDIDPACTVNYSYLFKTDSFAESGSAEAQEALETLIESHPGFTERHKALLYQAELGLKLIEYILKNTGYENNLHFEQRLYDQVHIQYPIELTTQPVSIQHGRLKNYQLDGVKFLVSLYRSSNANLQDLQTGTGSSGCLLADDMGCGKTAQSIAFLAYLSDNRISTGMHLIISPLAVSDSWATEFQTWFPNFSILLYKGDQEQRAKYRRHILTLSKGNISVLTDYGGPAIKDKDSRTASGSAGYSSGDSGKSTNQILSNINAIVTTYEYAIKDRSFFRQIDFDVVIVDEASRVKNARGKLIDVLKKSINCRFRILLSGTPIQNNLRELFTLLGLIHPAVFCDYDRFESIFGQVFSLAHTGRNSDLHHAHHGYHGFRRRASTDSAQLEVSDMRTGASPSLSSVQMQSMQSISTTTSQAVGRRSKRQCGSTAVTFADDLGEDELDSSYSYSNKDSSEDENDNDSELSRVSSVPTEMMVPIGSTASLIGAKTASSLPELTQDLPQNAPITKDNIAEVAIQLAENIDKISGLTNSQKTFIVERLHGILKPFLLRRVKTEVLAQLPPKEEIIIRVPLSAFQLFFYNLAIANGRAMTNPDLASSLPANFIRNLDIYLRCVCNHPFTALEHDKLQLLYNFYLMKAKSFSARHKAENTDFYRQYGGAKEEASKDATASMPPNNFNVLENMYVNDQIWRVSGKLELLDNILAKLHKTSHRVLIFSQFKKVLDVLSSYLHYRQYKFVRFDGSVKDVDRNSMIRGYNREDSKDFVFLLSTRAASHGLNLQTADTVIIFDCDYNGTYDQQAQDRCYRLGQVNPVKVFKLYSNTAIESKMLSVATSKLSLATIVMDAGTYTTNAGDKTDGTAGATVTGGGARKKTKMSTQEYILEVLSANSVVPDDVHIPTSEEINRYLARNDMEFQAFQMHDIETSLYWRKRNFDEDVPRLDPEIPSVFSEQKDQIYEEMREMNLLEDKQEVVMPNMQIPSAESGGKRSHSAGADSNSTTSDYDEDDSLDEGLLASETDTGGSQQRKLVPKVLKKTQSIKKSMSRSLTAQDLSESAVFSLCMQVDKSLRDDPAFRNSIVLSSTIIQKTSVVLTPVVDTPIACFLIDHGHSSGVLFLVSTMVGMADLLRREDAYNNLGACVTQYVSSNLSSLFACFSRQSLVKQSAESVSLAQHLSSLVMAPGFSSPGNAGSGSWDSYLFLTGSESILQTAYTFPLAQQGHPLSTYQLLFTKAALFIMALKLERDVFHNDLLSYLTTDLTNAKKYTGISYSSLLFYFSSGLAVAVEEQSLCAPDLLYSKPSSESAVLNESADTTSLFLRSDRAYTDVYIKLESLPQLSGDIDVIRRGYAWYNGLSQSQRDQQPSYLQYLCNVIDHCRVGAASQDQLDPLPIYVRITTNTERLRYLYSSARSSGVTTDVLRLLYATVSFHLRIMAIFNYLIHLIDPLCAHPSEDSVDVSSTVAGDSEPESGKEDSSKALLTYRILSQFWILPSKTELPSYYHAIPYPRSLAYIYYKLITLSYLSLHEFVADMRQSFKNCLQFNERSSAFCEHAKVCNELTFQQISQHFQYCNASSVISWFTAYERRLSVVKKGYTLLSTFVGCGIYELLSLPITEGPGPFHLEMDGEKCKGLILSYGSGADMAGLCAYDILRYAIAAAKEGESGTGSTVTYPDASVRHVKK

SEQ ID NO: 8239 - protein, 1031 aa, Streptococcus pyogenes MGAS8232
MARLIPGRVRNEGIKLYEQGLVSFQDDNKGILQIEVETYQVQYGADDEDITCQCDTFHMKHYCKHIAAVEYFLKNDQKGKLFLKQLTNQTKIKETTKKITSFGSLFLDSLAMNEDDSVKYRLSALGSRSPFSSDYWWSLKINRLPDDRSYVIRDIKGFLQLIKKEGFYQIGKNCFEQLSWLQFDPSSQDLIEFLWRLASDTDKGDNENIFPNHARHLRLPSGFFEEGIHYLTSLYDFTFEGPSQTYHHLFVRSLEAEAGLYEFKVEVHRKSIELQIAEKNVQYLFDNDYLLYQDTFYHLTLKQRKMVQAIRSLPIEADLAKHIHFDLDDHAKLAASLSDFKQIGLVEAPKSFAIRDFEVTFQFDLLNRDEISCQLMFDYGNYQVSDKASLEALPFASHLKKEEKINRSLLAFGFSPQFYSKKRLTSAKELYTFFEETVPCFERLGNVALSTAIQALQVKEMPKIAIKRNQGLLDISFDFSTIIENDIDQAVTALFQNNPYFVSQTGQLVVFDDETQKVSKSLQELRARQLKNGHLQLDGIRALQVSKLFEGMTSVHFSKELEELAYHLQHPETFSIKPLPVKAQMRDYQRNGVQWLSMLNHYGFGGILADDMGLGKTLQTLAFLASHLKSDSKVLILSPSSLIYNWFDECQKFTPQLDVVVSYGLKQIRDQIIEEGHQITITSYSSFRQDFETYQAFHYDYLILDEAQVIKNAQTKISHCLRAFNTANCFALSGTPIENKMLEIWSIFQIVLPGLLPTKKEFLKLTAEQVSRYIKPFVMRRKKEDVLPELPDLIETNYSNEMTDEQKAIYLAQLRQMQDQIRNSSDVDISRQKIEILSGITRLRQICDTPSLFMNYQGKSGKLDSLRILLTQIKENGHRALIFSQFRGMLDLAKQEMTALGLTSYQMTGSTPANERQEMTRAFNNGSKDAFLISLKAGGVGINLTGADTVILIDLWWNPAVEMQAISRAYRIGQKENVEVYRLITRGTIEEKILELQESKRNLVTTVLDGNESRASMSIEEIKEILGLNTH

SEQ ID NO: 8240 - protein, 423 aa, Staphylococcus aureus phage phi 12
MGLGKTVSTLTAFSELQLLDTKKMLVIAPKQVAKDTWVDEVDKWNHLNHLKVSLVLGTPKERNDALNTEADIYVTNKENTKWLCDQYKKEWPFDMVVIDELSTFKSPKSQRFKSIKKKLPLINRFIGLTGTPSPNSLQDLWAQVYLIDRGERLESSFSRYRERYFKPTHQVSEHVFNWELRDGSEEKIYERIEDICLSMKAKDYLDMPDRVDTKQTVVLSEKERKVYAELEKNYILESEEEGTVVAQNGASLSQKLLQLSNGAVYTDDEDVRLIHDKKLDKLEEIIEESQGQPILLFYNFKHDKERILQRFKEATTLEDSNYKERWNSGDIKLLIAHPASAGHGLNLQQGGHIIVWFGLTWSLELYQQANARLYRQGQNHTTIIHHIMTDNTIDQRVYKALQNKELTQEELMKAIKARIAKHK

SEQ ID NO: 8241 - protein, 1078 aa, Methanosarcina acetivorans C2A
MIILHAGRVGKQFFLWGESPAENETPPVRRGRKPKKPVAKPYPYDSGVENLSSALELLLGSTGRKKAEEINVWIPTAGWNPIPSSPLVAEIPASKAELSLAPWTVHAYPLEAEEAIVLLCACMGKKVLAPGIISGNDLLWWADALKFAGSLVAGQKYLPGVRGGEGEYKAFWEPVFSGEDAGELARLAKQMPPAAKALALETSSVQPEILAAVAARQFIEEALDWIVRSEIGEKELAKEARKRKSFDSVHDAWVSALKSPDGLIHGEEKELLQLAFRTREWQRPLTVLTTSPFRFCFRLEEPAAEEELEETEESEAGKMDTKKGRKGIADIEVPEELWYVRYMLQSYEDPSLLIPVKEAWKPKKGSPLKRYDVKNIRQFLLSSLGQAAGISAGIASSLEAPNPSGYSLDTKEAYRFLTESAADLSQAGFGLLLPGWWTRKGTKTHLKAQANVKGKKLKAGYGLTLDKIVSFDWEIALGDRALTVRELQALAKLKAPLVKFRGQWVEVNDAEIRAALEFWKKNPHGEASLREVLKLAVGVSEKADGVDVEGLNAAGWIEELIRRLKDKTGFEELPAPDGFSGTLRPYQFRGYSWLAFLRQWGIGACLADDMGLGKTIQTLALIQHDLEQVKGQVEEKVIENAEEKVEGLKAAKPVLLVCPTSVINNWKKEAARFTPELSVMVHHGTSRKKEEEFKKEATNHSIVVSSYGLLQRDLKFLKGVSWAGVVLDEAQNIKNPETKQAKAARALEADYRIALTGTPVENNVGDLWSIMEFLNPGFLGNQAGFKRNFFIPIQAERDQEAARRLKEITGPFILRRLKTDTSIISDLPEKMEMKTYCTLTKEQASLYAAVLEDIEETMEEAEEGIQRKGIILSALTRLKQVCNHPAQFLKDNSAVPGRSGKLARLTEMLDVILENGEKALVFTQFAEMGKMLKEHLQASFGCEVLFLHGGVPRKQRDRMLERFQEGKEYLPIFVLSLKAGGTGLNLTGANHVFHFDRWWNPAVENQATDRAFRIGQTKNVEVHKFICAGTLEEKIDEIIERKVQVAENVVGTGEGWLTELSNEELKDILALREEAVGE

SEQ ID NO: 8242 - protein, 948 aa, Leptospira interrogans serovar lai str. 56601
MEEVLQLSLDFEPKSSSGYRGDFCYLTNSPESGIGKIVSSAEGKFTIEFSVSQTKKTVSENSTYLRILPGYPSSLRNVEEYSSLMNLALTAYELKLTHAFDKLSALSNSRTRLLPHQIESTYIVVNSLRPRFILADEVGLGKTIEAALVMKELIFRRGYKKVLIVAPSPLLVQWQQELKNKFNEDFKIVKRKNFHTDGEKNWRNFQHVITSIDFIKNPKYAEEILKTKWDIVIFDEAHRLRRDYHKITRAYLFAEKISKKCECLLLLTATPFRGKLEELYYLMHLIDPNILGPYHTFVNDYILGNKADLKDKISKVLLRRRKVEVGGFTKRFAKTVRIELSSVEREFYEETTNYVRREYNLAMRTQNRAIGFVMIVFQKLLDSSVFALLSALTKRKFLLENKFHHIQKMESNLEEWDLDETEDVEEFVSGLDESVQLDLQSLKRELLSLNRLILLGKKIKEDKKSIKLKETILKLQKEGHSKFIIFTQFRTTQDFLASVLSDFQVTLFHGSLSADAKEKAIVEFKTKTEILICTEAGGEGRNLQFANVLFNYDLPWSPLKIEQRIGRIHRFGQKDNVFIFNFASKDTVAERILEVLTNKIRLFEESIGSSDELLGAIEDELDFNSSFMKFVTGNKSKTEMEEEIDNRIKIAKKGFEKLGALVTPKLIDFNLQDYYSHTLEERSFNNTHLEEFVSRFTKIFPEEAGFQLLRKKPQIYEIDSPQYKGKYGTFDSELALQNDSLEFLAFGHPLIDKTVSYLIQNQKGWSTAFHSVSNKEYYVFLVEFQFTLNRTELFYFETNPNTGSVKQIETLPEELREYNYSVRPSDISSHPELPSRLEENLIRTFISLDEIVESRKKELGDQTLDLFQKEEFKIRTSNQNTLRQLEEKLMRQEAAFKWEGKPEKKSAMNRTRNEIQKVKEDFDRELRKVRNGKTIQHRFQLFQVYLPS

SEQ ID NO: 8243 - protein, 1089 aa, Fusobacterium nucleatum subsp. nucleatum ATCC 25586
MKIDLLDIETQYINNRNLNYAKKHYIELEDGIVRLEITYIDKIDSTFIEMESIIAGYENETSLTINDEGNYECSSCSCGFHNSMEPCGHVWLLAKYVIDNNLEAPYEYEKDEDREETVEKYFEKRSRLIQETIDREWFKEILKKDIIDKLSKIETSSLNLVPSIEFDELNSSRNFPKIKFKIGKDKLYTIRDIYSQIIDAIKNKEFKNFGKELKVSMHYDAFTDFSKKQLDFILKHPNNIIQFKKNMINLDENNMDDFYNTYFDSPSTEIIFQEEDFKTELVIEKNDKDYEIYLKNKFYNPKEKKKEKVQDKSDWRSYRFNYELPFTTKNFIVTKNKIYKYDKKSKIFLYMNINEYEMKLFNKLARESLILSEDKFFEIFSFFQDKLEHFNISEEYLDLIKNYSNKKAKIYLDINSEGYLIFKIEYKNHFINMNLIQIVEIFKILNPDIINNLKNYINSHQKIYEINETMIIVKKSEIDKFIEDIIPLLHTYADIYLSQSIKNFNKTRKINYSVGVKVTSNFLELDFSSTDLDKGEIIDVLNQYRAKKKYYRLKKGEIILMDQEQLEFLDDFIKDFNIKDSDLKKGNIKIPNFRAYQLNVLQNKYMDIEKNQDFNKLFEQKVIEIPSKYKKILREYQIVGVEWMLKLRAMNLGGILADDMGLGKTLQVITYLESVKRERACLIVTPASLILNWENEFNKFNSSVLTLSIYGDRKNREVLLSNLKNEVVITSYDYLKRDMDLYENIDFDTIILDEAQYIKNHKTKVAQAVKKINSKFKLALTGTPLENSLAEIWSIFDFLMNGYLFNYDYFYKNYEKAIVLQTEKRVTERLKNMVEPFILRRLKKDVLKELPEKIEETYYVDMNQEEKKLYQANLIKINETLAQNIDVNTNKIEVLAMLTKLRQICIDPRLLYEDVSSSSSKINACIELIEKSIENNQKILLFSSFTTVLDLVAQECDNLSIPYFMLTGETNKVKRKEMVENFQNEAVPLFLISLKAGGTGLNLTKASVVIHLDPWWNISAQNQATDRAHRIGQEDTVQVFNLITKNTIEEKILNLQSKKKELSDIFVENSKGSFSSLTKEQLLDLFKLE

SEQ ID NO: 8244 - protein, 892 aa, Fusobacterium nucleatum subsp. nucleatum ATCC 25586
MLVEGEDNLYLALYDSEKNLISSYSNLNQNDINNYIENLENEKEFFISWEEKESSNYLKLDKTLLEYLLEKDNFVNSNFETIAKKEIENLSLLIRDNNEIEDRLDIYVEINDNLLIKNNIVGNYIYSQGIFYKIDIEEDSQFPLIDLFQKIDKYELESYCTLILKNYKNIDLKYEDYETIISDEKTAIPQIIIEKIAFDNSLYLKINSIISTMDYEFFTKNQIEAVLTVNELEKKLEISKINLENLSSDMFEIVKVLTKLQKSIGLKSSYYIDNENFIILNEELAKEFVKKELLQLTGKYSIIGTDRLRKYNIKAVKPKISGKFSYNLDYFEGEVEVEIEGEKFSIQQLLNNYKKDEYIVLSDGTNALINREYIEKLQRVFKEEDGNKIKVSFFDMPIVQDLIDEKSFENDFMGSKDFFEGINKLAEENIDYPKLKATLRDYQKYGYKWLKYLTDNNLGACLADDMGLGKTLQAITLISKMHEEKKKKSMVIMPKSLIYNWENEIKRFSPKLKVGVYYGINRDFSSLKKVDVILTTYGTIRNDIESLLKQKIDLLVLDESQNIKNINSQTTKAVLLLNAKKRVALSGTPIENNLLELYSLFRFLNPEMFDSVQKFTNDYIVPIQKYSDTSTIEELRKKIYPFLLRRIKKEVLADLPDKIEKLVYVDMNDEHRRFYEERRKYYYSLLEKNTSSQGNFDKFFVLQAINELRHIVSSPELESKKIISSKKEVLIENVIEAIENNHKVLVFVNYLSSIESICDSLKENKIKYLKMTGQTKDRQNLVDKFQNDSRYKVFVMTLKTGGVGLNLVSADTIFIYDPWWNTTVENQAIDRAYRLGQDKTVFAYKMIMRNTIEEKILKLQEIKNKLLDDLISEDNLSTKNLSKSDIEFILGS

SEQ ID NO: 8245 - protein, 1065 aa, Xanthomonas campestris pv. campestris str. ATCC 33913
MKLRFWKGESPETIPMDAPEFSAESSGWKGTAQEKSTHPGAIYLLQLADERFALKDGAGYLIPWEKLYSLLSDSDHVSSLHLLKLPQTSRLRPAIRSHGTPTDTNFRVTLEAWIAESGEELLAERLGAVLTMPGQDLLLPQSAFTLLEAMAELAQCGEDWDADRRMLQMGKVQEAARWAGATMDRYLEHSPVVVANKLEINLKQHEAAEAQIVEVEPRPIGAPEGWLSQFDRYQSVRGRYDVTDAEGGMSHVVLSSQVREVGQQIKSMPGRRLAGKQADAFMHNPYAVLGEAAAQVISPERFAEAKRTAGIDEWELELQPADVDGSWDAVLVDSVGKSESVFVGSFHASEFDSLLEEASGSEGLGVARWKKHRVLLSGLTLESLARLRQAHFKEAVGSVIGVETLFDLAHYSDRVVGFDGKPIIVPKVQGSSPAEDWIKGAGEFVAVDPATGTATEGRLSTNDVQEFGERVDLAEREGHINVAVPGIEKEIPTPEARAWMKELTKPAGEKRIESLKNPAPAEKLSLRILHNIEELEYPSEETEQARVKDVYEAPAALRPEVALKDHQVEGVAWMQGRMRQRGDGVRGVLLADDMGLGKTLQALTLMAWYRQTAPAPKPCLIVAPVSLLENWKAEIAKFLDGRQGATLTLYGEHLALHRLSAREIGPELRELGVKKALNPGFAHGAAFVLTTYETLRDYQLSMAREKWGVLVCDEAQKIKTPSAMVTRSAKAMQADFKIACTGTPVENSLADLWCLFDFFQPGLLDSLTKFTKVFRQQIELRSEGHEQKVEVLREQISPWVLRRMKAEVADLKPKTELPCELAMSAKQRGLYAAAARRFRETVDSGEGGDTAALSLLHQLRQICANPLAAADDRSEFLSLDEHLRHSPKLAWLIEKLQEIQATGEKVIVFTEFRDIQRLIQRAIASRLSYQASIVNGSTSVEAGADDSRQIIIDAFQAKPDFGVIVLSTTAVGFGVNIQAANHVIHFTRPWNPAKEDQATDRAYRIGQEKEVFVYYPTVLGDGFESFEERVAKRLATKRKLSNDMLAPEQGLTLEEFSDLSLGFSE

SEQ ID NO: 8246 - protein, 967 aa, Xanthomonas campestris pv. campestris str. ATCC 33913
MSTLPAPSSGGVYPSGQPGSHRYSHHQGKFFAHWLTLRSRDESAVARALSAARVDMNPHQVDAALFALKSPVEAGVLLADEVGLGKTIEAGLVLAQHWAQRRRRLLLIVPATLRKQWTQELEEKFQLPSVILESKSFNAFRQLDVSNPFQIEDAIIVTSYEFAASKQKELAAVSWDLVVLDEAHKLRNLYKGKSASKRAVALNEALRGRRKVLLTATPFQNSLMELYGLVSFISDEFFGSQKAFQMQYASGRSSEARLNDLRHRLKPICHRTLRRQVQAEGGINFTKRFSITQDFTPSDEELELYDKVSAYLQDPSILAIKPTARHLVTLVVRKILASSTFAIADTLETIIGRLESNQALTAKQIEDFETVDELSDELDSDGMERQGDAPDSDALQAELFCRAQEIDRLRGYRDLAKQIQSNRKGDALLLVLGRALAMAEKLGGQRKAVIFTESRRTQEYLRVLLEEHGYAGRTVLLNGSNDDVDSRQLYADWLERHAGSTLVSGSRTADMKAAVVEAFRDHRDVLITTEAGGEGINLQFCSLLVNYDLPWNPQRVEQRIGRIHRYGQKSDVVVVNFVNRKNRADQLVFELLEKKFKLFDGVFGASDEILGAIESGVDIEQRILRIYQNCRDAAQIESEFATLQAELDESIGRREESARRMLLEHFDEDVVRNLRSRRAGMLHKINQYESQFLHLIAAERPKARISDKLVKLEEGDYAVSWPPAEEANAGLLRPDKGLGERLCRQAKERPTLPGTLHFDYAAVDAQRADVRQWLGSRGQLRVALVTIQTAEEVLEELVCSALCSDGRVVPDETAARLMEIPARFVPRHRVAEDRALPAFEAAVERVLAEANKRNESWFLQESERLDRWGEDQRLLLQQSIDEFDLQVRDAKRTLRQLETLEQKAQLKREIKRIEQQRDDAMLDFFEGRKRIERSQDVMLERVENALRTQHTVQVLFDVEWTLEHPEP

SEQ ID NO: 8247 - protein, 918 aa, Bacillus anthracis str. A2012
MINQTEVTIRLQHVSHGWFLWGEDDSGTPLSVTSWKRNAFTWHSTSFYGTFLKEATFEGKQGVMLTNAQAFEYIANQPMNSFARIQMNGPITALTKDANELWDAFTSGSFVPDMEHWPKQPSWKVQHTPIEDDTLASLFSSAVNESILQDNRSNDGWEDAKRLYEHYDFTKRQLDAALHEEDWLRKIGYIEDDLPFTIGLRLQEPQEEFEMWKLETIITPKRGAHRIYVYESIDYLPKRWHDYEERILETQEGFSKLVPWLKDGDTFRSELFETEAWNFLTEASNELLAAGITILLPSWWQNLKATKPKLRVQLKQNATQTQSFFGMNTLVNFDWRISTNGIDLSESEFFELVEQNKRLFNINGQWMRLDPAFIEEVRKLMNRADKYGLEMKDVLQQHLSNTAETEIVEEDSPFNDIEIELDGYYEELFQKLLHIGDIPKVDVPSSLHATLRPYQQHGIEWLLYLRKLGFGALLADDMGLGKSIQTITYLLYIKENNLQTGPALIVAPTSVLGNWQKEFERFAPNLRVQLHYGSNRAKGESFKDFLQSADVVLTSYALAQLDEEELSTLCWDAVILDEAQNIKNPHTKQSKAVRNLQANHKIALTGTPMENRLAELWSIFDFINHGYLGSLGQFQRRFVSPIEKDRDEGKIQQVQRFISPFLLRRTKKDQTVALNLPDKQEQKAYCPLTGEQASLYEQLVQDTLQNVEGLSGIERRGFILLMLNKLKQICNHPALYLKETEPKDIIERSMKTSTLMELIENIKDQNESCLIFTQYIGMGNMLKNVLEEHFGQRVLFLNGSVPKKERDKMIEQFQNGTYDIFILSLKAGGTGLNLTAANHVIHYDRWWNPAVENQATDRAYRIGQKRFVHVHKLITTGTLEEKIDEMLERKQSLNNAVITSDSWMTELSTDELKELLGV

SEQ ID NO: 8248 - protein, 464 aa, Bacillus anthracis str. A2012
MNVDISIDRTWQNNFLNRIDEDGPWTNWDLYHLAYETEKSLLVPTFDGLQAPKHLSHFTPLPHQLEVAQNVIEQMNGKAILADEVGLGKTIEAGLILKEYMVRGLVKKVLILVPASLVSQWAYELNTKFFIPAVAQKKSYSWEQADVIVSSIDTAKRSPHRDIVLNLEYDLIIIDEAHKLKNNKTKNYEFAQRLKKKFCLLLTATPVQNKIDEIFNLVSLLKPGHLGNQSNFEEYYASKNRSAESDEDLKALINKVMVRNRRHNTGIDWPKRHVRTIFVEFNEEEQDLYNNIENWRGQDAFTSAFSSLTLKREACSSREAVYYSLKKHVEKRQKENEHYVKDPHIDILMDKINHIPFNSKANKALELIKEIDDKVVIFTEYRASQMYLQWFLQQHGISSVPFRGGFKRGKKDWMKELFQNHAQVLIATEAGGEGINLQFCSHMINYDLPWNPMRLEQRIGRIHR

SEQ ID NO: 8249 - protein, 1089 aa, Methanosarcina mazei Goe1
MIILHAGRVGKQFFLWGESPAENETPVVRRGRKPKTPIVKPYPYDSGFENLSSALELLLGSTDRKKAEKINVWTPTIGGNPVPSSPLVAEISDSKAEPALAPCTVHAYPLEAEEAIVLLCTCMEKKVLAPGIISGNDLLWWADALKFAGSLVAGQKYLPGVRGGEGEYRAFWEPVFSGEDAGKLAKLAKQMPPAARALAPEASSMPPEMPAALAAKQFIEDSLDWIVRSEIGEKKLAKETRKRKSFDSVHDAWVSALRSPEGLIYGDENELLQLAARTREWQRPLTILTTSPFRFCFRLEEPALEEEIEETEETEEIEENEAGKRDTKKGREGIADIEVPEGLWYVRYMLQSYEDPSLLIPVKEAWKPKKGSPLKKYDVKNIRQFLLSSLGQASSISAGIASSLEAPNPSGYSLDTKEAYRFLTESAANLSQAGFGVLLPGWWTRKGTKTHLKAQANVKGKKKLQAGYGLTLDEIVSFDWEIALGDRVLTVRELQALAKLKAPLVKFRGQWVEVNDAEIRAALEFWKKNPNGEASLREVLKLAVGVSEKADGVNVEGLNATGWIGELISRLKDKTGFEELPAPNGFSGTLRPYQFRGYSWLAFLRQWGIGACLADDMGLGKTVQTLALIQHDLEQAKEKAEEKIEEPAEEKIEEKVDGRKAPKPVLLVCPTSVINNWKKEASRFTPELSVMVHHGTSRKKEEEFKKEAMNHAIVISSYGLVQRDLKFLKEVHWAGVVLDEAQNIKNPETKQAKAARALESDYRLALTGTPVENNVGDLWSIMEFLNPGFLGSQAGFKRNFFIPIQAERDQEAARRLKEITGPFILRRLKTDTSIISDLPEKMEMKTYCTLTKEQASLYAAVLEDIREAIEGAEEGIQRKGIILSALSRLKQVCNHPAQFLKDNSTIPGRSGKLARLTEMLDVVLENGEKALVFTQFAEMGKMVKEHLQASFGCEVLFLHGGVPRKQRDRMLERFQEGKEYLPIFVLSLKAGGTGLNLTGANHVFHFDRWWNPAVENQATDRAFRIGQKKNVEVHKFICAGTLEEKIDEIIERKVQVAENVVGTGEDWLTELSNDELKDILALREEAVGE

SEQ ID NO: 8250 - protein, 442 aa, Streptococcus pyogenes SSI-1
MGVRLHEYQEYAKTWIVEHPYCGLLLDMGLGKTLTTLSAIDEIQNIFSEDHKILIVAPKKVAEETWPTEIGKWHFDFTYSKVLGSEGKRIEALETEADIYLINRENVTWLVEYYKTKWPFTFVVIDELSSFKSSKSKRFRALRKVRPKVQRLVGLTGTPAPNSLIDLWPQIYLMDRGARLETSQTRFKDKYFVPDKRNGLIIYSWALRDGAEAEIYNKIEDICVSMKAKDYLKLPPRTNNVVSVKLSNMKAYKQLEADLVLEFKNKEISAANSAVLANKLLQMANGAIYDDDKATVAIHDDKLDALENVVEESQGQPILVFYQYQHDLERLKKRFPQAEELTSVDKWNSGKIPILLCHPQSAGHGLNLQKGGHIIVWFGLTWSLEYYQQANARLDRQGQTEPVIVHHIVAENTVDEKVLRILQGKEKNQNALLEAVKAQLGV

SEQ ID NO: 8251 - protein, 1084 aa, Clostridium perfringens str. 13
MLVEDLLLQRFKEETTGRNYAKGQRIINNDLVESVEIEDEEDLVAVNGIVISEQLFSKYSTKLEIDIRSRGILSTYCTCTDYEKHEFSKENYCCKHLVATFYKALGDLAKKKEFEEDKNLFSKKKENKILDLILQEETDKEELKIEVYINKNEWSNSILAEFKIGTKSMSSNKLYILKDIEQFLVAYYNRIPIKYSKVFTFDIREQKLSTKDRELIEFIESLKEIEKPIKSFLRNRDTFIEGKSIKIPNYLVRDFFRVIKNHRIYLNEGFFYRAVESEVLFEDVPIDFSLKDSKNNFELSSLNGMPKVLGDRADVFLYGTNIYIPKKDFCYKIKNYLDIFSEGKVIKIDKCEEERVFRKLIPSLRDLTENVVLSKNIMNKTVLEPVKFNFYFDKEGKEVTLTLKVKYGSYEFNIFDDCKEKIIYRDIKKEKEVIALIERFSLEEINKKFYFYLGDEYIFRFFKYDVCKLQEYGEVYYSENFKGIKSLGSKGIKGDIKPGRYNYFEFDFKIGDIPSEETREILRAFRENLKFFKLKSGEFLDLEELELKQFLKLLDSVDNGDLEKNCLEINNSRALYIANYIEEKGIRYIKGKKKLNELKSKFKNINKLSFEVPKDLKANLREYQKFGYNWLKTLEHLGLGGILGDEMGLGKTLQAITFILSNKGKKTLVVAPTSLIYNWKEEFNKFAPNLVVEVLNEGKDKREEALRDIESKDVIITTYNLLKRDLEEYKKINFDYCFIDEAQAIKNPDSQNSEAVKEVNSEYKFALTGTPMENSLMELWSIFDFVMPGYLYDRKRFTVRYYKKLNESEEVLSEIHSLIKPFILRRKKKDVIKELPDKIEKMHLVDLGEEQKKVYSIYANNALSIMEKKQDAEEFNKSKIEILSYITKLRQLALDPSVTINDYMGESAKIEALVEILNQGVEEGHKILVFSQFTSVLKNISSRLKEEKISFSYLDGSVSSKKRINMVNEFNEGENSVFLISLKAGGTGLNLTSADIVIHFDPWWNPAVENQATDRAHRMGQKNVVEVIKLIAKGTIEEKVVALQEEKKELISKIIEEGELGAGSTFNTLSEEELMDLFKVDYLG

SEQ ID NO: 8252 - protein, 1034 aa, Corynebacterium efficiens YS-314
MTSHLLHGLWIKDRGLQLWIEQVEGHRIVLPEAVPAGTFPPVVDRILEGRTFRARMNVQLRTPKGRQVALPTPTAAFTPEEAVTVLAQLSFLQAELPAATRAQRETIAADLRWIITMHQGLTRFVQAGRVTLRTVMMDNAWWPQWQLAASLSERGWLAEMNNAAPGILLKNGGRDLAGTMANELPHWIANRILSDYRDEVLPYARHEFLDALLYNRPLRKGSTTLTHALNQWKNTISSAALQLVIIVEEPPAESDYEDPMDSIWPVRLMVRSGVDAPQPIQKHSLDTGGLESLRQQFETAKTISWLLDPARDDAIPAHEHNTVPTGDWDVFLNTAEIIDFIGHDVAKLKKAGITVMLPKAWSAYETRAKVEARTPGDPADSSTQSIIGLDQLVEYDWKISVGEVELTDDEMRELVESKTGLIRLRGDWVMADQDALRRITGYMDELSKSSRKRAKAEMEEAAMQAQLAEASGAEGWQLLAARAEELRQRFNEQFSGDGTGEVTLQELREIALKAAENEPVEFTGSQWYTSLLGGTETPAPRRVDIPETVTADLREYQRRGVDWLYWMSENNLGAVLADDMGLGKTLQLLSLLAVERAEHPDREPKPTLVVCPTSVVGNWAVEAAKFVPDLKVVVHHGPQRENGEAFLEKARRADLVVTSYGVVTRDFKLLGDVTFDRVVLDEAQAIKNSSTRISKAVRSLPSRHRVALTGTPVENRLAEMRSILDFCNPGVLGSASFFRNHFAKAIERDQDDEMTERLRQLTAPFILRRLKTDTAIIDDLPEKSEQIIRVDMTAEQASLYKALVDDVQQQLSQRQGMSRKGLVLATITRIKQICNHPAHFLNDGSPLTLRGRHRSGKVEALMDLLDDAVAQERRMLIFTQYTAFGQLLAPYLSDRLGVDIPFLHGGVSKLGRDRMVARFQAGDGPPAMILSLKAGGTGLNLTAASIVVHMDRWWNPAVENQATDRAFRIGQKNNVDVYKMITAGTMEESIQDILDGKMHLASAIVGEGEGWITELNPEELAALMSYREREGADV

SEQ ID NO: 8253 - protein, 886 aa, Corynebacterium efficiens YS-314
MDRTHLQTQLTAAQQHLNRAQQAQEVLRSLELPARVHIHRKIGFGEPDQSRIVLLRDADLDWSANFYTRVALDGLGAEEQLRRYLTATAVLPGLMETARAGTGGFLRRLFNPESIRRGEAALADLTTRVADLDRQLPGITPLIDTSTTATTTQRGGVHLFPGAHPVGQRYIDAARAEIARQLGEDAPGFHQWDGHHLASVHRLVHTYASDPNSQVRLRAEAERALSQINRQRVEILLEQLPVDALRTATNHRLRFGSLDTIGISTVADVLRASESLLATAQGIGHQTARHMKAAAQTLQQEALGRNTVLIGDTPTQAAVALIRILARFEQADALSPAERERRNRVIDYIQQLPAISATDTAGWIVVGAGPDQGDAAWNRITDDLAWVSANPNLFHPQHITPPPADIWDDYLTRPAHYQGLLATLLGREIEGVDEHLDTTVLQRIRELELDTTHLRDLHLRGYQSFGARFTVVQKKVLLGDDMGLGKTIQAIAVAAHLTAAEDTFRTLVVVPASVIVNWVRECRRFTDLPVFVAHGQDKEAAVTAWADTNGILICTYAGTRSLDIPAPGLIIADEAHMIKNPQSKRSQACARLIDAADYALLMTGTPLENKVSEFVALIRYVQPELITRGMSAMSAGDFRARIAPAYLRRNQTDVLDELPERTDSIDWIELTPADRVAYDDQVRAGNWMGMRRSAMLAPKPSATSAKMKRIIELLDEAEEHGRKTLIFTFFLDILDELEHVLGARVIGRIDGSVPAARRQELVDALADAPAGSALISQITAGGVGLNIQSASQVIICEPQVKPTIEQQAVARVHRMGQTATVNVHRLIGDDTADERMLEILAGKTQIFDVYARLSDTAGTPDAVDITEAQLAASIIDAERARLGLED

SEQ ID NO: 8254 - protein, 452 aa, Staphylococcus aureus subsp. aureus MW2
MAIDFKPHSYQKYAIDKVIDNEKYGLFLDMGLGKTVSTLTAFSELQLLDTKKMLVIAPKQVAKDTWVDEVDKWNHLNHLKVSLVLGTPKERNDALNTEADIYVTNKENTKWLCDQYKKEWPFDMVVIDELSTFKSPKSQRFKSIKKKLPLINRFIGLTGTPSPNSLQDLWAQVYLIDRGERLESSFSRYRERYFKPTHQVSEHIFKWELRDGSEEKIYKQIEDICLSMKAKDYLDMPDRVDTKQTVVLSEKERKVYEELEKNYILESEEEGTVVAQNGASLSQKLLQLSNGAVYTDEEDVRLIHDKKLDKLEEIIEESQGQPILLFYNFKHDKERILQRFKEATTLEDSNYKERWNSGDIKLLIAHPASAGHGLNLQQGGHIIVWFGLTWSLELYQQANARLYRQGQNHTTIIHHIMTDNTIDQRVYKALQNKELTQEELMKAIKARIAKHK

SEQ ID NO: 8255 - protein, 1034 aa, Corynebacterium glutamicum ATCC 13032
MTSHLLHGLWIKDRGLQLWIEQVEGHRIVLPEAVEKGTFPPVVEQILDGKTFRARMNVHLRTPKGRHVELPTPTAAFTPEEAVTVFSQLSFLKAETPAATRAQRDSIAPDLWWLIVMYQGLARFVQAGRVTLRTVMMDNAWWPQWQLSASLSERGWLAEMNHAAPGILRINGGRDLAGSMSNELPHWIANAILRDYRDETMPYARHEFVEALLFNHSLRKGSTMLTHALNQWKNTITSASLQLVILVEEPPAESDYEDPMDSVWPVRLMVRTGVDAPQAIQKGSIDSGGMEQLRSQYETAKTTSMLLDPAREDAMLGHMVDIAQNGDWDIFLTTEEIVNFISHDVAKLRKAGIPVMLPKAWSTYETRAQVEARTPNDAADSSTKAIIGLDQLVEYNWRISVGDIQLSDEEMRELIDSKTGLIRLRGDWVMADQDALRRITSYMEELSKSSEKRARTEMEKVAMQAKLAEANGEEGWQLLAAKAETLRKEFNEKFSGDGQGEVTLAELREIALKAAENEPVEFTGSQWFNSLLGGTETPAPVRVDIPDTVLADLREYQRRGVDWLYWMSANNLGAVLADDMGLGKTLQLLSLLAVERAENPELERGPTLVVCPTSVVGNWAAEAAKFVPSLKVLMHHGPQRLNDADFLSQSKGMDLIITSYGVITRDFKLMGQVGFERVVLDEAQAIKNSSTRVSKAVRSLPSRHRVALTGTPVENRLSEMRSILDFCNPGVLGSASFFRNHFAKAIEREQDDTMTERLRQLTAPFILRRLKTDPNIIDDLPEKTEQIIRVDMTTEQASLYKALVEDVQKQLDERQGMSRKGLVLATITRIKQICNHPAHFLGDGSEVTLKGKHRSGKVEALMELIDTAVKEERRMLIFTQYAAFGRILAPYLSDRLGTNIPFLHGGVTKPGRDRMVAEFQSEDGPPAMILSLKAGGTGLNLTAASIVVHMDRWWNPAVENQATDRAFRIGQRKNVDVYKMITVGTMEESIQDILDGKTHLASAIVGEGEGWITELNPEELAMLMSYREKEGADD

SEQ ID NO: 8256 - protein, 892 aa, Corynebacterium glutamicum ATCC 13032
MAESNAMDRAQISALLDRAQHTINLAEQANNVLRLLKTPGTATVGDNGTLGTDTYLIPSRNITWPDNLYVNVFLDGMNAEATLTDYVASVASIPRLCQIINEGQGGMFRRLFNPTKVQAGDQAVFDLMVKLDEISSTTHEVSRMLEGVHAARTRQQQGVALFPGIHGVGERYIERAQQVLASALGIAGFGAEPWDGHTLAQARRVVQRYAQDPNSEYRLKSEAEKHLTSINELRVQILLEQLPVDALRMATDHRLRFGSLDSIHVATVADVLKTHTSILTTVQGIGAQTAGRMKAAAETLKQEALRRQNTSIGDEPTQPAMRLINVLARFDQTETITPEERARRTRVIDYVEHIPPSLDPYIVINPATPEFNNFTDDLRWIDANPNLFHPQTITTPPADIWDDYISRPAHYQGLLATLLGRDIEGADELLDATTLQKIRDLTLDKTHLTDLHLRGYQSFGARFAIIQKKTLLGDDMGLGKTVQALSAAAHLAATEKDFRTLVVVPASVIVNWTRECKRFLNLPVFIAHGDNKQDAINAWSNTNGIAICTYDGVRTMDIPAPGLVIADEAHLIKNPSTKRTQALRKLIDAAPYTLLMTGTPLENKVEEFVNLVRYIQPELITRGMSKMQAENFRERIAPAYLRRNQADVLDELPERTDSIDWIDLTPEDRSAYDDQVRQGSWMGMRRSAMLSPTPRLTSAKMQRILELFEEAEEHGRKALIFTYFLDVLDELEKHLGERVIGRISGDVPATKRQLLVDALSHSKPGSALIAQITAGGVGLNIQSASLCIICEPQVKPTIEQQAVARVHRMGQTATVQVHRLIGDETADERMLEILAGKTHVFDVYARLSETAEIPDAVDITESQLAARVIDEERARLGLTESTGPKDEETALS

SEQ ID NO: 8257 - protein, 999 aa, Thermosynechococcus elongatus BP-1
MAIFHGTWLPEPAPQFFIWAEEWRSLAQAITPWAPPAIPVYPYATQRKTPLRKTARPSATYVALPAQIQGHQLLPPPLAEVQGELLFLWQVPGWSIPASEVLEQLHQLSLHGQDSGSIGDDLRYWLHVSRWLLDLIVRGQYLPTPEGWRILLTHGGDRDRLRHFSQLMPDLCRCYQADGTALQLPPHAADLLADFLQHTLQGYLHTALADLELPKVGLAKEHGHWLAFLKTGQTPELPPPLIERLHRWQEPYREQLHLRPQWRLALQLVPPDTADGDWHLAFGLQTEGETDTMLRAAEIWQCTQEALLYQGQVLWQPQETLLRGLGLASRIYRPLDRSLQERSPVALTLHTTEVYAFLQSAIAPLEQQGVAIILPPSLRRNSAQHRLGLKIIATLPPPATNGLTIDSLMQFQWQLQLGQHPLSEADFDQLRRQGTPLVYLNGEWVLLRPQEVKAAQEFLQSPPKTQLSLAETLRIATGDTVTVAKLPILGLDTNDALQTLLDGLTGKQSLDPVPTPQEFCGELRPYQARGVAWLSFLERWRLGACLADDMGLGKTIQLLAFLLHLKETGRAYRPTLLICPTSVLGNWLRECQKFAPTLRAYVHHGSDRPKGKAFLKKVETHDLILTSYALLQRDRTTLQQVLWQHLVLDEAQNIKNANTQQSQAARELSAQFRIALTGTPLENRLLELWSIMDFLHPGYLGHRTYFQHRYVRPIERYGDTTSLNALRTYVQPFILRRLKTDRSIIQDLPEKQEMLVYCGLTLEQMQLYTAVVEDSLAAIENSQGIQRRGNILATLTKLKQICNHPAQYLKQEDYAPDRSGKLQRLIEMLQALQEVGDRALVFTQFAEFGTHLKTYLEKALQQEVFFLSGRTPKAQRELMVERFQHDPEAPRVFILSLKAGGVGLNLTRANHVFHYDRWWNPAVENQASDRVFRIGQARNVQIHKFICTGTLEEKIHEQIEQKKALAEMIVGSGEHWLTELNLDQLRQLLTLDKERLITL

SEQ ID NO: 8258 - protein, 1032 aa, Streptococcus pyogenes MGAS315
MMARLIPGRVRNEGIKLYEQGLVSFQDDNKGILQIEVETYQVQYGADDEDITCQCDTFHMKHYCKHIAAVEYFLKNDQKGKLFLKQLTNQTKIKETTKKMTSFGSLFLDSLAMNEDDSVKYRLSALGSRSPFSSDYWWSLKINRLPDDRSYVIRDIKGFLQLIKKEGFYQIGKNYFEQLSWLQFDPSSQDLIEFLWRLASDTDKGDNENIFPNHARHLRLPSGFFEEGVHYLTSLYDFTFEGPSQTYHHLFVRSLEAEAGLYEFKVEVHRKSIELQIAEKNVQYLFDNDYLLYQDTFYHLTLKQRKMVQAIRSLPIEADLAKHIHFDLDDHAKLAASLSDFKQIGLVEAPKSFAIRDFEVTFQFDLLNRDEISCQLMFDYGNYQVSDKASLEALPFASHLKKEEKINRSLLAFGFSPQFYSKKRLTSAKELYTFFEETVPCFERLGNVALSTAIQALQVKEMPKIAIKRNQGLLDISFDFSTIIENDIDQAVTALFQNNPYFVSQTGQLVVFDDETQKVSKSLQELRARQLKNGHLQLDGIRALQVSKLFEGMTSVHFSKELEELAYHLQHPETFSIKPLPVKAQMRDYQRNGVQWLSMLNHYGFGGILADDMGLGKTLQTLAFLASHLKSDSKVLILSPSSLIYNWFDECQKFTPQLDVVVSYGLKQTRDQIIEEGHQITITSYSSFRQDFETYQAFHYDYLILDEAQVIKNAQTKISHCLRAFNTANCFALSGTPIENKMLEIWSIFQIVLPGLLPTKKEFLKLTAEQVSRYIKPFVMRRKKEDVLPELPDLIETNYSNEMTDEQKAIYLAQLRQMQDQIRNSSDVDISRQKIEILSGITRLRQICDTPSLFMDYQGESGKLDSLRILLTQIKENGHRALIFSQFRGMLDLAKQEMTALGLTSYQMTGSTPANERQEMTRAFNNGSKDAFLISLKAGGVGINLTGADTVILIDLWWNPAVEMQAISRAYRIGQKENVEVYRLITRGTIEEKILELQESKRNLVTTVLDGNESRASMSIEEIKEILGLNTH

SEQ ID NO: 8259 - protein, 440 aa, Streptococcus pyogenes MGAS315
MRLHEYQEYAKTWIVEHPYCGLLLDMGLGKTLTTLSAIDEIQNIFSEDHKILIVAPKKVAEETWPTEIGKWHFDFTYSKVLGSEGKRIEALETEADIYLINRENVTWLVEYYKTKWPFTFVVIDELSSFKSSKSKRFRALRKVRPKVQRLVGLTGTPAPNSLIDLWPQIYLMDRGARLETSQTRFKDKYFVPDKRNGLIIYSWALRDGAEAEIYNKIEDICVSMKAKDYLKLPPRTNNVVSVKLSNMKAYKQLEADLVLEFKNKEISAANSAVLANKLLQMANGAIYDDDKATVAIHDDKLDALENVVEESQGQPILVFYQYQHDLERLKKRFPQAEELTSVDKWNSGKIPILLCHPQSAGHGLNLQKGGHIIVWFGLTWSLEYYQQANARLDRQGQTEPVIVHHIVAENTVDEKVLRILQGKEKNQNALLEAVKAQLGV

SEQ ID NO: 8260 - protein, 1087 aa, Clostridium thermocellum ATCC 27405
MDIFNINEKIILRHASNNETYKMGLLYNLNHRVRRFEFDNDKLVINAVVRGSEDYDVSIYFNECGDICDYECTCPAYYSYSGACKHIVAVMKMAQSELLKYKYYKYDNYGDSKKQGKNTIEDLFAFFDGLLDEHTKQEVQIEVSYEFNRDYFSSYISSVELRLGIGRLYIVKNMKEFLDHIYTNTPLEFGKNFTFDPAKHTFSEGDQKIINILMEIYENEKHLEQRLKYTYQSMPSAFFDKKVLLSTPYLLRIFDALKNRNFYAKVLDYGEKLVSIAEEDLPLDFSLSRKNNEVLLHLKESRSFVPLTEKGVYFYYNGRIYRPSEKQQKYYIPFISRLLGGKTDTLTFSAAQTERFVSEILPHIHKIGRVSIDKEIEDKLVKEELVAKIYFDKYKEGISAVINFHYGQLVVNPFSGQNYISDPDKIVVRDTESERKIIEIFEAAEFLVDKNIIYLTDENKLFEFLRNDLPRLQELAEVYYSDAFKNISVRFPPSFSGGIRINQASNMLEFSFDYGDIDKSELEHIFSSIKEKKKFYRLKDGSFLSLDLPELKSMSNLVEQLDIKVKDLSKKVIELPKYRAMYIDSLLREANMNGIERSLDFKHMVQNIKEPGDMDFEIPEKLKNILREYQKVGYKWLKTLAYYGLSGILADDMGLGKTLQVIAFILSEKNKAAAPSLVVAPTSLVYNWQEEVKKFAPELKVLVISGSVSERHEKFEKIKDADIVVTSYPLLRRDIDLYRNIKFQYCFLDEAQHIKNPNTLNARTAKQINSEMNFALTGTPIENSITELWSIFDFVMPGYLLSHSKFVKKFETPITKHSDQNALNELGRHIRPFILRRLKKDVLKDLPEKIETKIVCEMTTEQKKIYLAYLKKAKAEVAMELQTNGFEKSQIKILSLLTRLRQICCHPSLFIENYSGESGKIQALEEIMTDAFDSGHRILLFSQFTSMLEIIKQFLDQKSVEYFYLDGSTKAQDRVEMVKAFNQGTGKLFLISLKAGGTGLNLTGADMVIHFDPWWNPAVEDQASDRAHRIGQKNVVQVMKLITQGTIEDKIFELQQKKKEMIDSVIQPGETFLSKMSESEILELFEL

SEQ ID NO: 8261 - protein, 452 aa, Clostridium thermocellum ATCC 27405
MGCSAPDGNGLKSTGKTLVSIAIIGALLAAGRIKRVLIVAPLSILGVWEDEFKRFADFPYQLIVLNGTIQKKIQQLRFLTGEGVHVVVVNYESAWRMEKELANWHPDLIIADEGHKIKTHNTSVSKAMHRLGLLARYRLLLTGTVITNKAIDVFSQYKFLDPRIFGNSFYAFRNRYFNMVGYGNHTPVLKKSMEQDLMKRIHSIAFRATKAECLDLPETTDIIRHIELEPVTLKKYKELVKQSYTELSAGEVTATNILTRLLRLSQLTGGFIGSDDGGKIEQVSDAKLKALEDILESSIQEGHKLVVIARFIPEIHAICRLLEKKNIGYACIYGATKDRQEQVNRFQYDPDCMVFVGQIATAGLGITLTAASTMVFYSLDYSMSNFEQTKARIHRVGQKNGCTYIYLIAKGTVDSKILTALRNKADLAKMLIDDYRKGANPFAPEGGESYER

SEQ ID NO: 8262 - protein, 375 aa, Clostridium thermocellum ATCC 27405
MKQLNAPYNLLICQKSKIKDWEEHFKDYYNLQIIIFKNQSIESIPQNSVIIINYDLVWRRKQLQKLKDFTLILDESQYIKNETSNRAKFILSLNPANIILLSGTPTGGKYEELWSQLRLLGWNISKSSFYNHYTITEKIDVGGFKIPVVKGYKNVDRLKEKLKSYGAVFMKTEEVFDLPEQIEQVVTIENSKEYKKFKKDRVITIDGETLAGDTALTKLLYLRQLTSIYNSNKHQVLKDIFESSNDRFVIFYNFKREFEIIKNICFKIDRPISYINGDGTDLENYENKSNSITLVQYQAGASGVNLQKANRIIYFSLPLSSEFWMQSKKRIHRIGQNRTCFYYYLITENSIEEKILEVLKQRRDFTVELFEKEML

SEQ ID NO: 8263 - protein, 1038 aa, Trichodesmium erythraeum IMS101
  unsure (1)..(1038): unsure at all Xaa locations
LDNPDFLVDAKTIWENPVASLNYQGKTIKLPQETLLKGLGLASRIYPIIEPSLQEATPQYCLLTSQQAYDFIKSGSGRFIDSGLGVILPPSLANREGWASRLGLSIQATAPKMKKTEKLGLKSLLNFKWQLSIGGHKLTKAEFEKLVSQDSPLVEVNGEWVELQGQDVRAAKNFFASRKDQMSLSLEDALRLATGDTQTVEKLPVVNFEAGGQFQELLDTLTNNRSLEEVSTPENFRGELRNYQARGVSWLSFLERWGLGACLADDMGLGKCVLHDTEIYVNGMVMEAEQIWQAYAGEAEFDGEGFWTEPNKELLVNSLDETTGKIVFARIRRLYRQWVREKLRKVRLKDGSSITITCRHKLFIRDSWKNDFQVGDDVCVPAKLMWDGKPEDPDVVKFVAWQVAEGWERVNSGMFGVSQKGKDVLEGLLEVFSRLGKRYDIKINCPKVVAHGSKKNCYEFSAHSLEYRKFLEEKRYGWGKRSHEKTIPLFIMQADLDSVRVFLSNYFDAEGWVNKTVRCVEISTASSQLIQELSILLRRFGVWMKISPQQKCATNGTGVFCTYYIGTFGGNSARCFLQEIGFNDSGKQENLKSICEKIADSNVEGIPASDIVAELVEKTQLPVGSLGIQDPIYMDGCQDFSPTSLEKVINSIEDIISGAGEEEYGQLKSSKLRNKTLEAYSLLNILELEIYKTRLQKLLNQEVYYCQIESIEEMEYEGWVYDFEVSKYHNFVANNIICHNTIQTIAFLLKQQEQKALKGPTLLVCPTSVLGNWEREVKKFGPTLKAIVHHGDKRAKGKGFATAVKDTNLVITSYALLHRDEKILETIKWQSVIVDEAQNIKNPEAKQSQAARKLDASFRIALTGTPVENRLSELWSILDFLNPGYLGQKQFFQRRFAIPIEKYGDTSSLQILRSLVQPFILRRLKTDKDIIQDLPEKQENTIFCPLANEQALLYQNXXXXXXXXXXXXXXXXXXXXXXXXXXXXXXXXXXXXXXXXXXXXXXXXXXXXXXXXXXXXXXXXXXXXXXXXXXXXXXXXXX

SEQ ID NO: 8264 - protein, 153 aa, Trichodesmium erythraeum IMS101
MGKGLQPYLQKSLGREVSFLYGSTQRSKREEMIDQFQLDPQGPPVMILSLKAGGTGLNLTRANHVFHFDRWWNPAVENQATDRVFRIGQTRNVQVHKFVCTGTLEEKIHDLIESKKELAEQVVGAGEKWLTELDTDQLRNLLILDRNQVIKEE

SEQ ID NO: 8265 - protein, 653 aa, Mycobacteriophage Barnyard
MTSSTATRTLRMRMGKHSQKPLIWVTFAYDPEVTEMLKDTVQGIRWVRKDGMWTAPLDMETARDIRAVCRHFGGTLKIEPELGVWATKEKQRLANLLKPDDMVGDHDKLLPYLRQHRPEIVKAMADRKPWQIPGAAFVVSQKEVVIADQPGLGKTLQVIAALLEMQTRGAILVVAPKTAVEVTWPDEIARWIGPNENVFVINSEAKPDERKARVLRAKALAEQGERVWVLTGSSYIRIKAEFDDYGNYLRDEKKQKIVRAVGHTVADLFRMSFSAVIVDESQEVLACSTGNKKKWSAQRTGMGALDIVPGAPRIAISGTPFRGKTENIWGTLNWLAPKKYTSYWKWVRRHYGVVDNWDSGEAHMEKGDTIRDEKRFFSELRPILIRRTHAELRRQGFITGEKLYGGTPLDPNDPKSPVAVWLPLTPKQQKQYDQILKDAVITLESLAGEKDEVVVNGSLAEMVRLKQVAGSALGLDVKPELPSNKIEWIKNFLSERISAGTKTVVASQFTQFLELLSRECDKAGIRHYLYTGKTVGSERARIKHEFQSESGEMVVLLNTKSGGLSLTLDAADDVVVCDQTWIPDDQEQVENRAYGRERDHNVNIWNLCSLGTIDEDIAVLNLQREGDIFAVLDSARGVSYVKQLVSMTQDRAA

SEQ ID NO: 8266 - protein, 1394 aa, Bifidobacterium longum DJO10A
MSKGYGVFGHVPDNADDDGLLPYEDDDSGVSWGHALRRRNPWKRGDDEDADYDDGRYDIDDTDDTNGGRGIYAGKSGGVGGISGETGGILGSSGAAGSRDVTFGGTDSLSAADAVMPYRFRQGRSVWFDDEDEGHFAGSAKRAEAHAVPILALRNDVESSSSNAVLARARSIARKAATMVINPVYSENHRTGYAELDGILRGTTSPSSRYRTSVQFDLDTGEAVGGKCSCPAYGRGYGMCKHMIALAFIFCDDPQRFEGYRAGAARPSRTLIDYMEHADRQDAQAKIRRRNAVMRRFDATQGKNGANARRTKSGYGSRAGTRGGGYQGDSETVGLGQVQLVPILSFIDGVWSVEFKIGSASNGSSYVLKSIPQFVLAMANGDYADYGQKLAFIHTPDMLDDDSRPLLDVLDDAMAVRRAAEQQDRYYGHIAIDRHLTLSAPEVARLLSVREGRGVQLVLNTWFSGQPASVPVDGGEPDFLMRIARRDFNTYGPDAGYLLTGVPAVETVIDGGKNVWLLLASTNPAGAVSAMVAGSQRKSAAGCRFVRCPKRLIPLRGLLGDLFEPDGEGQVIAGDDIALFARTLLPQLVGAGLLEASEIPRELAELSPTECSLQFYLDRDEHGVQCEVKARYGDAIVPLLPDGPTVHAEGERSIPLSRGVIGRDFDAEHLAIDVVREFFTMPDQRKRVAAATHQTVNGFRTPAARKATKKFVSDAATIDRDDTTQIVRLFDEGLPALKEVGEVFTTPAFDRLIAPKPPSVKVGLSIKGNLVEISPLADEVPPDEVGALLSSYRRRQRFHQLKDGTLVKLSGANLSTLDRLASDLDLSEQQLNSGLIELPGGRAFLLDGELPDDGSDVVKDASFTEYIDDLKIIDPKSYEVPDSLKHILRPYQVEGFQWLNTLCDKGFGGILADEMGLGKSVQLIALLLSRYQRNAGEMGDGSLGPSLIVCPASLVYNWGAEFTKFAPSFNAVVVAGTKAERRTAIGRAFRADEPTVLITSYDLLRRDVDDYTANEQRFNVMALDEAQYIKNHTTKIAKAVKAVAADHRFALTGTPIENRLSELWSIFDFLMPGLLGSYKRFHERYELPISNARAADGSTAEGRAAAQVNPEAARVSRQLQSLVGVFIKRRLKSQVLTDLPDKLETTLTVRLAGEQRKLYAAHEQRLRMQLEHSEEADFNTSKIRILAELTKLRQICCDPRLLYADAKDQSAKLAAITELVETCVNEGKKALIFSQFTSFLDLIAERFDAQGLRYYTITGSTPKKKRLELVDQFNADDTPAFLISLKAGNTGLNLTGASVVIHADPWWNAAAQDQATDRAHRIGQTEDVNVYQVVAKDTIEERILELQHTKSELARQFTDASLLADEAGTGASALTEAPASIATLTKDDLLNLLG

SEQ ID NO: 8267 - protein, 880 aa, Pseudomonas syringae pv. syringae B728a
MLEDSSPQIIRTACRGSGLEIYTQTLLFKDPDRYKNYLTCKCTCPVRNDCKHCVAALLFLQDPHNRPLLQAALASHQQEMEKPVEQKPRLPERLIDDLQPRPRLILASIEFSAYEPRNGRMQRHIQHRAALAFAYGKHYAVGTTNVSILVSSLGSDLVNQKSDIIEHTDTETLRIRRQGERERQLRQELADLGFKVATRQSKALPDSAGDMYELPNDKAWLHFVLDDLPRLREQGWEIDIQEEFGFDVTPVEDWYAVIDEENERDWFDLELGIIVNGERLSLLPILINLIRSHPELMSPSAVAKRGDEEQLLVQLNHFTQSGGSPVQIALPYGRLKPVLATLGDFYWRQEGNNALRMSKADAARLTQLEDLPLTWQGGDRLRHFAERLINIKDAPVSLPDGLNATLRPYQLEGLSWMQSLRELEVGGVLADDMGLGKTLQTLAHLLMEKQAGRLDRPALAVMPTSLIPNWLDESEHFTPDLKVLALYGANRHQDAGNLQDYDLILTTYALLPRDLELLEKQPFHVLILDEAQYIKNPNSKAAQAARNLNARQRLCLSGTPLENHLGELWSLFHFLMPGWLGNSKEFNSNYRTAIEKHGNQDRLHHLNARIKPFLLRRTKEQVATELPPKTEIIHWVDLNDAQRDVYETVRLAMDKKVRDEITRKGVARSQIIILEALLKLRQVCCDLRLVNQDMPVNSKQGTSGKLNSLMEMFEELLAEGRKILLFSQFTSMLSLIEEELKQRGIAYALLTGSTRDRRTPIHDFQSGKLPIFLISLKAGGTGLNLTAADTVIHYDPWWNPAAENQATDRAYRIGQDKPVFVYKMIARGTVEEKIQRLQREKSALASGVLDGRTTGDWKLRDEDLQALFAPLPAAPKKTRK

SEQ ID NO: 8268 - protein, 650 aa, Pseudomonas syringae pv. syringae B728a
MASAQLMNKRPVLLRKAIFDGYDFGLSLSYLQGANKLLLRRRGFFIRRSDHPLNQFWRVPKDKLLDDLDVLYRELAELADGKHIESWQAFRDRITSAQSDVHRDAFTWGMKFRLAPLAEGGVILSGDFHPGAVAIAKRMRGVFLSAGKAWRVQGTPELVRSNLILELGLDEDQFEILDTLQELLADGSVKAVNEVTSISLGGHSPESTKSEEEVSDSGIYLASVPSIKNTELTSADIDKALEGFSLMDHQPAGIKHLLQRTSALLADDMGLGKTRQAVIAAGIRAQGKPVLVIVLNSLIINWQREILMVFPQAQIAMQTFDASAGWIIVNYERLGDFVMHASRFAVMVIDEAHRLKEPTAAWTRHGFDIAAQVQNRYLLTGTPVLNREAELHTLLRLSGHPIGQLPLNEFCERFAGSPEFRKTLRDEISDWMLRRRKDVLPNLKGKQRQTVPVILSQIERDEYNQIMRSDQHRFARLGALRQLLERVKVRILADLMAELDVDDKVILFCEYQESVATLREHCIKMGVGCVTLVGSDSPKKRQKAIDAFQQDPDCRVFIGTRSAAGTGYNLTAANYVFFLGLPWTPGLQDQAEDRAYRNGQLRMVVVKIPLAEDTIDQQLWQMLMDKRALASDLIDPEAEESSKKALAEIL

SEQ ID NO: 8269 - protein, 896 aa, Pseudomonas fluorescens PfO-1
MPPPLSKPLASSWVSRFKEQSLERGRRYALENRVRFVQVGDATITASCEGSGGNVYRQTIHLRESAKGTLLMVDATCTCPVHSNCKHCAAVLLQVQETLEYPAAAKDAELLEKLQAVLENRSPKSPPQVLVDNVQPVPRLWLASVEFSAFEPRNGKMQRYIQHRAALSFSYLDEYVSGQKNSDILIRQEAQTLRVKRHPDVEQSYREQLRILGFRIATRQSKALPESAGELYEMVNDSAWLTFTLNDLPKLRTQGWELLVDDEFGFDLTAVDDWYATVEQTPERDWFDLELGIIVNGERLSLLPILLNLMRSHTEILNPERLARRRDDELILVNIPQRNSEHGPLQVALPLGRLKPVLATLGEFYLQEPGETTLRLSKADATRLNSLEGIPLLWEGGEQIRSFAQRLRDIRDYSAKAPKGLNATLRPYQLEGLSWMQSLRQLEVGGILADDMGLGKTLQTLAHILSEKNAGRLDRPCMVVMPTSLIPNWLDEAAHFTPQLKVVALYGASRKKHFEHLADYDLILTTYALLPKDVERLAQQPLHVLVLDEAQYIKNPNSKAAQAARELNARQRLCLSGTPLENHLGELWSLFHFLLPGWLGDLKSFNADYRVPIEKRASEVRLQHLNGRIKPFLLRRTKEQVATELPPKTEIIHWVELNEAQRDVYETMRLAMDKKVRDEITRKGVARSQIIILEALLKLRQVCCDLRLVNDATLPARGSTSGKLDSLMEMLEELFEEGRRILLFSQFTSMLSLIEDELKKRNVAYALLTGQTRDRRTPVKEFQSGKRQIFLISLKAGGVGLNLTEADTVIHYDPWWNPATENQATDRAYRIGQEKPVFVYKMIARGTVEEKIQLLQREKSDLAAGVLDGRKAGDWKLQSDDIEALFAPLPDKFEKR

SEQ ID NO: 8270 - protein, 1394 aa, Bifidobacterium longum NCC2705
MSKGYGVFGHVPDNADDDGLLPYEDDDSGVSWGHALRRRNPWKRGDDEDADYDDGRYDIDDTDDTNGGRGIYAGKSGGVGGISGETGGILGSSGAAGSRDVTFGGTDSLSAADAVMPYRFRQGRSVWFDDEDEGHFAGSAKRAEAHAVPILALRNDVESSSSNAVLARARSIARKAATMVINPVYSENHRTGYAELDGILRGTTSPSSRYRTSVQFDLDTGEAVGGKCSCPAYGRGYGMCKHMIALAFIFCDDPQRFEGYRAGAARPSRTLIDYMEHADRQDAQAKIRRRNAVMRRFDATQGKNGANARRTKSGYGSRAGTRGGGYQGDSETVGLGQVQLVPILSFIDGVWSVEFKIGSASNGSSYVLKSIPQFVLAMANGDYADYGQKLAFIHTPDMLDDDSRPLLDVLDDAMAVRRAAEQQDRYYGHIAIDRHLTLSAPEVARLLSVREGRGVQLVLNTWFSGQPASVPVDGGEPDFLMRIARRDFNTYGPDAGYLLTGVPAVETVIDGGKNVWLLLASTNPAGAVSAMVAGSQRKSAAGCRFVRCPKRLIPLRGLLGDLFEPDGEGQVIAGDDIALFARTLLPQLVGAGLLEASEIPRELAELSPTECSLQFYLDRDEHGVQCEVKARYGDAIVPLLPDGPTVHAEGERSIPLSRGVIGRDFDAEHLAIDVVREFFTMPDQRKRVAAATHQTVNGFRTPAARKATKKFVSDAATIDRDDTTQIVRLFDEGLPALKEVGEVFTTPAFDRLIAPKPPSVKVGLSIKGNLVEISPLADEVPPDEVGALLSSYRRRQRFHQLKDGTLVKLSGANLSTLDRLASDLDLSEQQLNSGLIELPGGRAFLLDGELPDDGSDVVKDASFTEYIDDLKIIDPKSYEVPDSLKHILRPYQVEGFQWLNTLCDKGFGGILADEMGLGKSVQLIALLLSRYQRNTGEMGDGSLGPSLIVCPASLVYNWGAEFTKFAPSFNAVVVAGTKAERRTAIGRAFRADEPTVLITSYDLLRRDVDDYTANEQRFNVMALDEAQYIKNHTTKIAKAVKAVAADHRFALTGTPIENRLSELWSIFDFLMPGLLGSYKRFHERYELPISNARAADGSTAEGRAAAQVNPEAARVSRQLQSLVGVFIKRRLKSQVLTDLPDKLETTLTVRLAGEQRKLYAAHEQRLRMQLEHSEEADFNTSKIRILAELTKLRQICCDPRLLYADAKDQSAKLAAITELVETCVNEGKKALIFSQFTSFLDLIAERFDAQGLRYYTITGSTPKKKRLELVDQFNADDTPAFLISLKAGNTGLNLTGASVVIHADPWWNAAAQDQATDRAHRIGQTEDVNVYQVVAKDTIEERILELQHTKSELARQFTDASLLADEAGTGASALTEAPASIATLTKDDLLNLLG

SEQ ID NO: 8271 - protein, 1118 aa, Desulfovibrio desulfuricans G20
MINIYQSSVALKTVRFSPSTRNGLAPHAMHTRGGSCCSRHKKAAKELDHTMDRKEETTVKTMLQEFVTDTIPEYIIDGSHNILNSGGVLKLSLKKGEGYWDVEAHIQGDDFQNYSPKLSLSIGEETVNYMCNCPDSFSGVCRHVGAAALKLLASLETSDDAEPVAPKTEWRQSFRNFFSTELEPEAGKHYLIFRFHPEPGRLQVSLFRARQNKSGLSTVHNEITLEQIIRNPDWCELSPDLPAVAHQIGQYLDYHGHRIEIPDGLLTWFLWTIRNEYYLFWQETEKPCHIDSSTMRLKLQPRLAEDGLGFDVLLHREGKPPQSILDSEVTFHGQLPLWVCWRRGFYPVHTSLSSGLVQEMVQHPPAIPQEDISEFLDRVWTQLPASDLYGQEEFLEHMEPIFVPASYNPKLYLDEEGSLLTLQIQNIYETIHGEFLLPGPNPEFQTGSYPFEGHTFLLRRQQEEEAALTQKLIEMNFQPRNNRVWFLEPEEAINFLLDAYPKLIAEYRVYGEKALSRYKVRLSQPVISAKVESNEEEKWFSLDLNVEYDGQSVPIEKIWKAWTQGKRYVQLKDGSYTSLPESWLKTLGHKLRAMGLDPEKAPKKRFEQYEAPLLDNLLEDLPEVQTDSFWNALREKIHTFKEITLIEPPQGLNATLRGYQQQGLSYLNFLREYGFGGILADEMGLGKTIQTLSFIQYMVETGRTGPNLIVVPTSVLPNWDREAEKFVPGLRRLIIYGTRRENMFSHISESDLVITTYALLRRDLEELQEHEFNSLILDEAQNIKNPNTITARSVRKINAGLRICLSGTPIENNLFELWSLFEFLMPGFLGSQHSFQRGIIKPIKDGDPETLEYLRTRVKPFILRRTKSEVAKDLPPKVENVYYCALAEEQQELYGALAKKLKDQVMADVDEKGIAKSQMSILDALLKLRQICCHPRLLKLDMPGLTTNLPSGKFDAFKDMITDIVEEGHKVLVFSQFVQMLHIIRSWLQINDMPFCYLDGTSKDRFDQVDRFNDSPDIPIFLISLKAGGTGLNLTSADYVIHYDPWWNPAVENQATDRAHRIGQKNQVFAYKMICQNTVEEKILKLQDMKRGVADAIIPGQDSWKSLTRDDLEMLFDV

SEQ ID NO: 8272 - protein, 1032 aa, Streptococcus agalactiae 2603V/R
MSRMIPGRIRNQGIELYEQGLVSLISQEGNLLKAKVGDCQIEYSLVTEETKCSCDFFARKGYCQHLAALEHFLKNDPEGKAILSKVQVQQESQQETKKKTSFGSVFLDSLIINEDDTIKYQLSAQGEQNPYANDIWWTLKIRRLPDDRSYVIRDIKAFLNTVRKEAYYQIGKQYFETLSLIQFDETSQELIEFLWRLIPSHSSKIDLEFILPNQGRHLSLTRGFFEEGVTLMNALENFSFESDFHQFNHLYFKELEGEDHLYQFKVIVHRQSIELEIKEKDLKPLFANSYLFYRDTFYHLNLKQEKMVTAIRSLPIEGDLAKHIHFDLDDQDKLAAHLLDFKEIGLVDAPRSFSIHDFKVNFEFDINSQNEILLQMVFDYGNDLTVHNRQELEQLTFASHFKHEEKVFKLLEKYGFAPHFSTSHPAYSAQELYDFYTYMLPQFKKMGTVSLSAKLESYRLIERPQIDIEAKGSLLDISFDFSDLLENDVDQALVALFDNNPYFVNKSGQLVIFDEETKKVSATLQGLRARRAKNGHIELDNIAAFQLSELFANQDNVSFSQHFYQLIEDLRHPEKFKIPGLSVSASLRDYQLTGVRWLSMLDHYGFAGILADDMGLGKTLQTISFLSTKLTRDSRVLILSPSSLIYNWQDEFHKFAPDVDVAVAYGSKIRRDEIIAERHQVIITSYSSFRQDFETYSEGNYDYLILDEAQVMKNAQTKIAHSLRSFEVKNCFALSGTPIENKLLEIWSIFQIILPGLLPGKKEFLKLNPKQVARYIKPFVMRRRKEEVLPELPDLIEMNYPNEMTDSQKVIYLAQLRQIQESIQHSSDADLNRRKIEILSGITRLRQICDTPRLFMDYDGESGKLESLRQLLTQIKENGHRALIFSQFRGMLDIAEREMVAMGLTTYKITGSTPANERHEMTRAFNAGSKDAFLISLKAGGVGLNLTGADTVVLIDLWWNPAVEMQAISRAHRLGQKENVEVYRLITRGTIEEKILEMQETKKHLVTTVLDGNETHASMSVDDIREILGVSK

SEQ ID NO: 8273 - protein, 663 aa, Pseudomonas aeruginosa PAO1
MFELPGDNAWLHFMQDDLPRLRQQGWFIDIRADFAYDLTPIDAWYAEVEEADDRQWFELELGIQVAGQRVSLLPALTELIRRSPALLDPRALARHADEEQLVLRLELNPPLRVALPFGRLKPVLAALSDFYLGDPEPQRKLRLGAPDAARLADLDELPLAWEGGDNLRDFARRLRSFQARPATPPQGLRAELRPYQLEGLSWMQTLRELDSGGVLADDMGLGKTLQSLAHVLLEKQAGRLDTPALVVMPTSLIPNWLDEAERFAPDLRVLALHGAGRRRDFARIDEHDLVLTTYALLPRDAAELGKRRFHLLILDEAQNIKNATTKAAVAARELAARHRLCLTGTPLENHLGELWSLFHFLMPGWLGDARQFAQDYRTPIEKHGDEARLSHLAARLRPFLLRRTKEQVASELPPKSEFTQFVELSEAQRELYETVRLALDRKVREEIARRGLARSRIVILEALLKLRQVCCDTRLLQRQEDGARSGRALSSGKLAYLLDMLDELIAEGRRVLLFSQFTSMLALIEDALRQRGVDYVLLTGETRDRRAPVQRFQSGKVPVFLISLKAGGVGLNLTAADTVIHYDPWWNPAVENQASDRAYRIGQDKPVFVYRLIARGTVEEKIQHLQQEKAALADGLFSEGNGDGWKLDEADIDALFAPLPKAL

SEQ ID NO: 8274 - protein, 497 aa, Choristoneura fumiferana MNPV
MDNYKLQLQEFFAAGDVADDAPSLDAPNLLEHQKRGIEWMRRREKRGRPHGGVLADDMGLGKTLSMLMLIANDDLAHKTLIVCPLSLLNHWTVEAGKHNLPLDLRQFHGGNLDEPFDEPRVVVTTYDTLRAHYKHLKAEARESGLLARHWHRVVLDEAHVIKNHYTDVHAAACALNADNRWCITGTPIHNRHWDMYAIIHFLRCRPFDNVNVWRMLNRNNDTNRIKSVVNKIVLKRKKTEVTLDIPQHSVEYVHVKFDEAEKHVYDSLKNESQRAYDDAVAGGDKLRSMQDVLWLLCRLRQMCCHPALTKCSAMFKEHARIFEPAYESSKCRRVLELVQGVLDTMDDKVVLVSQWVEFLQLVAGLLRQRGVPVLLYTGTLRVEERTAVENQFNAADSRYRVLLMSIKCGGVGLNLTGGNHIIMLEPHWNPQIELQAQDRIHRMGQKKRTFVYKMLVDEENSIERYMKARQDKKLTFVNKVFDRSALNYEDIKKFFSL

SEQ ID NO: 8275 - protein, 600 aa, Mycoplasma genitalium
MKLTSNLLNYKQLHFSISDIKALKIEDRQLKIEFKAGGIDLKLIKSVLSNYYKGNAICIGEDGWYDLNDENAKALISFWSQIDLRNATCDANNNLLLAKYHLFEVVDTISKYTDVTNLLDEKTALQLKIASENQFHLSLDNNQINNLRKYQKEGVKWIRALEDNQFGGILADEMGLGKTAQVIFAMLDSYQSTKSLLPSLIIVPASLLLNWKSEFQKFAPHVKIVTANGNFKERSQVYESLKNQILLMSFNVLRSDIKWISQKKFHYVVIDEAQGIKNENSTVTKAAKKIKGNFCLALTGTPIENRLLDLWSCFDFVLPNFLGNKKQFSDQFEKEKNDESFQKLMKKTSPFILRRTKNKVLKELPKKIITDIYVELSEEHQKLYDKQKTDGLKEIKESDAKNALNILSLILKLRHICSLVKDNDVNDFEDNSKANAALNIIYEALENKRKVILFTQFLDVIDCFKQTLKNQKIDHLVFDGRKTVKNRNTIIQKFNSAKEPCVMLASLKAGGVGINLTAAEVVIHFDVWWNSAVENQATDRAHRIGQSKTVQVYRIIAKNTIEERVCQVQNQKQELVKKTLVEDVNFFKSLSHEELLKLFE

SEQ ID NO: 8276 - protein, 101 aa, Mycoplasma genitalium
LNWKSEFQKFAPHVKIVTANGNFKERSQVYESLKNQILLMSFNVLRSDIKWISQKKFHYVVIDEAQGIKNENSTVTKAAKKIKGNFCLALTGTPIENRLLD

SEQ ID NO: 8277 - protein, 899 aa, Fusobacterium nucleatum subsp. vincentii ATCC 49256
MIDVKFYMLVEGKDNLYLALYDTEKNLISSYSNLNQSKINNYIENLENEKEFFISWKEEKKSDYLKLDKTLLEYLLKEEKFVNSDFERITKKEIENISLLIRDNNEIEDRLDIYIEINDNLLTKNNIVENYIYSQGTFYKINIEEDSQFPLLDLFQKIDKYELESYGTLILKNYKNIDLKYEDYETIISNEKTAIPQIIIEKIAFDNSLYLKINSIISTMDYEFFIKNKIETVLIVNELEKKLEISKINLENLSSDMFEIVKVLTKLQKSIGLKSSYYIDNENFIILNEELAKEFVKKELLQLAGKYSIIGTDRLRKYNIKAVKPKISGRFSYNLDYFEGEVEVEIEGDKFSIQQLLNNYKKDEYIVLSDGTNALINREYIEKLQRIFKEEDGNKVKVSFFDMPIVQDMIDEKSFENDFMGSKDFFEGINKLAEENIDYPKLNATLRDYQKYGYKWLKYLTDNNLGACLADDMGLGKTLQAIALLSKVHEEKKKKSMVIMPKSLIYNWENEIKRFSPKLKVGIYYGINRDFSSLKKVDIILTTYGTIRNDIESLLKQKFDLLILDESQNIKNINSQTTKAVLLLNAKKRVALSGTPIENNLLELYSLFRFLNPEMFGSVQEFTNDYIVPIQKYSDTSTIEELRKKIYPFLLRRVKKEVLADLPDKIEKLVYVDMNDKHRRFYEERRKYYYSLLEKNTSSQGNFDKFFVLQAINELRHIVSSPELENKKIISSKKEVLIENVIEAIENNHKVLVFVNYLSSIESICDSLKENKIKYLKMTGQTKDRQNLVDKFQNDSRYKVFVMTLKTGGVGLNLVSADTIFIYDPWWNTTVENQAIDRAYRLGQDKTVFAYKMIMRNTIEEKILKLQEIKNKLLDDLISEDNLSTKNLSKSDIEFILGS

SEQ ID NO: 8278 - protein, 1030 aa, Streptococcus mutans UA159
MSKLIPGRVRNEGIHFYEKDLVSILEEKDNSLLVQVADYKIQFSLEDDLVSCPCSMFQKRGYCSHLAAVEHYLKNHPKGKNLADNLLADEQKLEERKEKTSLGSLFLDGLNMNEDDDVKYRLSAQGSQSPFSSDFWWTLKINRLPDERSYVIRDIKAFLLLVKKESYYQIGKNYYEPLSLLQFDTASQELIEFLWRILPDSNQVDTDFIMPNHARNLTFTSGFFEEGVTLLNQLYDFSFEGEHQDYHTINFAELDSSNQFYHFKIVVHRQSIELIIKEKTATFFFDNHYLLYHNTFYHLNNKQRKLVTAIRSLPLEKDLAKHIYFDFEDQAKLAASLLDFKTLGEVEAPASFDIRDFDVVFTFSLLANREILLELTFDYGQIKVSNVKGKEALPFASNFKKEKKIANLLKQYGFSQGFRSYHPPLLDEELYNFFTETLSHFERFGKVLLSPSIEALRYLEKPQIDIKTEQGLLDISFDFSTIFENDIDNALTALFENHSYFVSQSGKLIIFDEETQKVSQALQNLRAQKPHNGHLQINKFAAYQVSETLQNMDNVHFSEDFSQLVKDLRHPEDFSLPEFEVNASLREYQVRGIKWMSMLDKYGFGGILADDMGLGKTLQTLSFLTSRLDKDSKVLILSPSSLIYNWQDECQKFTPQLDVAVSYGLKAVRDEIIAENHQITITSYASFRQDFNLYNQLNFDYLILDEAQVMKNTQTKIAQSLRAFDVKNCFALSGTPIENKLLEIWSIFQIVLPGLLPTKKEFLKMEPQSVARYISPFIMRRRKEDVLPELPDLIEINYHNELIDSQKAIYLAQLRQMQDGIRHSSDSEINRQKIEILSGITRLRQICDTPKLFMNYDDDSGKLASLRELLLQIKENGHRALIFSQFRDMLDLAEKEIEALGLTSYKMTGSTPANERQEMTHAFNNGSKDTFLISLKAGGVGLNLTGADTVVLIDLWWNPAIEMQAISRAHRIGQKENVEVYRMITRGTIEEKILELQESKKNLVTTVLDGNESRASMSIEEIKEILGISS

SEQ ID NO: 8279 - protein, 1030 aa, Mycoplasma pneumoniae
MTIAEIRKFAQTTQKFVEAENLFEHGNVVLPKKYLNKARGMAEVLYNSQVIKVSFTAKDGELTCKCSCLANVDNCVHIVAVLLKYHQMLVESKRSFNLAEAFHLDCDQAEMLIENLSLEIIAGGWNFKLGFTINLDKHNPQPSVLRFYCCDATFVYFLHLENDTLHSVELSKFKPEERATLLFFDKLCKQFTVGYDRNSLLFPLAGFLKELQANTEPTIFVFNDDKIDNILFLRISKKHHGLNHVCGFSGKKVFDFVTYKQKEKQIVLRSAYLSKFTDFKFPYTINIYKLQFGEPLFFYFLIQLKRDGFKNFYFQSEDSIVKEKEYLPKLYFKVEYDPVKNKFVSDAFFKYKNHFNKGTTTVYPHRYYMAKKSDRGGFNRLLFYEEAVENFYQDQFDLGYFRKFEHLPIQDKNQIEAFKAALDDLMPVDLAEVSLSDNLLHQKPLHFALSDLEAVAVDDKQIKLSFAPSAVELKLIKRILSAYHKGNVVCIDQESWYDLKQPAAKELIQFWNQFDLRNATSDGNHIYLPKYYLFEVAKIFSQYLDIKNLFDVPTIKKIEDQNNNVFDLSLEHKKITSLRNYQQEGVKWIRGLEENKFGGILADEMGLGKTVQVIFALLDSYLKNHVNLPSLIIVPASLLLNWKSEFEKFAPQIKVKVANIPSKERGELYEKLTNEILIVSFNVLRSDVKLITKQRFHYVVIDEAQGIKNDSSSITKAAKKVKGNFCLALTGTPIENRLLDLWSCFDFVLPSFLGNKKQFTDQFEKEKTDQSFHLLMQRTSPFILRRTKSKVLKELPNKITTDIYVELNPMHQKLYEEERDRGLEEIKQIQDKSSFNILTLILKLRHLCSLPKNSQGILENSAKKEAALEIIHEAIENQRKIILFTQFIDVIDHFKDTFKEQGIEYFIFDGRKSPKSRHSIIEKFNNAKNPCVLLASLKAGGVGINLTAAEVVIHFDVWWNTAVENQATDRAHRIGQKKTVQVYRIIAKNTIEERVCQVQAEKQELVSKTLVEDVNFFESLTNEELLRLFE

SEQ ID NO: 8280 - protein, 1032 aa, Streptococcus agalactiae NEM316
MSRMIPGRIRNQGIELYEQGLVSLISQEGNLLKAKVGDCQIEYSLVTEETKCSCDFFARKGYCQHLAALEHFLKNDPEGKAILSKVQVQQESQQETKKKTSFGSVFLDSLIINEDDTIKYQLSAQGEQNPYANDIWWTLKIRRLPDDRSYVIRDIKAFLNTVRKEAYYQIGKQYFETLSLIQFDETSQELIEFLWRLIPSHSSKIDLEFILPNQGRHLSLTRGFFEEGVTLMNALENFSFESDFHQFNHLYFKELEGEDHLYQFKVIVHRQSIELEIKEKDLKPLFANSYLFYRDTFYHLNLKQEKMVTAIRSLPIEGDLAKHIHFDLDDQDKLAAHLLDFKEIGLVDAPRSFSIHDFKVNFEFDINSQNEILLQMVFDYGNDLTVHNRQELEQLTFASHFKHEEKIFKLLERYGFAPHFSTSHPAYSAQELYDFYTYMLPQFKKMGTVSLSAKLESYRLIERPQIDIEAKGSLLDISFDFSDLLENDVDQALVALFDNNPYFVNKSGQLVIFDEETKKVSATLQGLRARRAKNGHIELDNIAAFQLSELFANQDNVSFSQHFYQLIEDLRHPEKFKIPGLSVSASLRDYQLTGVRWLSMLDHYGFAGILADDMGLGKTLQTISFLSTKLTRDSRVLILSPSSLIYNWQDEFHKFAPDVDVAVAYGSKIRRDEIIAERHQVIITSYSSFRQDFETYSEGNYDYLILDEAQVMKNAQTKIAHSLRSFEVKNCFALSGTPIENKLLEIWSIFQIILPGLLPGKKEFLKLNPKQVARYIKPFVMRRRKEEVLPELPDLIEMNYPNEMTDSQKVIYLAQLRQIQESIQHSSDADLNRRKIEILSGITRLRQICDTPRLFMDYDGESGKLESLHQLLTQIKENGHRALIFSQFRGMLDIAEREMVAMGLTTYKITGSTPANERHEMTRAFNAGSKDAFLISLKAGGVGLNLTGADTVVLIDLWWNPAVEMQAISRAHRLGQKENVEVYRLITRGTIEEKILEMQETKKHLVTTVLDGNETHASMSVDDIREILGVSK

SEQ ID NO: 8281 - protein, 2066 aa, Streptococcus agalactiae NEM316
MSTFDSVTGRTNHLEAYEGLNLSEKFAILSHFDKLRNELQTPSIQLGEFDREMEAFSITLGNELLGYLEANGSPYELKRELNQAEMMAVLELSRQLVAKFSTKLEELGIDLGSFQPDQVNILLDAVGRFRLKNADIALLGGYPKASVSQLALATELLQMGLSHDKVEFFLTSQLQLEDMRQVAFAFLHESLTREEAEQFETDRFRHTSLNFREWRELLEKQEPEMVEMSDVSPLVREVLHHYPLGSRVTYKGQEFEILSIEAADMDNLIRIELQNDFSYLIEQNPVLYFQNLAEIRQVLHLSRSEIVEREEQPEEEWTLFSFMDEGTEDNEKEPEIVFESTDKVVTLDSQPAQVSETISESVPETKEVIEAEQAIAVDFSFPEDLTNFYPKTARDKVVANLVAIRLVKELESANQSATPNEQEILAKYVGWGGLANEFFDEYNPKFSKEREELKTLVSDKEYSDMKQSSLTAYYTDPLLIRQMWSKLEQDGFSGGKILDPSMGTGNFFAAMPAHLREKSELCGVELDTITGAIAKQLHSNVHIEVKGFETVAFNDNSFDLVISNVPFANIRIADNQYDKPYMIHDYFVKKSLDLVHDGGQVAIISSTGTMDKRTENILQDIRETTDFLGGVRLPDTAFKAIAGTSVTTDMLFFQKHLNKGYQADDIAFSGSVRYDKDERIWLNPYFDGEYNAQVLGRYEIKNFNGGTLSVKETTDNLIASVREALQHVKAPRVIDKTEVMINSDVIARQVIDTTIPPEIRENLEQYSYGYKGSTIYYRDNKGIRVGTKTEEISYYVDDEGNFQAWESKHSQKQIDRFNNLEVTDSTALDVYVTEEPAKRGQFKGYFKKAVFYEAPLSEKEVARIKGMVDIRNAYQEVIAIQRNYDYDKNEFNRLLGNLNRTYDSFVKRYGFLNSPVNRNLFDSDDKYSLLASLEDESLDPSGKTVIYTKSLAFEKALVRPEKMVKEVSTALDALNSSLADGRGVDFDYMASIYQTASKAALIEELGDQIIPDPESYLKGQLTYVSRQEFLSGDIVTKLEVMDLLLKQDNHDFNWAHYGNLLESVRPARVMLADIDYRIGSRWIPLAVYGKFVQEAFMGKNYDLTATEVEEVLSVSPIDGTMEFRTRFAYTYSTATDRSLGVAGSRYDSGRKIFENLLNSNQPTITKQIQEGDKKKNVTDVEKTTVLRAKEAQIQDLFQDFVASYPEAQQMIEDTYNSLYNRTVSKVYDGSRLEIDGLAQNISLRPHQKNAIQRIVEEKRALLAHEVGSGKTLTILGAGFKLKELGMVHKPLYVVPSSLTAQFGQEIMKFFPTKKVYVTTKKDFAKARRKQFVSRIITGDYDAIVIGDSQFEKIPMSQEKQVTYIQDKLEQLREIKQGSDSDYTVKEAERSIKGLENQLEELQKLDRDTFIEFENLGIDFLFVDEAHHFKNIRPITGLGNVAGITNTTSKKNVDMEMKVRQIQAEYGDRNVVFATGTPVSNSISELYTMMNYIQPDVLERYQVSNFDSWVGAFGNIENSMELAPTGDKYQPKKRFKKFVNLPELMRIYKETADIQTSDMLDLPVPEATVIAVESELTEAQKNYLEELVDRSDAIKSGSVDPSVDNMLKVIGEARKLAIDMRLIDPAYTLSDNQKIMQVVDNVERIYREGKGDKATQMIFSDIGTPKSKEEGFDVYNELKALLVDRGIPKEEIAFVHDANTDEKKNSLSRKVNSGEVRILMASTEKGGTGLNVQARMKAVHHLDVPWRPSDIQQRNGRLIRQGNQHQNVEIYHYITKGSFDNYLWATQENKLRYIKQIMTSKDPVRSAEDIDEQTMTASDFKALATGNPYLKLKMELENELTVLENQKRAFNRSKDEYRHTISYCEKNLPVMEKRLRQYDRDIEKSQATKNQEFIMRFDNQTIDNRSEAGDYLRKLITYNRSETKEVRTLATFRGFELKMATRSPGEPLSDMVSLTISGDNQYSVSLDLKSDVGTIQRINNAIDHILEDKEKTEEMTNNLKDKLAVARVEVEKVFAKEEEYQLVKAKYDVLAPLVEREADLEEIDVALSQFSSSDPCLKKDQQLVLDI

SEQ ID NO: 8282 - protein, 1070 aa, Shewanella oneidensis MR-1
MRARDYVMQGRVLSAKANADFRHIEGSVVGSETSPYRQDIRLVSVNHKLIMNGFCSCPATGHCKHMAAVLYSLLTDKTVEDQRIVQWLHLLDDADDPRLNDVESLYDDRVLYILSKDNNGVFIELRRGKLGKKGGYNKGSKIALSDVQYYMPAWIGAEDVLIINLIMSTRRHGASRLYLKAQLGAVALEKMLATERCFWEESRLALTAGDAITPQFSWQDIDSEHKQMRLVLPKRDNWELVPTEPAYYIELDYFQIGLIDTDISIEKLRLLSQMPPVPRTQVEVVSHKLIKHFSARTVPLPSAINFVELRDKLRVRLSLNMLSAASTQANATLPNTILPNTTQLKTTTLHAQAITISQPYVTLAFIYGDVVLSGNAAKEALTLVTQGGTTYQINRALDEEQVAVETLQTLGFSRFIFDIGSLSSHWRLGALPDGIREWLQFIEEDVPRLQAQGVEVLLAPEFSLKVVDTALTVELDDSKEGWFSLSLHADINGQRLPMLPLVATWLKQHGEPADDAELLLPSPNGEWLKIKASVIKPLMSIILELFEQHRGNSIALPKYRAHLLNELAQSDISLLNGERVRQLAAKLEQFTGVVAVTAPTQLQAELRPYQQQGLNWLCFLKEYQLGGILADDMGLGKTIQTLAFLLKQKQLKSAAGPHLPSLIICPTSLVGNWAKEAAKFAPSLTLAVIHGAQRGPLLARLSEFDVVVTTYPLMVRDNDYYQAQAFEHIVLDEAQQIKNAQAKVSQMIKALQSPFKLCLTGTPLENHLGELKSLMDFCLPGLLGTTAYFNKEFRNRIERYGDSEQVKVLSQRIAPFVLRRTKAEVVTELPPKTEIYQSLELEKDQRNLYESIRLSMEKKIRELFATQGVAGSHIEFLDALLKLRQACCDPRLVKLEQAQKVKNNAKLNWLSQNLPEMVQEGRKILIFSQFTSMLILIEELLQSLEIDYSKLTGQTRLRQVQIDKFQEGDTPVFLISLKAGGTGLNLTAADTVIHYDPWWNPAAERQATDRAHRIGQENPVFVYKLIAEGTVEEKIQEMQQHKQGLADSILEGKGNGAWQGSADELLSLFH

SEQ ID NO: 8283 - protein, 1093 aa, Clostridium tetani E88
MKKINKQGENIMDENRLLQIFNKETSGNNHLKGQRIINNDLVSFLDITSEDNLIYINSNVISENLFNEYNTKIEIDVRNKSIFSTFCSCKDYEKNEFRKRNYCCKHLVATFYKALRDLINHPLLNEEKLNGKNIFKRNNKNNTLSILLGDGKYKNEIKIEVYINKNEWKQNIIAEFRIGFKEKGVSKLYILKDINEFLSAYHNNFPIKYSKNFTFDIGSQRLSTKDKRLIDFIEMLKNIEGKYKYISKNTEKNIEGKYLKVPQYLVREFFEVIKNHKVYLNEGFFYRAVETEILDKAPDIDFDLKKVKENYILKVRDGMPITLDSNNSVFLYGTTIYIPNYEFCYKINPYLKVFNEMRIVTMGQEDEETILRRLVPDLNFLSNNVSLSRNIKNKIVMEKCKFNFYFDQEGKEIVLIVKVKYGNFEFNIFEDCKEKIVYRESKKEQQVILQLKALDFEEIKEKFYLRCEEEYKFRFFKSEISKLQEIGEVYYSENFKGLKSIGSNGIFGSIKAGKHDYFEMDFKIGDISPQETYNILRAFRDNLKYYKLENGEYIDLQELELNKFLKLLDVISPEEIYGNHIEIAKNKGVYLDSYLEGNKIKYIKGKKELKEIRDKFKNIEKLKFEEPTNLNGNLRDYQRIGYNWFKTLDYLGFGGILGDEMGLGKTIQAISFILSNKNSKSLIVAPTSLIYNWIDEFEKFAPSLKVVAINGTKEDREDIIKNIGNYDVAITTYNLLKRDLESYNIIEFDHCILDEAQYIKNLNSQNALAVKKIKAKTRFALTGTPIENSIMELWSIFDFIMPGYLYDEKRFSVRYNKRLKESPEVLEELNKLIKPFILRRRKNQVLGELPNKIEKTLMVTLDNEQKKVYKAYANYAMELIEKKVKDDEFKKSKIAILSYITKLRQLCLDPTVTMKDYNGGNGKMEALVDLLLQSIGEGHRILIFSQFTSVLKNIGKRIIKEGIDFSYLDGSIPSEKRMNMVRDFNDGKNSVFLISLKAGGTGLNLTSADVVIHFDPWWNPAVEDQATDRAHRIGQQNVVEVIKIIAKGTIEEKIILLQEEKKKLISELMGDELSSGENFASLTEEEILKLFEV

SEQ ID NO: 8284 - protein, 1056 aa, Oceanobacillus iheyensis HTE831
MKSIKDIDIQKLFPSAFYKRGLTYYKNDQVKDVVFDRNHNVWTATVQGSEDYFVEIGLTDMEKGSIDTFCDCPAFETFGSCKHIVASLIAISTLENNGDASIRQPNFYRSSRFIEAMSNILTPLDAVEEENYSSSEMSVEYIGSWTYDRRLQLEIKTGEQHRYVVRNVASFLDAVQDQEPFSFTKKFTYEPSIHSFLEADMEILRILHDLCKNEELYDSYTFGGRSTDRRYVTIPPYVVKDLLFKLVDRNFYIVDNVTQYKDIQLQENELPFQFYITKQDEHVVLSMSELKETIFFPLYNILFQQGVFYFPTYEQIPVLQQMEKFRFEDMNFDVPKEQTDTFLSEVIPSLQRIGDIDMDDHLSEELIKAPLQAKCYLELRDGLIIGKLEYQYGSHRIDPFQGKKDHQVMIIRDVPQEKLIMKYIEDANFRYNGKELYMDAEEEDLYHFLYHVLPYLDNYVELFLSSEFRGLFIENEPEPYTSVRMEGQSNLLEIGFNIDGINDNEVNKILQAVIERKRFFRLQSGQMMNLETEEFSSMQRLFDDMRISKEELLDGKVQMPAYRGSQLDDLIETKKHYDPHFRDLLSHLHSPEEQVYEIPENVQANLRSYQKVGYQWFKSLSQYHLGGILADDMGLGKTLQSITYLVSESNGETIGPHLIVVPSSVVYNWKNELEKFAPHLQVAVLTGNPIERHQVMSESTNKDIWITSYATLRQDIEFYQEITFQTLLLDEAQYIKNYQTKTSRAIRQIKATRRFALSGTPIENSIEELWSIFQVVLPGLMPDQRSFKQLEPKKIAAITRPFILRRLKQDVLKELPEKIESVHVSELTREQKDLYVGYLRQVQQEAVQSFKENGFQQNRMKILAGLTRLRQICCHPSMFIENYEGASGKLEQLMETIKTALDNGKRMLIFSQFTSMHEIIQERLKKEGYGYFYLHGQTSSKERVEMSERFNHGENDIFLISLKAGGTGLNLTGADTVILFDLWWNPAVEDQATGRAHRFGQKKVVQVIRLVTEGTIEEKIYDLQQRKRELIDQVIQPGETMLSSLNEDDIKELLSL

SEQ ID NO: 8285 - protein, 1051 aa, Oceanobacillus iheyensis HTE831
MYSLTKQKIRELCGDVSFKYGERLWNGNRVHMVNNQNETTATVTSTKDFQVQITWKDGEIKETKCNCPSLTSFKKDCQHIAAVLIGICETSTKSINRTDEIMRGFLQKNDSENHEYTHQGYFEKRQEIHSLFRCHILTISKNPVIAISIDINHHEVKQLSDFLLAVQQGKSYKISNAITYSPSNHYFNSNDEAIIHHLIQLNQENYVTNNFKSNDKSKLVITPTIWNKLETIFQLAVNTELIIAEANRNWILPSFSIVDNLPPLHFEIEKAASLLRITWTEFQSYVCLPSYRLFVTQQSVHILTEQEVTTIDLCDRLWRENNENSLLISLEQAEQLIPLITKIAKIDDTTGIIAKSKKPLTAKIYLDRISNRLLAGVEFHYGGVKFQPFEPSPMTLYRQEEKEEEIIQFLQDKGFAHMDGGYVLQNEKLEYEFLYHHLSDLQNQATVFATTAVRNRLSKKHFQPTIRVRHKSDRTNWLEFTFQMKGFVDQEVREVLDALEEKRPYYRLKDGSLLSLETKELEELQSFLIDSPMSSTEILEGLEKPLNEGFTIANRLEERGILEAEDSFKQMLLQIQQPDEQSYPIPKPISSLLKDYQLEGVRWMRAVADMGFGGVLADEMGLGKTIQSIAYCLSIEKERKDKKQPILIVCPTSVCYQWKQEWMTFAPDWSVMIIDGTKAERKQKKTELRNYDVWIISYGMLRNEIDWLQNQVDQFHTVIFDEAQVFKNPATHTFRTVKKLRSEHRFALTGTPLENKIEDIWSIFHVVFPELLGNIKDFSWLTNDQVIRRITPFMLRREKKDVMQELPTKVEYVERISLTEEQKQLYVSYLAKLRHPSFKHLDKETIRKNRIKILAGITRLRQICCHPSLFVRKYNDKSAKLERLKQLIKDASRANKRLLIFSQFTSMLQLIGKELRNKDILYYYIDGETPAEERVEICRAFNQGNREVCLISLKAGGTGLNLVGADTVILYDVWWNPAVEEQAIDRAHRIGQQSEVTVIRLLSEGTIEEKMYELQRKKRELMNYLVNGKSTVNYQLTDEDIQDLLFNETKD

SEQ ID NO: 8286 - protein, 556 aa, Oceanobacillus iheyensis HTE831
MDSIQVNKDEQFIIDLDEAMQREENLTSWKLFSMAYEAEKQTMSPSFKGLRSVNHLSHLQILDHQREAAEQVIEEMDGRAILADEVGLGKTIEAGLILKEYMVRGLVSKVLILVPASLVNQWEKELNDKFFIPAIAHRKNYSWVDNHVIISSIDTAKRSPNSEEILDIDYDLIIIDEAHKLKNEKTKNYQFVRELKKKYCLLLTATPVQNKLLELFNLISILKPGHLGNYQTFTEKYGKDRKRMEQDPYLKQLVQKVMIRNTRKETALQPSKRKIETVWMDFTKEFQQIYDQLVQLSFGMSSFSKITYLREFCSSREACYMSLVKFVKDIEDEEHPLKQIISDLESLEQHIKAEQMVKLIQSLGDEKVIVFTEYRATQYYLQWFLQQHGITSVPFRGGFKRGKKDWMKQLFRDHAQVLIATEAGGEGINLQFCHNMINYDLPWNPMRLEQRIGRIHRFGQEKDVQIYNLVIKNTIEEHMLSLLYEKIDLFQNVIGNLDAILAELNVKSLESEMESIYNESSSSGEVRIKLDNLTSIIEQANPSDNQMEKEQKYGNP

SEQ ID NO: 8287 - protein, 918 aa, Pseudomonas syringae pv. tomato str. DC3000
MSSILEKVLASAWTDLFNDRTLERGRDYARQKRIVLEDSSPQIIRTACRGSGLEIYTQTLLFKDPDRYKNYLTCKCTCPVRNDCKHCVAALLFLKDPQNRPLLQAALGSHQRETEQHVEQQIAQKPRLPERLIDDLQPRPRLILASIEFSAYEPRNGRMQRHIQHRAALAFAYGKHYAVGTTNVSILVSSLGSDLVNQKSDIIEHTETETLRIRRQGEKERQLRQELADLGFKVATRQSKALPDSAGDMYELPNDKAWLHFVLDDLPRLREQGWEIEIQEEFGFDVTPVDDWYAVIDEETERDWFDLELGIIVNGERLSLLPILINLIRSHPELMSPSAVAKRGDEEQLLVQLNHFTQSGGSPVQIALPYGRLKPVLATLGDFYWRQDGNNALRMSKADAARLTQLEDLPLTWQGGDRLRHFAERLINIKDAPVNLPDGLNATLRPYQLEGLSWMQSLRELEVGGVLADDMGLGKTLQTLAHLLMEKQAGRLDRPALAVMPTSLIPNWLDEAEHFTPDLKVLALYGANRHQDAGNLQDYDLILTTYALLPRDMEMLEKQPLHVLILDEAQYIKNPNSKAAQAARNLTARQRLCLSGTPLENHLGELWSLFHFLMPGWLGNSKEFNSNYRTAIEKHGNQDRLHHLNARIKPFLLRRTKEQVATELPPKTEIIHWVDLNDAQRDVYETVRLAMDKKVRDEITRKGVARSQIIILEALLKLRQVCCDLRLVNHDMPVNSKQGTSGKLNSLMEMFEELLAEGRKILLFSQFTSMLSLIEEELKQRGIAYALLTGSTRDRRTPIHDFQSGKLPIFLISLKAGGTGLNLTAADTVIHYDPWWNPAAENQATDRAYRIGQDKPVFVYKMIARGTVEEKIQRLQREKSALAAGVLDGRTTGDWKLRDEDLQALFAPLPAAPKKTRK

SEQ ID NO: 8288 - protein, 922 aa, Bacillus subtilis subsp. subtilis str. 168
MASLKEILIHVEQMEDGSFTLSAFDENEQPLPYSHMKKHLFQWHESSFYGTFLEDVSFIGTTAVLLSPWMTVELLGKNSFNSFSSVQLTEETEPLIEAASTIYEFIADGDFMPDYDAWTNGVFRWKDRDNILEGFTAEWFSAAVQDYIQYDDDLREKWEHIKEKSPAVTTFRGHFLDEEDFLEGIGWIDDQSPFTVGLRLNEPDFDGDEWKIEMFLRDKKSGAVEFFDGLKSLKKSWQAYSDKIAREQDRFHRTVPWLSFDSGTTLISEEEAWIFLSEASETLVDMGVEILLPSWWQIVRDSNMMLKAKVSSSPRGESFVGMNALLDFNWRFATNGIELTEAEFNELVASNRRLVNIRGQWVKIDPQFIKQMKRLMEKAESEGLHMSDILARELMDQQDGGLEDSDLIDTSAFAGIQFDLSKQLRSLIRKLTAAENLPEHKVSPSFKGTLRPYQKYGMNWLLFLRESGFGACLADDMGLGKTIQMIAYFLHVKESGRQKTPHLIIAPTSVLGNWQRELQTFAPDLSVALHYGPRRPKGDDFAAHYENADVVLTSYGLSHADTEELSSVTWNTICLDEAQNIKNAHTKQSRAIRKLKGLHHIALSGTPMENRLTELWSIFDFMNKGYLGSLTGFHKRYVLPIEKDRDEKRIGQLQQLIRPFLLRRTKRDEEVALNLPEKLEEKEFIPLSAEQASLYEQLVKDTFDHMTSLTGMQRKALILSMLGRLKQICDHPALYLKEEQTELLAGRSVKLEKLLELMTAIRAQNESCLIFTQYIQMGNMMKRLLEKTFGEPVQFLNGSLSKQERDTLVEKFQRKEYPTLILSLKAGGTGLNLTAANHVIHYDRWWNPAVENQATDRAYRIGQERFVHVHKMITTGTIEEKIDVMLESKQTLNDQIIQSENWITELSTQELEELFTLSATAQ

SEQ ID NO: 8289 - protein, 557 aa, Bacillus subtilis subsp. subtilis str. 168
MNTEMIYDAKWPEEFAERLKNDGPWANWELYKLSAEIQKTLAIPEFEGLRAPLYLPSFTPLPHQLEVAQKVVEKMNGKAILADEVGLGKTVEAGLILKEYMIRGLAKKILILVPASLVSQWVKELQEKFLIPAVEQKKSYVWEQCDIVVSSIDTAKRSPHREIVLSIPYDLVIIDEAHKLKNSKTKNYEFVRNLVKKYCLLLTATPIQNRIEEIFNLVSLLKPGHLGSQNHFQEEFAKKKSSLEAHEHLKDLVNKVMIRNRRHDTGLNWKQRHVETVPIQFSPSEQALYDEISRLKDSINKPASMFSIMTLQRECCSSREAVYMTLKKMLDQKEKQAPAIDEDTISVLIDRINQVTQNSKALQVVDLIKKIDDKVIIFTEYRATQIYLQWFLQQNGISSVPFRGGFKRGKKDWMKDLFRGKIQVLIATEAGGEGINLQFCNHMINYDLPWNPMRLEQRIGRIHRLGQERDVHIYNMATKHTVEEHILKLLYEKIHLFEKVVGELDDILTKIQVNNFEEHLHDILYHSATEEEMKIKMDNLTSFLSYKKQLPAEKRGS

SEQ ID NO: 8290 - protein, 943 aa, Archaeoglobus fulgidus DSM 4304
MLYPLFRVAVDSYHLFTKYQYDPVSVLAASKINLLPYQLEDFLNLLDIADSGRPVRVLIAYETGLGKTILAGLFIKEMVIRNPNTRILIVTPPNVQYQWQDELKNKFGMHVPLLTEADKQGKDPLKQKWLIASMDTLKGENWLRRVEDHRWDIVVVDELHRATIKNRRAQLIQVLRDRTKHMLALTATPHDGKEDQFVFRLSLINRNVDEQNWKEFVKKYTFRRRKRDVLDLEGRKIFPQKVYPLTIEIEPDEEEKEFYWEVEKYVRSYYKLAEEENKRSIGLVATIVGRAVSSSINAGVQVLKNRYRRLFEGFAEELEDAEDILDELKQAEEEGDDEKLEKLRMKIIESVPVRKDLVEKEKEVLERLITLGEKLLERGRDKKTERLVQVVNEHMEKGNKVIIFTQFLATLDHLERTFKEIYGENSVVTVHGGLTHEEKKNRIAKLWDSAKILIATDAAGESLNLQAANVVIHYEIPWNPVVYIQRVGRVYRYGQEKDIYIQSMLPVFKIERRVLEVILQKVETIEKDFDIGSVEIIGTIISERDIENEIWRAYVEDRIEDAGEEVSKKFDKGKSVLQKIRLVLEKAEAAKKHVRAEKLLEDRGIVEIITEEDLRKYLFYFGEAKLGEGKFYDEFTFFEIKDVRIHPEKILTEIKPSKAEILDLKDVTTLSEKELKLDNPAIRKALYIGMCQRGEAIFSGNEEGYGEIRLLKLFDFYGEPIYEIPVVVFNGSIKPFRFLQTLEPVILSDEIEKELTADLESKEIEIRDSSYISEVKEEQRLYLKERVNKVLDALSIEEEYYKRFLSDEQAKKKLQEIQEMKKKEYRRSLRIHDRLSEPIAKFWVLKPEKLTEMLHKIAEKTDDGQLLKEIESSIEDFDPELWKRKREVELAGMKLVMSCEEKWGRFPKDVSADGRGYDIESFDPNSGEKRRIEVKSFKTSQLK

SEQ ID NO: 8291 - protein, 1065 aa, Enterococcus faecalis V583
MKWSIPERIVEQGREYMQEGRVLSIVQNPEKRIWLSEVLGEELYLVELDGTAKEQDVCECQYWMEHGYCKHTVAVELALKQRGVSRIIQANQTVSFEKTNRSTAEMFTKGFAKLSKASAEVPLQPLRLEFHLDVIETNNYYPELSTIGLSLKIGLEGTKPKTYIVKNIGDFLQAYEKEMTFMVNKQHQFTLLHDSFSMEIQEILTELAAIYHTSQLLGANGIQVKGKIDKRYLLLPIDRSQSLVEKMNRTGQFILTNQTHKYRYLTFKETSLPLTFTVQKTEEQSFKLTIQNPITTFLAHYHWAIADQTVYLLTEEQEAIYTTLLQLMKRLEEPSIIYEKETVSDLFSEVLPLLEKIGRVSVEESVEELVVHHPLKAVFIFKKIKGRINARIDYHYGEVIFSTNPKYAQLPEVNQEIVRDKAKETAIKQQFQQFAYQQTTTGFEKVLPAGESLYYFFKAEVPAFRQLGEVRMGRKLRELYLDAQHHQPTIEVAEGDSWLDIRFDVTGIDETEIDAVLTSLLRNDAFYTLKSGEILAFDSEEFFHTSAILTKLRKNMHQEDNVIHVPKNQGLMIESLLEDNERAHFSDSFKKMVTDLTHPENFEAQVPKTLQATLRHYQETGYKWLKMLSHYQFGGILADEMGLGKTLQTITYLLSEKEEERLKGTALIVAPASLTYNWLAEVKRFAPTLNVQVVSGNRQERAALLQNSTEDILITSYASMRQDVQLYQEMRVGYLILDEAQMVKNSGTKTAQALKSLKVPQRFALSGTPIENNLDELWSIFQMILPGLFPGKKAFREIKPEEIAKMIQPFILRRDKKTVLADLPEKIENNMYSVLTEEQKTVYLAYLKQMQADVSQMDQATFKKNRMSILAGLTRLRQICCDPRLFIEDYTGGSGKVEQVKDFLVAAKENNRRVLLFSQFTSMLSILEKELNELGLETFYLRGSTKPQDRLTMANAFNEGEKDVFLISLKAGGTGLNLTGADTVILYDLWWNPAVEEQAAGRAHRMGQKKVVEVWRMIAEGTVEEKMNSLQQEKRELFQKVIQGNEEQLAKMTEEDIRTILSIGE

SEQ ID NO: 8292 - protein, 1027 aa, Bacteroides thetaiotaomicron VPI-5482
MEEKANTGQVIIVLTEHLTFGTLLIPYMAEKSDDGTYQLIEQAFHASPEAISRMNEAEQQAIDIASHYTEKYLMGIYSREKTVSRFLRKLSEDPERVKNNIRPFIEKKMQEMLTLIRHHNLPLYQKQVGSKLLYAHHAYHVHPHDVEIRFTFLADETNFRYQLQCYYDGQPLSLSEQKPVIVLTSSPSALLLGMELYFFPHIESVRILPFTKKKKISVPASQIEKYIDNIVIPIARYHEITTQGLNIIEETYACEAVLSLEDTIYDEQMLRLSFRYGDQSFTPDTVTEMKKIIYRNDFGEIFFFRRDSDAEEEKLRMLTDSGLQRVSDVHFKLSPDAPEKTITEWISTYREMLQQSFLLTGNMGNTPYCLDEIRIEQSCDDEPDWFELHITVVIGNLRIPFSRFRKHILEEKREFLLPDGRMILLPEEWFSKYGNLLELGTQTETGIRLKPTFVGAVQSALEENGPKNLLFKREIRNVPVPQGLNAKLRPYQQKGFSWMVQLNKQGFGGCLADDMGLGKTLQTLTLLQYIYKPLSPDAVTAPMKPVFTETTASDSQPDKECTANNPPVREQIADAEGQFSLFSFSSEDELLPDAREIREKNRPKEDDHRQEHGKNSRKPATLIVVPTSLLHNWRREAKRFTTLAIAEYNSNTAFPKGHPEKFFNHFHLIFTTYGMMRNNIDILRSYTFEYIVLDESQNIKNNDSLTFRSVIQLQGKHRIALTGTPIENSLKDLWAQFRFLQPDLLGEESTFHKQFIIPIRQGNVRMEKRLQQIIAPFILRRSKSEVAPELPPLTEETIYCAMSEKQGESYEQEKNSLRNILLQQPENKDRYHMFSILNGILRLRQLACHPQLIFPDFDGVSGKTEQIIDTFDTLRSEGHKVLIFSSFVRHLEILAEVFRQRGWKYALLTGSTNNRPSEIAHFTEQKDVQAFLISLKAGGVGLNLTQADYVFIIDPWWNPAAESQAIARAHRIGQDKQVIAYRFITQNSIEEKILQLQEDKRRLAETFITDSEALPALSNEQWADLLK

SEQ ID NO: 8293 - protein, 918 aa, Bacillus cereus ATCC 14579
MINQTEVTIRLQHVSQGWFLWGEDDSGTPLSVTSWKRHAFTWHSTSFYGTFLKEANFEGKQGVLLTNAQAFEYIANKPMNSFAHIQLNGPITALTKDANELWDAFTSGSFVPDIEHWPKQPSWKVQNTPIEDDTLASLFSAAVNESILQDNRSNDGWEDAKRLYEHYDFTKRQLETALHEEDWLRKIGYIEDDLPFTIGLRLQEPQEEFEMWKLETIVTPKRGAHRIYVYENIDSLPKRWHDYEERITETQEGFSKLIPWLKEGDTFRNELFETEAWNFLTEASNELLAAGITILLPSWWQNLKATKPKLRVQLKQNTVQTQSFFGMNTLVNFDWRISTNGIDLSESEFFELVEQNKRLFNINGQWMRLDPAFIEEVRKLMNRADKYGLEMKDVLQQHLSNTAETEIVEDDSPFTDIEIELDGYYEELFQKLLHIGDIPKVDVPTSLNATLRPYQQHGIEWLLYLRKLGFGALLADDMGLGKSIQTISYLLYIKENNLKTGPALIVAPTSVLGNWQKEFERFAPNLRVQLHYGSNRDKGNSFEDFLQSADVVLTSYALAQLDEEELTSLCWDAVILDEAQNIKNPHTKQSKAVRNLQANHKIALTGTPMENRLAELWSIFDFINHGYLGSLGQFQRRFVTPIEKDRDEGKIQQVQRFISPFLLRRTKKDQTVALNLPDKQEQKAYCPLTGEQASLYEQLVQDTLQNVEGLSGIERRGFILLMLNKLKQICNHPALYLKEEEPQNVVERSMKTKTLIELIENIKDQNESCLIFTQYIGMGNMLKRVLEEKFGQRVLFLNGSVPKKDRDKMIEEFQNGTYDIFILSLKAGGTGLNLTAANHVIHYDRWWNPAVENQATDRAYRIGQKRFVHVHKLITTGTLEEKIDEMLERKQSLNNAVITSDSWMTELSTDELKELLGV

SEQ ID NO: 8294 - protein, 1064 aa, Bacillus cereus ATCC 14579
MSFTLNKSIIKEVCGETSYKRGEAYYKSNKVIIDHYDENKEICEATVKGNEDFHVTVAKAKKGDVVAKCSCPSLASFQTYCQHVAAVLIQINYNQQIGGMSSTSSRNDQLTSGMFQLFADKPLRPKSKQHRFDTREILDIEFICTPVATRSGGALLGIQLKLAKVYFINHIREFLSKVEKRESFHCSNEFTYTPDVHSFKQETDAIIQQLIKMYHNEKMYEDTLEVHAKQDESMIFIPPASWKDMLFSLSKAEYVQLKQNEQLFQGLQVSKGLLPLHFEFTKGNNGGFTLHIEGLNRVQVMDMYNNALYDGKLYHLHIEDCMRLIELQKMMSRSNSNQFYIPESKMEHFVAKVVPGLMKLGTVHIDEVISDRVETPSLKAKLYLDRVKNRLLAGLEFHYGNVMINPLEEDGQPSVFNRDEKKEKEILDIMSESAFAKTEGGYFMHNEEAEYNFLYHVVPTLKGLVDIYATTAIKLRISKGDAVPLIRVRRKERIDWLSFRFDIKGIPEAEIKGVLAALEEKRKYYRLANGSFLSLESKEFNEINQFIKESGIRKEFLHGEEVNVPLIRSVKWMNGLHEGNVLSLDDSVQELVENIQNPKKLKFAVPNTLNAEMRKYQVYGFEWMKTLAHYRFGGILADDMGLGKTLQSIAFIDSVLTEVREKKLPILVVSPSSLVYNWFSELKKFAPHIRAVIADGIQAERRKILKDITEFDVVITSYPLLRRDIRLYARPFHTLFLDEAQAFKNPTTQTARAVKTIQAEYRFGLTGTPVENSLEELWSIFHVVFPELLPGRKEFGDLRREDIAKRVKPFVLRRLKGDVLNELPEKIEHLQSSELLPDQKSLYAAYLAKLREETLKHLDKDTLRKNKIRILAGLTRLRQICCHPALFVDDYKGSSAKFEQLLEILEECRSTGKRILIFSQFTKMLSIIGRELNRQAIPYFYLDGSTPAQDRVELCDRFNEGEGDLFLISLKAGGTGLNLTGADTVILYDLWWNPAVEQQAADRAYRMGQKNTVQVIKLVAHGTIEEKMHELQESKKNLIAEVIEPGEEKLSSITEEEIRDILMI

SEQ ID NO: 8295 - protein, 560 aa, Bacillus cereus ATCC 14579
MNVDISVDRTWQNNFLNRIDEDGPWTNWDLYHLAYETEKSLLVPTFDGLQAPKHLSHFTPLPHQLEVAQNVIEQMNGKAILADEVGLGKTIEAGLILKEYMVRGLVKKVLILVPASLVSQWAYELNTKFFIPAVAQKKSYSWEQADVIVSSIDTAKRSPHRDIVLNLEYDLIIIDEAHKLKNNKTKNYEFAQRLKKKFCLLLTATPVQNKIDEIFNLVSLLKPGHLGNQSNFEEYYASKNRSAESDEDLKALINKVMVRNRRHNTGIDWPKRHVRTIFVEFNEQEQALYNDIENWRGQDAFTSAFSSLTLKREACSSREAVYYSLKKHVEKRQKENEHYIKDPHIDVLMDKINHIPFNSKANKALELIKEIDDKVVIFTEYRASQMYLQWFLQQHGISSVPFRGGFKRGKKDWMKELFQNHAQVLIATEAGGEGINLQFCSHMINYDLPWNPMRLEQRIGRIHRLGQKNDVHIYNLATKHTVEEHILKLLYEKINLFERVIGELDEILTRINMKNIDAHIQEIFAQSKSEGEIRIKMENLTSIIDFAKRNEAEVQGYAAT

SEQ ID NO: 8296 - protein, 979 aa, Streptomyces avermitilis MA-4680
MPAATPAEITEVARCCAVFMPAEPARTGRVAFWRPDGDAPPAVAGGSVEELTVVLPGDEGVERVAVPAVLLSVRAALPVLTRARAAAHTHRATAFWGTAGVLALQLVARGLLLPGLTAGDHDAWRAGPLRAEDLDRIRDLAAAMPPEAHAVPWADTEPLRLPGPEPLLRAFLDAVADTLPRSPAAPLAAGGPAFAAREPQQVPEQRAWAADVAAGHDAGVRISLRVEVPGLASIAPGEAGSAASRAEASARPQERSSPGPEETASTGSAAVHPALRAVLQVHSVSDPALVADASAVWAGARAFGPRARMDVLLALHRAARAWAPLAPLLSAAVPDTVDLADDEAAELLGEGSRMLAAAGVDVHWPKELARPLTARAVIGPPDGGQGKDRAASDVPSFLSADALLAFSWWFALGDQQLTRAELDTLAEANRPLVRLRDQWVLVDPREVRRARAQQDRKVTPIDALSAVLTGSTEVDGRRVDVRATGWLAALRERLAAPEGQAPVAQPAALAATLRDYQLRGLGWLARMTSLGLGGCLADDMGLGKTITLIALHLHRQSDDSAAGPTLVVCPTSLMGNWQREIERFAPGTPVRRFHGSARSLDGVADGGFVLTTYGTMRLDAERLAEARWGMVVADEAQHVKNPYSATARALRTIGAHARVALTGTPVENNLSELWAILDWTTPGLLGTLGSFRTRYAQAVEGGRDPAAAERLARLLGPFLLRRRKSDPGIAPELPPKTETDRTVSLTKEQAGLYEAVVRETLAEISGADSMARRGLIVKLLTGLKQICNHPAQFLKEERPNIAGRSGKLELLDELLDTILSEGAGVLVFTQYVRMARLLERHLAARGVPSQFLHGGTPVHEREAMVHRFQEGEVPVFLLSLKAAGTGLNLTRAEHVVHYDRWWNPAVEAQATDRAYRIGQTRPVQVHRLIAEGTIEDRIADMLLRKRELADAVLGSGESALTELTDAQLADLVELRGGAR

SEQ ID NO: 8297 - protein, 950 aa, Streptomyces avermitilis MA-4680
MRSVPPLAAPESAAWARSLLNYGWAAVFLPGEPARLGRLLLWRPAGAAAAEGMAPTDIETEAAELVLPHGRSVRRRKVEGYALPVALAVAALSGAQPPHPSASAWQAAARFALRLLADGRLHPALTPAGYDTWQAGPFTAAQRRTLDALAGAFPPHAHCLPEPGPTPLRITKPSALVRRFCDAVADELVRTPAAPLAMGALPYAWRETRTVPVLHEWAEETAAAFTADVRVSLRVDVPEGRRRQFRAVLQLHTVADPALVVEAAQLWNEPAETEHLLGPRAEIETLLALRRGAHAWPPLDRLLRDAAPDQLRLTDDEAFDLLGDATDRLRAAGIDVHWPRELVKALTATAEIGQRSAPGSSAGGMLDANTLVDFRWRLSLGGDPLTEAEMDALAETRRPLVRLRDQWVVADPKLVARARRRRMEPLTPMEGLGAALTGEMERDGETFRCAAVGALGDLVARIRDPESRTPAPQPTALKATLRDYQKRGLAWLAEMCELGLGGCLADDMGLGKTITLLALHLHRQTEPATAGPTLVVCPASLLGNWQREAARFAPATPVRRYHGGDRHLKDLAGNEIVLVTYGVLRRDRETLAENAWSLIAADEAQHVKNPYAVTARELRALPGRARVALTGTPVENNLSELWALLDWTTPGLLGPLTAFRDRHARAIESGEDPQAAERLSRLVRPFLLRRRKSDPGIAPELPAKTETDRVVPLTAEQASLYEAVVRETMAKIAEAEGIARRGLVLKLLTALKQICNHPAQYLKEHSLRQSTPLNGRSGKLDLLDELVDTITAEGESVLVFTQYKQMATLLEKHLAERGVPTLFLHGGTPVTAREEMVDRFQRGEVPVFLLSLKAAGTGLNLTRATHVVHYDRWWNPAVEDQATDRAYRIGQDKPVQVHKLIAEGTVEDKVAKLLEAKRALADAVVGSGEAALTELSDADLAELVALGRQS

SEQ ID NO: 8298 - protein, 962 aa, Streptomyces avermitilis MA-4680
MTGRMGDGVVPGGAARAAGAVAVRPGVVVDASVPVRLAAVFLPAPLPRQGRVAFWDPAGGPLPPLPGTPLSDEELTVVRPHGAGVRRGTVPAVSLPLDAALPLLARSRRDPAAHPATACWGAAALHALRLVARGRLLPGLTADGLDAWRAGPLDPEDIAHLRAVAAALPYEGHAVPLPGPGPLRLPEPEALMRSFLDAVADTLPRTPAAAYTSGKPFAAREPQRLPGAHDWAAEVAAGMDAGVRVSLRLDLSAYQLFDDGEGARRAGAAVVQVHSLADPTLVVDAAALWAGEADATFGPRARVDAALAVRRAARVWPPLDRLAEQDVPDVLALSEQELSELLGVAATRLGAAGVAVHWPRDLAHDLTAAAVVRPAPGSATDGTGFFESEELLQFRWQLALGGDPLTEAEMDTLAEAHRPVVRLRDQWVLVDPALVRKARKRELGLLDPVDALSAALTGSTEVDGETVEAVPAGALAVLRDRLTAGVRPAEPPEGLQARLRDYQLRGLAWLDLMTSLGLGGCLADDMGLGKTVTVIALHLRRARSEPTLVVCPASLLGNWQREIIRFAPGVPVRRYHGPDRSLEDLDGGFVLTTYGTMRSAAPRFAEQKWGMVVADEAQHVKNPYSATAKALRTIPTPARVALTGTPVENNLSELWALLDWTTPGLLGPLKSFRARHARAVENGEDEEAVERLARLVRPFLLRRKKSDPGIVPELPPKTETDHPVPLTREQASLYEAVVRESMLAIETAEGIGRRGLVLKLLTSLKQICDHPALYLKEDAGGTAGLAARSGKLALLDELLDTLLSEDGSALVFTQYVGMARLITAHLASRAVPVELLHGGTPVPERERMVDRFQSGTTPVLVLSLKAAGTGLNLTRAGHVVHFDRWWNPAVEEQATDRAYRIGQTQPVQVHRLITEGTVEDRIAEMLEAKRALADAILGSGESSLTELTDRDLSDLVSLRRPT

SEQ ID NO: 8299 - protein, 701 aa, Streptomyces avermitilis MA-4680
MLADHARALDALRSALTPLKAELVAAELESIPVSRLKDVTEGRLRLGAVEAAGFTSVRGVYEAGRYELRQLPGVGEQTADRALAAARQIARAVAETVSVRLDVDHPEPRTTALVVALHRLVEAGPELRRALDAATRLDERLGALLPAARPAGGRLRLALAGRHRREDALAAAAETRDLVAEATARDVPLLLAQASTDLLRDPASDIEAWVDFELRSAEYYSQLAEVSEHRPDAEAGEGFLPSGVAERVHAQPLDDTHRRVSLRGYQSFGARFALAQRRVVLGDEMGLGKTVQAIAALAHLAAEGHSHFLVVCPASVLINWTREIRARSTLRALPVHGADRRDAYEEWRERGGVAVTTFDVLHSLPVPDTEKPGMLVVDEAHYVKNPDTRRAKAVTGWTAHCDRVLFLTGTPMENRVEEFRALVRHLQPALLPAVQGGGVAAGPHAFRKSVAPAYLRRNQQDVLTELPALVQVDEWEELSAADRDAYRKAVAEGNFMAMRRAAYADAEKSAKLGRLRELVAEAADNGLKVVVFSYFREVLATVQQCLGEPVLGPISGGVPAARRQRLVDAFAAIDGHAVLLAQIEAGGTGLNLQAASVVILCEPQVKPTMEHQAVARAHRMGQIRTVQVHRLLATDSVDDRLLRILKNKDRLFDAYARRSDIAEATPDAVDVSDASLARRIVEEEQQRLAARPADQPARTTS

SEQ ID NO: 8300 - protein, 1166 aa, Chlamydophila caviae GPIC
MLNFRKLRRDFTANILQDGKELFDQGAVINAKILSMNGESVCIGAQVRGLYDNVYECEIEVDRSKSDTIDSNCDCSYNYDCQHIVALLFYLEKYFNEMVVAYSQEADLETNQEINEEVKKELQETFVAAASREEERKDRAHQKEILSEYVHAANALSANPFFLPQEYLEKNSAELAVLFVASNDEVFRPNQHVEFQLVLRLPGRSKPFYISNIKTFLEGVLYQEPIILNGRRFFFTMQSFNVSDRKLIDLLIRYVRYANQAPEEKLLKSAYLTLTSLGVILAKMYEHQMADRGGGQVGEKESFSGMFCGNLEEPLYWSASAAKMKFDLDFFDTPYKALLMTPLILVDDETLQPEQAILLESNVPGIIHNNVYHHFAPQIRRAHLRSFLRLRDITIPEALFGSFRENALPVFKEYAEVSNVEVLNPFVTLPYVEDIRGVCNISYLDGELEAKLHFIYDSLTIPAASFALKYQDVHAFIRDDGILARNLVEERKITEEVFSGFIYDERDGAFHVKSEKKIVEFMTETIPNNQHRITFNCPETLSDQFIYDETVFDLSFKESSEVNTYEAELKVNGLLKGISLDLLWDCISAKKRFLELPKKGRNVKTPRRGRASSTTKLPCILVLDLEKISPVVQIFNEIGFKVLDNFVEKCPLWSLTGISPEIFKGLPVNFTMTDKLAEIQKQIRGEVAFDFQAVPEQIQATLRSYQTEGIHWLERLRKMHLNGILADDMGLGKTLQAIIAITQSRLEKGKGCSLIVCPTSLVYNWKEEFRKFNPEFKTMIVDGIPSHRRRQLAALSEYDVAITSYNLLQKDIDTYKDFVFDYVVLDEAHHIKNRTTRNAKSVKMIRSGHRLILTGTPIENSLEELWSLFDFLMPGLLSSYDRFVGKYIRTGNYMGNKTDNMVALKKKVAPFILRRMKEDVLEDLPPVSEILYHCHLTDSQKELYHSYAASAKKELSRLVKQEGFDRIHIHVLATLTRLKQICCHPAIFAKDVPEPGDSAKYDLLMDLLSSLVETGHKTVLFSQYTKMLSIIKKDLEARGVRFVYLDGSTKNRLELVNQFNEDPGLLVFLISLKAGGTGLNLVGADTVIHYDMWWNPAVENQATDRVHRIGQNRSVSSYKLVTLNTIEEKILSLQNRKKSLVKKVINSDDEVVSKLTWEEVLELLQI

SEQ ID NO: 8301 - protein, 1205 aa, Chlamydophila caviae GPIC
MVLNALAGFRQTAIDYLATNRQDIALDFSGDCYNIRIPDEDSPDGNWLSTLRFSDIDNLTFASCSCPDGDCCVHLMTAFFSAYDAHGWLPLHHKFDISFWHALFLKLFLEEAQLHADGDRQYSITSPHITLEISALSSEAFTEWLPIIHQTPEPKTYTKKTFPQSVLYRVAKQFFFFSEAGARLDLIENSQGFPTQFAMQWEGISLKGEILDFSTLENLFPKINFSQTSLPGNYSDFSITKVRVAPEESKIYFTVEPIAHDHANQPITEIGSIGYIAGSQQVILPSKETFVSIYLISLLPETLKKQILALLHYDSEERPIRYSIHFLRDSSISFSAYLDTPGDLENGKLIYPDFCYVPEKGLFTVVGLLSPQISFVIKADQVEEFLNNEGMLIREPGFEVFTDRIPEGQLTYNITQQGVLLFHYNTGNPAAIDIHYGPWTYYSGQGFFLQRKADLEIQDGLIVEADHIPNFIMKHEVVLRTIPNFFAPTPPLKNLFFEVHKETKGSGLYLKPVFQGLEEENCRLFGVFLYRENLGFNLLPTPLQPLCSLPRKIPAEQVPDFINQNSQNDKLVFTDPQLCPPVTFELVILSITRPHPSSPLHLHLELKTNIGSIPLGIVLQALKNKKAFVFTKAGFLSFQHCLFQFLKQFISAQKCLIPENTVIATVTDIFKLDALAPLSTHEHISASASDLAFFSQLKAACLPPIPQSLFSTDHKLRPYQNSGLLWLWFLYNHRLSGLLCDEMGLGKTHQATALLDIVFQSAEPTERPKFLIVCPTSVLPHWEHTLATHLPTVSIFAFHGPNKPENLPPTDVIITSYGTLRQNYAKFYKVSFTVTVFDEIHMAKNKNSQIHKILCRLDSQMKLGLTGTPIENNLLEFKGLLDIILPNYLPSDALFKKLFTKKTPAEIDDEIIPSQDLLLKLTRPFILRRTKKLVLPELPEKVESIIPCTLSPEQKKLYQSTLKREKAQIQQLESPEEQTVNYLHVFALLNHLKQICNHPAIFFKNPDKYREHESGKWNAFVRLLHESLSSGYKVVVFSQYIHMIRIIMLYLEEIGVKYASIQGKSLNRKEEIEYFTTDPECRVFVGSLLAAGTGINLTAGNVVIMYDRWWNPAKENQALDRVHRIGQKNTVFIYKLMTEDTLEERIHYLIEKKIRLLDKVISTQNSNILHMLNREDLITILSYKDERNGVDDTANIPNDEENSIF

SEQ ID NO: 8302 - protein, 802 aa, Sulfolobus solfataricus
MWIVHGVWDGKRFGIWAENNEYYRFASVNDLYSLAEALDFYPEFKNENIIFPVDSNGNPVFYDYSSASGVSSFEVTVAKARLDEVFKILRLKKVKDVLYSSSMFFWRDLLKTTLELVKSGDIVPTLNVARKRIDNSLMRETSLYKQEIIWKPLIEDNDIINVANKAPPDAFLENSERLDLIKSFIQEIIHYIVSESLSENYNIILSSILKRRTIDPYSLIQDVKKSNYTLYFALLYNDEGGKIISGLFNKDENTIITFDVIHNNEYLKRIYYDLLSSTTNMYYKLNGLFLGEVNLDAKELDDFLEIVPKLRHRGFKVFTKIKRIRPIIRINSDSYGVFSRNMLSDFDYKISIGDKDISEEEFMKLVSENRTIVELGGNLVEIDEKSLQKIKDLLYKIKSKKIDKIDILRESLLGDIEINDELLDRLRGNKSFQLLEPYNIKANLRPYQIKGFSWMRFMNKLGFGICLADDMGLGKTLQTIAVFSDAKKENELTPSLVICPLSVLKNWEEELSKFAPHLRFAVFHEDRSKIKLEDYDIILTTYAVLLRDTRLKEVEWKYIVIDEAQNIKNPQTKIFKAVKELKSKYRIALTGTPIENKVDDLWSIMTFLNPGLLGSYSEFKSKFATPIKKGDNMAKEELKAIISPFILRRTKYDKAIINDLPDKIETNVYCNLTPEQAAMYKAEVENLFNNIDSVTGIKRKGMILSTLLKLKQIVDHPALLKGGEQSVRRSGKMIRTMEIIEEALDEGDKIAIFTQFVDMGKIIRNIIEKELNTEVPFLYGELSKKERDDRECSHAVILFDII

SEQ ID NO: 8303 - protein, 124 aa, Sulfolobus solfataricus
MRTLPDDIISKFQNNPSVKFIVLSVKAGGFGINLTSANRVIHFDRWWNPAVEDQATDRVYRIGQTRNVIVHKLISVGTLEEKIDQLLAFKRSLFKDIISSGDSWITELSTEELRKVIELSVGGY

SEQ ID NO: 8304 - protein, 133 aa, Saccharomyces pastorianus
EFYANPQAKGKKTMKFNVLLTTYEYILKDRAELGGIKWQFMAVDEAHRLKNAESSLYESLNSFKAANRMLITGTPLQNNIKELAALINFLMPGRFTIDQEIDFENQDAEQEEYIHDLHRRLQPFILRRLKKDV

SEQ ID NO: 8305 - protein, 1041 aa, Mycoplasma penetrans
MKTINIADLKDFFYSPEVVKESSDFLVSTKLSDFLIEEKNSNIIVSCYIDSYSIKVKIEEEHVIDCDCSCDIYLMSKKICAHIVHVIDLYNQYVKHDFAQYRNASDVSFSVAPVIKELSNGKKKIEVEFYFEQSYKKFFINNVEELFSHDDKYYFFPLLFFNKNQIEYNSLLLLNELKNFLNSKDVTYKQKSILIDDNDLGEWIEFCSKFNILFFYQSNSFWNSTTYYLDKYNYDFNEQCKSSINNKRKFLLKTSRDLNIFHFTSKNDLFMFVHSKGKSDLYIYKYDLSYLNDVESFTELINKQISKNDFYKLYLSIKKLFSNYERIIQYLFIIKNNVSKIDPVLEVKVYYEKLLNVLAAKISFFYGDIEYPYKENETNYFKRERFLEQNLLEPLLNFFNYYNAEFSVFEIVDHQKYLDFLNWNRKVIKNDLYKIKISENLIFKPKVKKEFHVSASSFENDFLKIEWSIEGFSEEDVLKVLAAYKQKLKYVTLSDNKVINLDLDINFEKFDEDLKLLNTSIDFIDDRSILVNRLNSNYFLENFTLDNSDGLKEYVKKLYDTEIDVKNELPVNLKNILKKYQVAGYLWLKKLLHLNAGGILADEMGLGKTMQTISLLSDVYYNNKTKLPSLIVCPSSLVYNWKKELSQFAPFLKIGIIDGTQLERNEVLNNIHNYQIIVTSYHLLNKDIEVYRNMEFYLQVLDEAQKIKNHYTQFSKDTKSVNSKYKIALTGTPIENNLLELWSIFDYIMPGFLYDYKLFKSLFQDKIIAKDEEALKKLKTKISPFILRRTKEEVLKELPSKTYKIMTCEFEDKQKEMYYAELSKSQIAIRKGIEDKTINKQGAFIFSVLTKLRQICCSPKLSYENSDINGSKFNLCIDLIKDLIKNNDKILLFSQFTSMIDLIAQELKKLKINFLVLTGETNKKERMELVNEFNNKNNIKIFLISLKAGGTGLTLTSANAVIHYDPWWNLSLENQATDRAHRIGQEKNVFIYKLIVKDSIEEKILSLQESKREIINQIFDENSSNKNSININEILKVLDIE

SEQ ID NO: 8306 - protein, 1149 aa, Geobacter metallireducens
MRGRKKRMPARPGAARERIRSTAAPAVGEKVLNALRDLPAGMIYTLGAKPTVLRGLALAIEKRVKGIDWSPDGATLFAEVMDGSRHHEVRLEANGGFLTPSCDCPLWRPTGHCPHVIAALAVLKKGLVHQAITSLRLDSDYLAEVSGWLSGVEAAQPTAPAVPRLVVERGADGIQARIWLGEHPVSIHDQALPRTVRDFLWTLLNPRESGFIIERYLEAFGDDAPMALRQDDNEIPLRFDRGRVHGTLTLLEQVRGMVIARKGLEDGHPIPDTCFAAYRYYFDIPAGAVRVIDSFEGWDLWNTINYEAAEWSLDTGVSVERNSRTISLPADAFNAIGLTVTEKGLPTILERIRFYGAGGPGEPARITHNYRLRVADMNDTTALLLAEGVYGDAAIPLSAGAFSFFTSRGRSTASVPLRTKKRSSAVIAGCFAALDCVTRAELERTIRHALAGDDFLKRTVKSEAKRIITAFAAACETRETTLLAADGAWLISVAEPKVEAQLLEIPYRLFGAEIFGSSDLAGAMTVNRDALFRQFPALHNRLAEAGFDLVLQDRPVEAVTLDVTLDATRSTLDWFELRPEIRCGTGELTEQEIAEAMASGGVFRRGDSFLLINEESSRILAMLYPEAGVKKRRKAEVVRIPRLQILDWLVLRHHGVSVRLSPEDERIFASLATFEEIPSSPLPERLQATLRHYQVDAFHWLAFLYTHRFGACLADDMGLGKTIQAISLLAALHEGTLPSRVPEPRPHLIVVPPSLLFNWENELARFYPAFTVLTYRGTGRSADFTGVDIVLTSYGIIPRDIGILAEIPFHCIVFDEAQAVKNIQADTTGACRRLRGAFTLCLTGTPVENHLGEYFSVMDLAVPGLLGSYEEFRRQAGNAAAPFLETLVRRTRPFVLRRSKQMIAAELPPKIETDIYLELTPRQKALYTRTVEEVRETVLEAWRGKSPGQARIIALTAILRLRQLCLSPRLLIADSREPSPKVEFLVEQLEELFTEGHSVLVFSQFTSFLDIVEGELSRRGVHYYRLDGSTPVPERKRLVTAFQKGDEPSVFLLSLKAGGKGLNLTRATYVFHLDPWWNPAVENQASDRAHRIGQTRQVTITRLVMRHTIEEKMMELKKRKLKLYHALLEENSAGDGGGISREDFEFLLG

SEQ ID NO: 8307 - protein, 1357 aa, Azotobacter vinelandii
MSSPAVRSTLASLPDAYKALLYVLFLASPRNKSTLLEQLKRLGVRATTSRAMDGVALGEMLETLQRLKWLERGDERDFFRLNPLACNQVLLLLQSEPQWWPKLRGGLVEHAVATPGGLPVSLWRGLWLALLAGEVPELTQLLLGMEADRSELPHPCGQLLADETGRQLFARLTPGVREVLLEDYLTRANEGLVAAGETYRQGLALLDSDQAKSTELAFQLFLQALWRGDWTRFEALGRSEWVPFGGVFEYLLRGKPGEALEQIQEYIRIQRGSRKRRVELPPTLNACYCLLLLVDGDGQQHAALRQALGLGLKKGLGTAYQMFEKLFEQFQGKGVRGADPAYRVQRLEGFDGLLTAIALYWMDAPASSAWQRRLAQFRTELEEEGYAWLAAELDVLLERQFGLPPAQADWHRSLGLRPLVDLYRRQELWEHALAALAALRPGARSSAPPQPQSSHRLAWMIGSPLTPSPAIEPREQRLGAKGQWSKGRPVSLKRLLEETGSFDYLLEQDRRAIQQIQMHSDAFGIRYQLDGERALPHLVGHPALFWSDAPEVRIDLLAGSVALELRQRGAQIHLALSPEGIADCQGLFIERETPTRLVVYPLGREARQIAEIIGGGLTVPQAAKAQLMETIGSIAPLLPIHSDLPELAVNIDKVTADGKLYAHLLPLQDGLRLQLLVRPLAGGSWFRPGQGAESVLGEQDGKPLQAVRDLQAERRKLKQVLQACPALAEADSEGHEWQLAEPQAALQVLSELQALDAELLECVWPEGERMRIRARPGLRQLQLRLRQCGDWFELDGEVVVDDGRVLKLRQLLELLQSNPGRFVRLGEQDWLALGSSLRRRLDELGRLAERSGAEGLRLNSLTAPLLAELAEEVGCFEADAAWKEHLSRLESLRDYRPRVPNTLQAELRDYQLEGFDWMARLAKWGVGACLADDMGLGKTLQTLTLLLHRSAEGPQLVVAPTSVTPNWLAETTRFAPTLRLHAYRESRSLDGLGPRDLVVTSYGLLQQDAESFAAQRWTTVVLDEAQAIKNAASKRSQAAMALQADFRLVATGTPLENHLGELWNLFRFINPGLLGSREHFTQRFAGPIERGDQGARKALKALIQPFILRRLKSQVLDELPARTEVVYRVPLSDAEQHLYEAMRQQALESISQSGEEGSQSLRVLTEITRLRRFCCHPSLVLPDSDLPGSKLAAFAEIVEELLDSRHKALVFSQFVDHLSIVRKWLEERGIRYQYLDGATPAKERMARVEAFQGGDGDIFLISLKAGGTGLNLTAADYVIHLDPWWNPAVEDQASDRAHRMGQQRPVTIYRLVAENTIEERILALHGQKRDLADSLLEGGEVSAKLDAEALLRLLRGG

SEQ ID NO: 8308 - protein, 872 aa, Azotobacter vinelandii
MQPDFLRMRLEDWRDQFDPGTLQRGQDYASQGRCTLLQVAPDEIDASCRGSVTRRYRQHIRLQSRADGWRIDGRCSCPVGHNCKHVVAALLTLQRQSPPAEPKAVLPERRIDDLEPAPQLTLGSHVRLHYDTRKGRMVEQLQHRAALAFRYGDQLAFGKPAKDLLVPGATEILRIRRHSESEARHRRTLAAQGFHIALRKSEALPETVGELLELLDDESWLRWVRHDLPRLREQGWHIEMRPDFHYNLLDIDDWYLHLEPAAGQDWFDLEMGIEVQGQRLSLLPILLHAIRHSPWLLTPEALARRADDELLLVPVSRTPGVTQRVALPFGRLRPLLASLGELFFQRPDEAPQRLRLARPDAARLAALEAELPLHWQGGETLRDFARRLRDLPQQPIAAPAGLRAELRPYQLQGLAWLQALRELRVGGVLADDMGLGKTLQTLAHILLEKEAGRLSAPALIVMPTSLIPNWQDEAARFAPDLRVLALHGPRRSALFGEMGDADLLLTSYALLSRDLKALARQSYHLLILDEAQNIKNPRSKAAQAARELDARHRLCLTGTPMENHLGELWSLFHLLMPGWLGDQQAFKRNYRLPIEKHGDLARLAHLKARVRPFLLRRTKEQVAPELPPKSEITQYLDLSEAQRDRYETLRLAMDSKIRAEIERQGLARSQLLILEALLRLRQVCCDLRLLEDEAVAGCQAADSAKLSALLPMLEELSAEGRRVLLFSQFTGMLELIARELEARKIPYVQLTGATRDRRTPVEEFQAGRVPVFLISLKAGGAGLNLTAADTVIHFDPWWNPAAEAQASDRAYRIGQDKPVFVYRLIARGSVEEKIQHLQKAKAELAHGLLEGAIQGEWRMEEEDIAALFAPLE

SEQ ID NO: 8309 - protein, 188 aa, Azotobacter vinelandii
QALRELRVGGVLADDMGLGKTLQTLAHILLEKEAGRLSAPALIVMPTSLIPNWQDEAARFAPDLRVLALHGPRRSALFGEMGDADLLLTSYALLSRDLKALARQSYHLLILDEAQNIKNPRSKAAQAARELDARHRLCLTGTPMENHLGELWSLFHLLMPGWLGDQQAFKRNYRLPIEKHGDLARLAH

SEQ ID NO: 8310 - protein, 1426 aa, Plasmodium falciparum 3D7
MFRNVRDYFKSSNDVNEEKKNDVGSVHMDENTENYDKESNGFVHRDFNNGINKEDKDYEELDLKKLNVSSNDITKEGNNMNENMMNRKLNSSVEDGNDNNHDKNVHRNIGNDTHVSYDDKRKSYLDNNEENSEQMNDNMKKRKLNEISYDNNEEDEFRNKKDDSMEMNDKEKGSTNMSTINDNNNNHNDDSNNHNDDSNNHNDDSNNHNDDSNNHNDDNNNHNEDNNNHNDDNNNHNDDNNYNSEEKPNYLQEKLEQLLAQTKRYTEKLAGQRLKMNAQMKSSKKGRCLLTEKEEDFMLLKDANEEDEAIILKQPMNINGTMKPYQLEGLNWLYQLYRFKINGILADEMGLGKTLQTISLLCYLRFNKNIKKKSIIICPRSTLDNWYEEIKKWCTPMKAFKYYGNKDQRKELNRNLLHSDFDVLLTTYEIVIKDKSALYDIDWFFLVIDEAHRIKNEKSVLSSSVRFLRSENRLLITGTPLHNNLKELWSLLNFLMPKIFDNSEEFDNLFNISKISTNDNKQSEIITQLHTILKPFMLRRLKVEVEQSLPPKREIYIFVGMSKLQKKLYSDILSKNIDVLNAMTGSKNQMLNILMQLRKCCNHPYLFDGIEEPPYIEGNHLIETSGKMSLLDKLLPRLKKENSRVLLFSQMTRLLDIIDDYCRWKNYPYLRIDGSTPGDERQVRINQFNEPNSKYFIFLLSTRAGGIGINLTTADIVILFDSDYNPQMDIQAMDRAHRIGQKKRVIVYRFVTQNSVEEKIVERAAKKLKLDSLIIQKGKLNLNSAKENNKQELHDILNFGAPEVYKTQDISSISDEDIDIILADAEKRTIEIEKKLKNLENIFDLTNISLDGGLNMYNDLEKEASEESTDEEDSSGSGEETILEGSGNNDIVEENGVKKKKKKKKNINKIRRTIKKFLKNNKKNMTFLDLGERKSKWKVMNTACGRTNKKKMVLHGWRAEARGGHDFQFFNVEKLDELEKIEDKWNNYMINQEKINVLIEAQNEEKDYEKIVTFNEFLDKHAKNIYQIITLINPSLFDEHKDTKEEELLKMGTHSDVNSNDKDYKRSSFMSTDYNMKTTYLNNINSNNNNNNNNINDNVGTSINTIDDQQYFKKKILSLFESGKKLQMIKFKDRNIKNCYTQVANFIKKNFPEKINNNDTNNNKSTTLKNKKLKKGKQTKNVNVEKDIASVDIEKIKLQKQELMKQGFAKWNKAEFNKLMSGLIIYGTNEVEYIYEKYFSNSKKSMEDIKAYLTVFFRKYDQIKGGVRLFDKIKRSDLQKKIIEEENDMITEFVEKQLSEGVDSIEKLQLPSNLRYDFMEKREVLNITEEVKTENEENVLSNEELAYYDRENKILLWLLYQQGVVQIKNIHILTPYYWPEAYNFFKYATTPFENVEYRCRLIVDAIAELYAKKENVPLNNKDKRRI

SEQ ID NO: 8311 - protein, 3328 aa, Plasmodium falciparum 3D7
MNNNSNMREAVPHFTTDNKNNESENSIMKKNLTSNFMGQVNNNKNSTCSATYLNNTNNMNISKDKNYNSNINNDNASISITNSLLNNDQNMSMRPQMGMNKNCGGGLHNSYQKSLLSSYNMNNMSMNHLMNNSMNRYNSLNNNNYPHQDMNQTNMHMTNIKSALQNNNNNNNNDMKGNNMKQNGYMNNNNMNYQRNDMLMRNNSNSFNMAGNFYPYMNNNNNNNNSNNSSNNNNNNNNNSNNNNSNNNNSNNNNNSNNNSSYYGASSVMGLNSNTNNMMNNTSLNNNFNNNNNNMGAENNNKTMSLLNKTGGGSLDNNNTSHQPMKSLQSTINLNNRNINNMNNVSGNNNSNSINSNNINSNSVFNNNNSKGVGSFISNPSMNVKGISSVCNIASYRNSTSFEKTNSIIDNNMRYMNVYNKMGYNNNVNDYHQTYDNSSALNDNLNNKDKKGKEEGNGDNEKNGTSNMMNNDNNNNNNNNNNIGDSKLRKKRGESFNTKGIIGNNAESMIFKTYNKNNDMDENNNKYGMNKGNIEMMKDSSANVSKNDNIMNNLSNNNIGGTTSNPYNLYPNFNLKYPMNMDMFNNNNNNNNMSSFNMLNRNLMNSHLNNNNNNNNNNFSSMSMFNNMGDNNNNNSSSSSMLYNNMNNFNLLNAYNNNDNNNNMNMNSIGVGLNRYNAYKNMENIKNYNEALMSGNVGGAGNNNLSNLMNMNNFNNMGYLNGRSCMNDMNMRLLNNSKFLPGNMGLSNNNYMNDHQYMNNNENLYGMMYNNMDDKNNMKYSRKGSLGAKQQQQQQQQQALSTSKGKKSASQKKKKSKNATATINGLQGGEEKLKKGVSGKIGDDFIMDNNGDLVNDGNNDDNDLYVNTYVKKSTTTKSSTRKSSYYYETAEDKYNEKVRKNEKYDIFVSPNIGTIEGGRTNLRQRRKVHNYAQMEDNYFETDEEDKRVDEEKFLLRQEKQSMGGIDRVLHHRKILDYDKINSICNNPYLYINKKNKLKGNEKNSDSNDKEKSGACDDGANIGKDNNNDVNNEDVVKDETIKNETIKNETIKNETINNETINNETINNETINNETINNENVKKENLADNNNNKKNEVTNVDSNKQTNNNADNDEANAVDEFCEEEDIEDINEVEFLIKWIDKSHIHNFFCTYDYLKNFHGIKKVDNYIKKIRQSFQKRKFMTADEIEQEKIYSEIKKQIEMDAIQAERIVMHKISDITNEQVFLVKWTSCAYDQCTEETKQTLIDHGFGKLIEEYFDRESKIYGMKAMASVWNRGPLSVTKFDPYHETPFYLNEKKLRAYQLTGLNWIVSRMKRNLSVLLADEMGLGKTVQTIAVVGHMLYKEKLIGPYLVIVPQSTVDNWLNEFKSWLPQANVVCYHGNAVSRELIRTHELKKVYVPNKGYRYKFDVCITTPSILNSVSDVELLKKMPWQLMVVDEAHQLKNRQSKRFIELKQFMAESKLLLSGTPLHNNLEELWTLLHFLNPQQYTYYETFQKKYNEIENTSLIGEAKQKQLIQLQHELHEVILRRVKKDVEKSLPNKVERILRVELSPIQIEYYKNILTKNYEQLAKASGGAKNSLQNICMELKKVCNHPFLCAEPLDKDEYKERLVYSSGKICLLEKLLIRLKERGNRVLIFSQMVKMLNILSEYLTLRGFKHQRLDGTMTKEMRKKAMNHFNSKNSDDFVFLLSTKAGGLGINLTSADTVIIYDSDWNPQNDLQAGARAHRIGQTKTVQIYRLVTKDSIEQTILERAKVKMVLDTLVVQGLNKKQNDNVNYVGGETGGSSNGFTREELSKILKFGAQKLWEKNSSKYSPQKLDEDKNAIKGVDVDLDKILEEAEINENANNANKELSLNSELNALQGSSNFFNSGNSLFGNTNLVGTNGATGGSGGIADDLLSSYNNITEFKYEPPANLKSNIYNDSTKADEVDEEENDKDFWDKTIPLEERLKLKRMKEEELLVHGPRKTRAKDMRSVLYMDHGHYYNNTSSSHHNNNAHGNNNEDEDSDEFTIKYNDKNSKHLKKKRQRRTSTHITEKDKFRLYRSLLKFGNPSLRLDDIQEDAKLTKVDKNVILTELNIIVETCNEIVERVSKNEQVDDNKKEKDIVVDGVVNNDDSKTKGSNNDVADVNSKDGNKLKKGIEEENPDASLNTKDEEDNNASTTGSNNITTISCDDSNKQDDNKKKVEEEGEKDDTLINDTIGKEDEEGGTIGTVVSKRRRGSTLNSNSSSVMSHGMKTRDKASKDDDNNNNNNKNDGNNKNDDDHHKNNDDSVEDELLLNQNDDDQLHMKNNENSNDESDGGNNKAKGIDKGKKMDAYTFFIGTNRANALDLCQRLKLFEALHNFIKEQNNDNEYSFKLPLKKCEEVTGEDDENGKNNEKAQTDEKTEDENVKNNEVVENNNNDNNNNIPVDVMIDSSKDYLKLKLPDSIFKHIRDLTSKDVKSWTRTDDENLIRGIYVYGFGSFNEICADAHLNLSHMKNIKCDKIKMRCVRILRMIEEVYNNKGNEQSGGRKRRRTKNKNNANVEGVTMDGSVKKEKRKYNTNSNNNNNNNDNNNNNNNRDVDADMDVDADVDVDVDVDVDVDVDADVEYNESSSKGHLKSGALIKVDKGNNNNNSNTTSRLSSNRKGNHYSRRSGERMKFTHLLVDKNSASAIRKRRGYIKRGTASGVSSSNVVGGTVNGNFVDELNEEVEGEDAFLETQEDNELKERHKSNENNKHHHNQHYYNSKKSKKKKHANVDVSKDDKESKRKRGNNNKLNNEYDYYNYDNNEKEEDDEGGGTKFKDNEYNDDVDDDDDYDDDDDDDEIDPNLQRLPLRFPVIEKRKAKSTILKNAKNETIVCIESSDSSSSTEDKSIRSKGDEYDEEDEDEEEEEEDDENEDDDDDDVEDEDDDEESGECDKEEETGKRKRRRNSRYYKSSNKYIKDNEMLDITSVGANDEYKYEDGDNLERKKRSSKKDKKKKKNKLKEKKNKRKRKRRKIVDENEIMDKIKNLNINHMDYEQQQHCIKKLVKKCIKKYKKLLKLIKKVILLSVENGNQVNEEENQSQVVLEHEQQEDVLSSGRGRRTRTGTRTSTRTSTRRDMDYKKMEGGRRGGGGKTTSDVTTTNSYEKDENMMNKSMTKILPPEIFEKIEEFIIFIGKYIDKFCSICKDMECREKLIQASWEYVSKFVIIIMDGTNNKSSTTNSKTNSNSSSSRTKGKVNNTVKMNNSEVLRDMYKQWKDKKQVKGSDENNNNDDDDNNNNNDNVIEDEKVFIEFFYAKKASFNKNVRDRNYINNDLYSNSNELVYSKKGNKSEEPLSKVRKNELLEENNLNINDSNESINGEVED

SEQ ID NO: 8312 - protein, 1997 aa, Plasmodium falciparum 3D7
MINSDNKCMNDNKESIPKEYKTQDMIEGEKERKNKIIKEYIKNMNEEDFLYLSEHLKIRIDNEIFMSQELNDYINKHIDIICELHFKNFKRPKTHMKKVFIDLTLKLKYLRHLEYLKRKKKKDKENKSKSKKEKNNKNEKDDEMENKKEKNNKNEKDDEMENKKEKNNKNEKDDEMENKKEKNNKNEKDDEMENKKEKNNKNEKDDEMENKKEKNNKNEKDDEMENKKEKNNKNEKDDEIKENMDKVMENQLNQSNILYNKDRIRKNRNNLKDEKDVSNKNILDDNKDIVEFKLQDISSGYSETSCKSTNSIENGNSSSTSSCDDDSSFLFSCSSDCDEETSDEEILSTIHFDEKEMSTLKSLEKAKNVYFAYINKKFKKYNILDHFNMNFLERLNYYFSKLYYQNNNLKQTNEYQNRIKEFLSNEENVKKIELNQSKLRSDILNSMFGFHIINETHPMKLPIKNMNNLSYQNTKVDNIYAYKSNTNKCRVHTKLNQLYETNDNIRNMNYYKTIEYMNSENNINNMNILNEWTNFMDQNINIESISPEQHKKGNRKKKINTKKLYHHDNYNNNNNNNNNDNNNDNNNDNNNDNNNDNNNDNNNNINCIYGEHHNVKHKKRKSTSKSKHIFRSNEVSIHFNDDIKKIEHVAKKELQEYIKQIHNKSKIHNNISSLKQYMLISNWKELTKHNNYMTLLSEEKKRNSKILANLCYNQMKAIDQKRKIILEKEERERMKLLKDNDIEAYMKLIKTAKNKRLQELLDVTEQFLNNMSKCVLYQKKEAYQESSEQNFHGLINHKNEDNEKCHKNYNSKDNNNILQSVHNLTTHGQQNGYNNKKGYDTMYEHNENNTKICNYKNARENYYNISHVVKEKVKQPSILIGGELMKYQLEGLEWLVSLYNNNLHGILADEMGLGKTIQTISLFAYLKEFKNNINVKNLIIVPLSTLPNWISEFNRWCPSLNVITYRGNKLERKHIAKKLLEQTFDICITTFDLVIKEKSFLMKISWNYIVVDEGHRMKNNKSRFHVFLSEFKSKYRILLTGTPLQNNLSELWSLLNFLLPKIFSSCVDFEKWFVKSLHNEKDVYEHITEEEQLLIINRLHSVLLPFMLRRVKKDVLKSLPKKYEYNIHIELSLYQKILYKQIQTKGFKQVNHNGSITTKIFQNIVMQLRKIVNHPYLFLYDYNIDENIIKCSGKFEVLDRMLPKLLKFKHKVLIFSQMTKLMNILCDYLEFRGYKYHRLDGNIGLQERKKIIDQFNNNVEYKKDEGKQPNCEMPGNENMNMSGNENMNMSVNENMNMSVNENMNMSGNENMNMSGNENMNMSGNENMNMSGNENMNMSGNENMNMSGNENMNMSGNENIKMISSQNEKDTSSQSVKISELKKEEINDFQIMDDKNVNGGNQDAMIFILSTRSGSLGLNLQTADTVIIFDSDFNPHQDIQAMCRCHRIGQKNVVKVFRFITLSGVEELVFKKAQHKLSINDKVIQAGLFNKIYNDEDRQNKLKDIIQRNQKNDMTTHPTNPLLLNYYMKRNEEELEYFLDFDKRYFGEQYFSLLNTLNVENVDSGQFTYMSEDEKEENETYLSSIIKKEKKEEEGEDDEENQRDRNKEEDQDEDKDDDKDKDKDKDKEEEEEKKRKHILNNNNNNGIQNGSSINEGVKEKILDEYCNNNTKCVKVSNERLIFKRKHDTDDLQCEDEKIKENEECDVDNIIQNKNNKRLKMECQKDDKDDDINSNIHMDEKKKIYMSSEKDDTTKEYSDTHDPYINDKMQVKDEEDYYGFILKEENQNDIEKILIKSNKLINKDELPAYLFYDDTNDSPDKINLKRSRKVININLMQEEKLTEKQFLKLIDSSSPNLLSSVEKDLGRNKKDIVKSDMEHNNDITTLEEVKDREEIKEEHLETTKNISSLNINDLEINKTLTNENVHSTKKSPYNMRSSKRRSDTSSTYMETSIKKRNDKDIHICLKKGKKRNNSMEHTKQECHVDDENKKRVKKRKSSQ

SEQ ID NO: 8313 - protein, 906 aa, Plasmodium falciparum 3D7
MEVFNFGKYNGKTFEEVFEKHKSYVTWVKSLESPSGSLLDFKNYVLQKEGKKNSSNMANNNHYNNEKNSNNNYSNNMYENNVRSPNIYNEQYTNNNKMKENYDRNANMNNNEICTNNNRINENNVKSPHYYNNEKNINNYSHECNRSKIAYKHNYSENRNSYNNFEKSSVDTNYTNEEKKKFHNMNSSEYRNYEEKVMSDINNAYNQPEEKKEFDIIVAFEIFSDDSFKIVQKDNNNKKFVSFRNFISKDLFKIISELNPTLKKINNYTCITFEAEKYEYVLNNLKEKCTILGGVHTIPNFLLKCFKNYTKFSEPQRISEITANILTNTMCSYTKQHYDKLDHLLGEKLSVELRNFQREGVFFGLKKNGRVLIGDEMGLGKTLQALALMAFYKDDWPFIVVCPSSIRFQWKDQALRWLSHLIREEHICVVKNGKTDIPSNTKMIIISYELITKNDKYQDKYKSIICDESHYLKNSLSKRTKVITPIIKNAKRCVLLSGTPALNKPSELYEQISSIMPNFFNYHEFCDRYCFKDKNLYTKKIEYVGCKHTEELHLFLTNTIMIRRLKKDVLKELPDKLRSKIPVEIPQKELSEILNYYKKLESKKNINFHDIDNIHLSNWSNSKSEDGDDENLSISHLFKITGYAKVKAIKEYISYLIDADIKFLLFCHHKLVMDEVETFLKEQKCSYIRVDGLTPMEKREIYIKNFQNDDNVKIALLSITACGMGLNLTAANTVVFGELFWVPGQIIQAEDRAHRIGTAHDVVNIHYLIAQNTIDEIVWKIINRKWNTLTTALNGIEDSLNVKEVNKFDKFMVDLTNDTNKSYPTSLVTTPKVRRKSSEHGTFHNSSPKKKNRDIRDFFTANKCNESVEKSWNNNINKRSYHDSPMNDSPNTTLKFLSKKYKTEIN

SEQ ID NO: 8314 - protein, 1647 aa, Plasmodium falciparum 3D7
MAKKIDELFSKKERYLKEIIESNCIYVKDLNHWVGTNYIARLKLKKELLKVTPKLLINKTRSRASRCRVCGFSIEKDNLRIGYPTKDPRGDYGYISCWVHIECSKKILYSCLYIEENENVLKGYLHEYKNHNCSGEHYNKYEIYIYNNLQWDLFFGGIENINEEELSKLKEMAKPYEIKNDLKCRNSFEMLINEENEKINSLDYLNVEKKITNYNLIIPKELKYDLLQYQKEGIYWMINQEMSNVKGGILADEMGMGKTIQAITLILCQKLNKLKEIKKDERSDDHDKVGYKNDDEEDEKKKKKKKSHMLHGDIYKEDILSFEERDTKHEKSIKEIDIKKSYKNSSSILYCKNSTSDDLKVKEESDCSVILIESDDTQNEKMNHKNDVMAENKIDTENVLNVKKIKNIKKECVNNKKIKNNNNNNNKSNFKKNDFINKLKGQTLIIAPVAAVMQWKSEIEKFVDENILNVYVYHGNSKIISDEELIKYDIVITSYAVVEVNFRKIVNKHKQPCEYCGRLYLPNNLDIHKKYFCGPTAVRTEKLKKRKKKNKDTALVAMKKFDETFVPTPRNVLLEIMANSKKELEDEKKKNIEISNKSLNHNNTKKNKGKKNNQIKQRNAQKDSNIDVIVLSSDSCKEKSSSSENSVYSPLSRKTSSRIIDLSNLGFDKETMEQVIESLSEGGKKKKNVKNVKNVNSVKNVKSVKNHRDVKWNVVIKNMLENFLYNVDMNDKCKHVLIKIYVTNTTIQNTELEKLNMGELKVVLITMGKHIFGTKVELINRILVSAKYIRKELYDENTETEEKDTSGVHNEDGDTSMGVTNQKGKDKFCKERKIKKEDEKSSIEKKRKTVDVISVGGDVKRDMSLNKRRNTTNRGTTMKIKGETREYASNKGKNNNDDDNNNSYYSDAKSYTSESSDESYQGDICSKKKEPKKNTKSIRRSQRKSYCKSSLESEKKEESDNSYNTNDYNDCDDCDDCDDYNNCDDNNYCDDCDDSSNSFDSYDSIIVRKSKMSKEKKKRENMKIFDESALHQIYWNRIILDEAHRIKNRNTSTTQSILNLKCCGYRWCLTGTPLQNRISELYSLIRFIEFYPYAYYFCSKKDCKCLLLNYEMRDNKYCYFCNHSRINHFNYFNKRILKPIQSFGYRGEGLSGMSYLKNEVLDKILLRRTKGERKSDINLKPLIIKIRKDKLSKEEKDFYESLYKQTSTQFNTYVNSNTVLHNYAHIFDLLSRLRQAADHPYLIIFGNSFLSDPSGKFIKKNTTIIPAISNDYVCGICLENVQKRNNISTKCNHNFHKSCLKQYIESFEMENADQQEEEKEDSNFKNSNMIKYNTYDIGQREGMNNVKSTNSCKYDIVINDDIHNNINKLETHENDNLITSKDLLKNKKSLEKKSKSISVVKFKNKDGYINLLSNDENVKDYPLGCPVCYIPLTVDFNLLVDKEENEEDEIIICKEETTYINKSFINRINTQEYRSSTKIEAVYEEVQNVINNTDDKCLIFSQYCSMLDLIEYHLKKHNIVCSKLLGYMSMISRNNILYNFNQDKQLRVLLISLKAGGEGLNLQVANRIFIVDPWWNPAAELQAIQRAHRIGQTKTVYAIRFIIENTVEEKIIQLQNKKQLVFDSTIGDSGNAMQKLSKEDLAFLFHS

SEQ ID NO: 8315 - protein, 1446 aa, Plasmodium falciparum 3D7
MTSSNYFKNDSKVYKESDKISNYNYDSDVIEIISLNDNDTINSNTQNSSYFSKDVKKNIEYNKNKEMSSDIEIIEDIGNYKYEKIKLEKLKEHQLNSKKAEFIRNKGVYFEYYLGCIETESIILSSEVCEIKDDKNVIISYEISPKSTKRSYSPMYTLKINNNYDISNDYIRIIGRNIPMNNKKVKKKKVSNNKKKNSASSNDGYNEQNYDTNKIISADQKFVEYDKCKSEVLKDIYEGYSCIRIKHNNRDISKLKSNLSKTLSVLLVLNAIRIEIKLEKISQSELKFGGSLKTFVHVILYPDAFKIDSHKFHEYNSLIKYSVNNMFKELKIIPLRLAKNIDEETLETYNVNKDELLKSVSPLKSIIINYNNKNDQVMNKSGETSTGFCTPHKALGYIESKKTIGTKEEEEIIDSLSENEIEEKNEEATNLVFVEEKFRGGYLLEDFEEIYPNEYYFKPMLKTYQAEGVWWMYTRENPPEYTKKLERQKSNINEIIIDDVIKIPTQKNDIVIKSREEIYKNVNNQRKVINIVDITNICKNENYEQKFKGKLENDKLEIKDENIKCDLKVKGETENFETNIKNEHLYIKTEGKEEISNDTIKCKETMDNVKLEESSDYENADDDIRNREPLNPLWEEHAFIPNIKIYEKDKLVCILKYFYVNKLTGAFSLTYPQFVPPFRGGILADEMGLGKTIQSIGLITHDIYHNKLYSKNNNLENKKNFTYLIENTIKGVHFKRGGTLVIAPLALIYQWKEEIERHTKEGFVTCYIYYGTSKDISSEELSGYSVVLTTYSTLVSEYKNTLNKKFSNKAENNNNSTYTNKESFFKDVSSSTTKKKMNNFFMKTVLNSGNKNNDNIFFFDKKKTNTMLYNMKEYPLYNITWRRIIIDEAHVIKNKNSIQSVAVWKLRGERNWCLTGTPIQNSIFDIFPLFRFLGIKPYGTIEWWNKEIVDYVNKNKLNLALDVVRKISSPILLRRTKKSKTKNGNSIISLPKKNIHLEKLEFSLEEEDFYRAIFYRSKTKFDTYMHDGNVLSHYSHVLQLLLRLRQCCSHPLLLFSKPFFEEWNKDDMNDALKNKTDKEDNGDDLKKSEYMNNTDVKKVFKSENNKMDEEIEYNNPSFSKVDHSNENNIGNNLIYNFILGSTKSKNIDDDYSKELEILKNGNVMQCCICLEDATYPLISKCLHIMCKKCADDYFHLTQIADKKCPQCDNYISLKSLKTLQENKSPLDELLKKMKKDNFVYSTKLKKLFEHVQNDMQNELHIVVFSQWIGFLKIIEKLLNLYNIANKIYDGSLTFEQRKATLNWFNIQKGKIYQPGVGFIKPSYVIPVENFAGKVLLCSLKAGGVGLNLTVSSKVYLMDLWWNPAIEDQAFERVHRIGQLKEVNIYKFVLEKTVEERILQIHQSKQYTANQILTQEGNKLNTEMNMVPQKLGMDDFILMFKDWNTDE

SEQ ID NO: 8316 - protein, 1055 aa, Arabidopsis thaliana
MARNSNSDEAFSSEEEEERVKDNEEEDEEELEAVARSSGSDDDEVAAADESPVSDGEAAPVEDDYEDEEDEEKAEISKREKARLKEMQKLKKQKIQEMLESQNASIDADMNNKGKGRLKYLLQQTELFAHFAKSDGSSSQKKAKGRGRHASKITEEEEDEEYLKEEEDGLTGSGNTRLLTQPSCIQGKMRDYQLAGLNWLIRLYENGINGILADEMGLGKTLQTISLLAYLHEYRGINGPHMVVAPKSTLGNWMNEIRRFCPVLRAVKFLGNPEERRHIREDLLVAGKFDICVTSFEMAIKEKTALRRFSWRYIIIDEAHRIKNENSLLSKTMRLFSTNYRLLITGTPLQNNLHELWALLNFLLPEIFSSAETFDEWFQISGENDQQEVVQQLHKVLRPFLLRRLKSDVEKGLPPKKETILKVGMSQMQKQYYKALLQKDLEAVNAGGERKRLLNIAMQLRKCCNHPYLFQGAEPGPPYTTGDHLITNAGKMVLLDKLLPKLKERDSRVLIFSQMTRLLDILEDYLMYRGYLYCRIDGNTGGDERDASIEAYNKPGSEKFVFLLSTRAGGLGINLATADVVILYDSDWNPQVDLQAQDRAHRIGQKKEVQVFRFCTESAIEEKVIERAYKKLALDALVIQQGRLAEQKTVNKDELLQMVRYGAEMVFSSKDSTITDEDIDRIIAKGEEATAELDAKMKKFTEDAIQFKMDDSADFYDFDDDNKDENKLDFKKIVSDNWNDPPKRERKRNYSESEYFKQTLRQGAPAKPKEPRIPRMPQLHDFQFFNIQRLTELYEKEVRYLMQTHQKNQLKDTIDVEEPEGGDPLTTEEVEEKEGLLEEGFSTWSRRDFNTFLRACEKYGRNDIKSIASEMEGKTEEEVERYAKVFKERYKELNDYDRIIKNIERGEARISRKDEIMKAIGKKLDRYRNPWLELKIQYGQNKGKLYNEECDRFMICMIHKLGYGNWDELKAAFRTSSVFRFDWFVKSRTSQELARRCDTLIRLIEKENQEFDERERQARKEKKLAKSATPSKRPLGRQASESPSSTKKRKHLSMR

SEQ ID NO: 8317 - protein, 1057 aa, Arabidopsis thaliana
MARNSNSDEAFSSEEEEERVKDNEEEDEEELEAVARSSGSDDDEVAAADESPVSDGEAAPVEDDYEDEEDEEKAEISKREKARLKEMQKLKKQKIQEMLESQNASIDADMNNKGKGRLKYLLQQTELFAHFAKSDGSSSQKKAKGRGRHASKITEEEEDEEYLKEEEDGLTGSGNTRLLTQPSCIQGKMRDYQLAGLNWLIRLYENGINGILADEMGLGKTLQTISLLAYLHEYRGINGPHMVVAPKSTLGNWMNEIRRFCPVLRAVKFLGNPEERRHIREDLLVAGKFDICVTSFEMAIKEKTALRRFSWRYIIIDEAHRIKNENSLLSKTMRLFSTNYRLLITGTPLQNNLHELWALLNFLLPEIFSSAETFDEWFQISGENDQQEVVQQLHKVLRPFLLRRLKSDVEKGLPPKKETILKVGMSQMQKQYYKALLQKDLEAVNAGGERKRLLNIAMQLRKCCNHPYLFQGAEPGPPYTTGDHLITNAGKMVLLDKLLPKLKERDSRVLIFSQMTRLLDILEDYLMYRGYLYCRIDGNTGGDERDASIEAYNKPGSEKFVFLLSTRAGGLGINLATADVVILYDSDWNPQVDLQAQDRAHRIGQKKEVQVFRFCTESAIEEKVIERAYKKLALDALVIQQGRLAEQKSKSVNKDELLQMVRYGAEMVFSSKDSTITDEDIDRIIAKGEEATAELDAKMKKFTEDAIQFKMDDSADFYDFDDDNKDENKLDFKKIVSDNWNDPPKRERKRNYSESEYFKQTLRQGAPAKPKEPRIPRMPQLHDFQFFNIQRLTELYEKEVRYLMQTHQKNQLKDTIDVEEPEGGDPLTTEEVEEKEGLLEEGFSTWSRRDFNTFLRACEKYGRNDIKSIASEMEGKTEEEVERYAKVFKERYKELNDYDRIIKNIERGEARISRKDEIMKAIGKKLDRYRNPWLELKIQYGQNKGKLYNEECDRFMICMIHKLGYGNWDELKAAFRTSSVFRFDWFVKSRTSQELARRCDTLIRLIEKENQEFDERERQARKEKKLAKSATPSKRPLGRQASESPSSTKKRKHLSMR

SEQ ID NO: 8318 - protein, 1055 aa, Arabidopsis thaliana
MARNSNSDEAFSSEEEEERVKDNEEEDEEELEAVARSSGSDDDEVAAADESPVSDGEAAPVEDDYEDEEDEEKAEISKREKARLKEMQKLKKQKIQEMLESQNASIDADMNNKGKGRLKYLLQQTELFAHFAKSDGSSSQKKAKGRGRHASKITEEEEDEEYLKEEEEGLTGSGNTRLLTQPSCIQGKMRDYQLAGLNWLIRLYENGINGILADEMGLGKTLQTISLLAYLHEYRGINGPHMVVAPKSTLGNWMNEIRRFCPVLRAVKFLGNPEERRHIREDLLVAGKFDICVTSFEMAIKEKTALRRFSWRYIIIDEAHRIKNENSLLSKTMRLFSTNYRLLITGTPLQNNLHELWALLNFLLPEIFSSAETFDEWFQISGENDQQEVVQQLHKVLRPFLLRRLKSDVEKGLPPKKETILKVGMSQMQKQYYKALLQKDLEAVNAGGERKRLLNIAMQLRKCCNHPYLFQGAEPGPPYTTGDHLITNAGKMVLLDKLLPKLKERDSRVLIFSQMTRLLDILEDYLMYRGYLYCRIDGNTGGDERDASIEAYNKPGSEKFVFLLSTRAGGLGINLATADVVILYDSDWNPQVDLQAQDRAHRIGQKKEVQVFRFCTESAIEEKVIERAYKKLALDALVIQQGRLAEQKTVNKDELLQMVRYGAEMVFSSKDSTITDEDIDRIIAKGEEATAELDAKMKKFTEDAIQFKMDDSADFYDFDDDNKDENKLDFKKIVSDNWNDPPKRERKRNYSESEYFKQTLRQGAPAKPKEPRIPRMPQLHDFQFFNIQRLTELYEKEVRYLMQTHQKNQLKDTIDVEEPEGGDPLTTEEVEEKEGLLEEGFSTWSRRDFNTFLRACEKYGRNDIKSIASEMEGKTEEEVERYAKVFKERYKELNDYDRIIKNIERGEARISRKDEIMKAIGKKLDRYRNPWLELKIQYGQNKGKLYNEECDRFMICMIHKLGYGNWDELKAAFRTSSVFRFDWFVKSRTSQELARRCDTLIRLIEKENQEFDERERQARKEKKLAKSATPSKRPLGRQASESPSSTKKRKHLSMR

SEQ ID NO: 8319 - protein, 1041 aa, Arabidopsis thaliana
MVKQLQEQEENDPVEKTKSLISALNYLSRDLLLPSHLYASVSSIYHASVSDLSPSPPLRGNSYTPNRGDLMSEFEDALLQQRLNYESGSRLAELKETRYKNRIHNRLSQLEGLPSNRGEDLQEKCLLELYGLKLQELQCRVRGEVSAEYWLRLNCADPERQLYDWGMMRLPRRMYGVGDSFVMEADDQFRNKRDAERLLRLEEEEKNLIETTQRKFFAEVLNAVREFQLQIQASHRRCKQRNDGVQAWHGKQRQRATRAEKLRIMALKSDDQEEYMKLAKEIQRQKDAKLSENTKLLKGSESDLSDVDAPEDVLPAQDIEIIDSDNNDDSNDLLEGERQFNLAIHSIQEKVTKQPSLLQGGELRSYQLEGLQWMVSLYNNDYNGILADEMGLGKTIQTIALIAYLLESKDLHGPHLILAPKAVLPNWENEFALWAPSISAFLYDGSKEKRTEIRARIAGGKFNVLITHYDLIMRDKAFLKKIDWNYMIVDEGHRLKNHECALAKTLGTGYRIKRRLLLTGTPIQNSLQELWSLLNFLLPHIFNSIHNFEEWFNTPFAECGSASLTDEEELLIINRLHHVIRPFLLRRKKSEVEKFLPGKTQVILKCDMSAWQKLYYKQVTDVGRVGLHSGNGKSKSLQNLTMQLRKCCNHPYLFVGADYNMCKKPEIVRASGKFELLDRLLPKLKKAGHRILLFSQMTRLIDLLEIYLSLNDYMYLRLDGSTKTDQRGILLKQFNEPDSPYFMFLLSTRAGGLGLNLQTADTIIIFDSDWNPQMDQQAEDRAHRIGQKKEVRVFVLVSIGSIEEVILERAKQKMGIDAKVIQAGLFNTTSTAQDRREMLEEIMSKGTSSLGEDVPSEREINRLAARTEEEFWMFEQMDEERRKKENYKTRLMEEKEVPEWAYTSETQEDKTNAKNHFGSLTGKRKRKEAVYSDSLSDLQWMKAMESEDEDASKVSQKRKRTDTKTRMSNGSKAEAVLSESDEEKEEEEEERKEESGKESEEENEKPLHSWKTNKKKRSRYPVMTSSPNSRGKGSSKGSKRN

SEQ ID NO: 8320 - protein, 1132 aa, Arabidopsis thaliana
MVAQQLQERCGGTSQEDPVETTKSLICALNYISRDLPLPPHLFTAVSSIYHGASSSSLSDSDVSPPLPTSPPANKAPYGADLMGEFEDALLKQRPDCESGSRLIQLLDNRNKSHIQRRLSELEGGCFVLTLCVFESELPSTRGEDLQAKCLLELYGLKLRELQGKVRTAVSSEFWLRLNCADVSSQVFDWGMMRLPRPFYGVGDPFAMEADDQFRKKRDAELSIFVIGIADVLKVFVQRLSRLEEEEKNLIETAKRKFFAEVLNAVREFQLQIQATQKRRRQRNDGVQAWHGRQRQRATRAEKLRLMALKSDDQEAYMKLVKESKNERLTTLLEETNKLLANLGAAVQRQKDAKLPEGIDLLKDSESDLSELDAPRSEPLQDLLPDQDIDITESDNNDDSNDLLEGQRQYNSAIHSIQEKVTEQPSLLEGGELRSYQLEGLQWMVSLFNNNLNGILADEMGLGKTIQTISLIAYLLENKGVPGPYLIVAPKAVLPNWVNEFATWVPSIAAFLYDGRLEERKAIREKIAGEGKFNVLITHYDLIMRDKAFLKKIEWYYMIVDEGHRLKNHESALAKTLLTGYRIKRRLLLTGTPIQNSLQELWSLLNFLLPHIFNSVQNFEEWFNAPFADRGNVSLTDEEELLIIHRLHHVIRPFILRRKKDEVEKFLPGKTQVILKCDMSAWQKVYYKQVTDMGRVGLQTGSGKSKSLQNLTMQLRKCCNHPYLFVGGDYNMWKKPEIVRASGKFELLDRLLPKLRKAGHRILLFSQMTRLIDVLEIYLTLNDYKYLRLDGTTKTDQRGLLLKQFNEPDSPYFMFLLSTRAGGLGLNLQTADTVIIFDSDWNPQMDQQAEDRAHRIGQKKEVRVFVLVSVGSVEEVILERAKQKMGIDAKVIQAGLFNTTSTAQDRREMLEEIMRKGTSSLGTDVPSEREINRLAARSEDEFWMFERMDEERRRKENYRARLMQEQEVPEWAYTTQTQEEKLNNGKFHFGSVTGKRKRKEIVYSDTLSELQWLKAVESGEDLSKLSMRYNRREENASNTKTSTSKKVIESIQTVSDGTSEEDEEEQEEERAKEMSGKQRVDKSEEEEEEGEEENDGKAIFKWNTHKKKRSRYSFTCSSSDSRAQSSNGSRRK

SEQ ID NO: 8321 - protein, 764 aa, Arabidopsis thaliana
MVSLRSRKVIPASEMVSDGKTEKDASGDSPTSVLNEEENCEEKSVTVVEEEILLAKNGDSSLISEAMAQEEEQLLKLREDEEKANNAGSAVAPNLNETQFTKLDELLTQTQLYSEFLLEKMEDITINGIESESQKAEPEKTGRGRKRKAASQYNNTKAKRAVAAMISRSKEDGETINSDLTEEETVIKLQNELCPLLTGGQLKSYQLKGVKWLISLWQNGLNGILADQMGLGKTIQTIGFLSHLKGNGLDGPYLVIAPLSTLSNWFNEIARFTPSINAIIYHGDKNQRDELRRKHMPKTVGPKFPIVITSYEVAMNDAKRILRHYPWKYVVIDEGHRLKNHKCKLLRELKHLKMDNKLLLTGTPLQNNLSELWSLLNFILPDIFTSHDEFESWFDFSEKNKNEATKEEEEKRRAQVVSKLHGILRPFILRRMKCDVELSLPRKKEIIMYATMTDHQKKFQEHLVNNTLEAHLGENAIRGQGWKGKLNNLVIQLRKNCNHPDLLQGQIDGSYLYPPVEEIVGQCGKFRLLERLLVRLFANNHKVLIFSQWTKLLDIMDYYFSEKGFEVCRIDGSVKLDERRRQIKDFSDEKSSCSIFLLSTRAGGLGINLTAADTCILYDSDWNPQMDLQAMDRCHRIGQTKPVHVYRLSTAQSIETRVLKRAYSKLKLEHVVIGQGQFHQERAKSSTPLEEEDILALLKEDETAEDKLIQTDISDADLDRLLDRSDLTITAPGETQAAEAFPVKGPGWEVVLPSSGGMLSSLNS

SEQ ID NO: 8322 - protein, 2049 aa, Arabidopsis thaliana
MAQQQSSRLNRLLTLLDTGSTQATRLTAAKQIGDIAKSHPQDLSSLLRKVLHHLRSKKWDTRVAAAHAIGAIVLNVKHPSLSELLNSLATKLGEAGISDNVDEVVAFRNLQSKILANAPFRSFEMNKVLEFGALLASGGQEYDILNDNSKNPRDRVARQKKNLRRRLGLDMCEQFMDVNEMIRDEDLIEQKSNVPANGVGNRLYANCSPHHIQQFVSRMVPRVNSRRPSARELNLLKRKAKISSKDQAKGSCEVADVEMSSSHVASTSKRILSDSLDSSKADIGNEDDIEPDGDGKWPFHSFVEQLILDMFDPAWEIRHGSVMALREILMLHGGSAGVSTEEFSSDNGFELKDVLNKVTREREIDLNMQVSENELEPLRKRPKIEDPSKSFIDNTVLEVIGGDYDINVKDEDAEFLLPPVKVNGQTDCSSTKLEPQSSMDDSTSHSEINHVAEVNNHFEDKSFIEEPVIPKQQEENLEVLDLVKQARHSWIKNFEFLQDCTIRFLCVLSLDRFGDYISDQVVAPVREACAQALGATFKYMNPSLIYETLNILLQMQRRPEWEIRHGSLLGIKYLVAVRQEMLQDLLGYILPACKAGLEDSDDDVRAVAADALIPAAAAIVSLRGQTLLSIVMLLWDILLELDDLSPSTSSIMNLLAEIYSQDDMTLVMHEELSLGEEQNIELNEMGHIESIGERRDVKESPYALSGLAPRLWPFTRHDITSVRFSAIRTLERLLEAGCRKNISGQSKSSFWPSSILGDTLRIVFQNLLLESTEEILECSERVWRLLVQCPVDDLEDTAKFYMASWIELAATPYGSTLDATKMFWPVAPPRKSHFKAAAKMKAVKLENEASSILGFDYARSSASLEKQEDASARSTKIIVGSDMEMSVTRTRVVTASALGIFASRLREGSMQFVVDPLSSTLTSMSGVQRQVGSIVLISWFRETKCKAPSDGSGSLPGFPSPLKKWLLDLLACADPAFPTKDIFLPYAELSRTYTKMRNEASQLLHTVETCHCFDKLLSTNKLNVESVTADETIDFASTLDLWNKESAGNESLEKQVFEDVESSRQQLLSTAGYLKCVQSNLHITVTSLVAAAVVWMSEFPARLNPIILPLMASIKREQEQILQQIAAEALAELIAYCVDRKPSPNDKLIKNICSLTCMDPSETPQASIISSMDIVDDMDFLSSRSNTGKQKAKVVLASGEDRSKVEGFITRRGSELALKHLSLKFGGSLFDKLPKLWECLTEVLVPEIPSDQQKIDLKIESISDPQVVRSIAPVMEETLKPRLLSLLPCIFKCVRHSHVAVRLAASRCVMTMAKSMTTDVMAAVVESAIPMLGDLTCISGRQGAGMLIGLLVQGLGVELVPYSPLLVVPLLRCMSDVDSSVRQSVTRSFAALVPMLPLARGVPPPVGLSKDLSSNAEDAKFLEQLLDNSHIDDYKLCTELKVQLRRYQQEGINWLGFLKRFKLHGILCDDMGLGKTLQASAIVASDAAERRGSTDELDVFPSIIVCPSTLVGHWAFEIEKYIDLSLLSVLQYVGSAQDRVSLREQFNNHNVIITSYDVVRKDVDYLTQFSWNYCILDEGHIIKNAKSKITAAVKQLKAQHRLILSGTPIQNNIMELWSLFDFLMPGFLGTERQFQASYGKPLLAARDPKCSAKDAEAGVLAMEALHKQVMPFLLRRTKEEVLSDLPEKIIQDRYCDLSPVQLKLYEQFSGSSAKQEISSIIKVDGSADSGNADVAPTKASTHVFQALQYLLKLCSHPLLVLGDKVTEPVASDLAAMINGCSDIITELHKVQHSPKLVALQEILEECGIGSDASSSDGTLSVGQHRVLIFAQHKALLDIIEKDLFQAHMKSVTYMRLDGSVVPEKRFEIVKAFNSDPTIDVLLLTTHVGGLGLNLTSADTLVFMEHDWNPMRDHQFANIELNKLWQAMDRAHRLGQKRVVNVHRLIMRGTLEEKVMSLQKFKVSVANTVINAENASMKTMNTDQLLDLFASAETSKKGGGSSKKGSEDNDQIAGTGKGMKAILGNLEELWDQSQYTEEYNLSQFLTKLNG

SEQ ID NO: 8323 - protein, 1384 aa, Arabidopsis thaliana
MSSLVERLRIRSDRKPVYNLDDSDDDDFVPKKDRTFEQVEAIVRTDAKENACQACGESTNLVSCNTCTYAFHAKCLVPPLKDASVENWRCPECVSPLNEIDKILDCEMRPTKSSEQGSSDAEPKPIFVKQYLVKWKGLSYLHCSWVPEKEFQKAYKSNHRLKTRVNNFHRQMESFNNSEDDFVAIRPEWTTVDRILACREEDGELEYLVKYKELSYDECYWESESDISTFQNEIQRFKDVNSRTRRSKDVDHKRNPRDFQQFDHTPEFLKGLLHPYQLEGLNFLRFSWSKQTHVILADEMGLGKTIQSIALLASLFEENLIPHLVIAPLSTLRNWEREFATWAPQMNVVMYFGTAQARAVIREHEFYLSKDQKKIKKKKSGQISSESKQKRIKFDVLLTSYEMINLDSAVLKPIKWECMIVDEGHRLKNKDSKLFSSLTQYSSNHRILLTGTPLQNNLDELFMLMHFLDAGKFGSLEEFQEEFKDINQEEQISRLHKMLAPHLLRRVKKDVMKDMPPKKELILRVDLSSLQKEYYKAIFTRNYQVLTKKGGAQISLNNIMMELRKVCCHPYMLEGVEPVIHDANEAFKQLLESCGKLQLLDKMMVKLKEQGHRVLIYTQFQHMLDLLEDYCTHKKWQYERIDGKVGGAERQIRIDRFNAKNSNKFCFLLSTRAGGLGINLATADTVIIYDSDWNPHADLQAMARAHRLGQTNKVMIYRLINRGTIEERMMQLTKKKMVLEHLVVGKLKTQNINQEELDDIIRYGSKELFASEDDEAGKSGKIHYDDAAIDKLLDRDLVEAEEVSVDDEEENGFLKAFKVANFEYIDENEAAALEAQRVAAESKSSAGNSDRASYWEELLKDKFELHQAEELNALGKRKRSRKQLVSIEEDDLAGLEDVSSDGDESYEAESTDGEAAGQGVQTGRRPYRRKGRDNLEPTPLMEGEGRSFRVLGFNQSQRAIFVQTLMRYGAGNFDWKEFVPRLKQKTFEEINEYGILFLKHIAEEIDENSPTFSDGVPKEGLRIEDVLVRIALLILVQEKVKFVEDHPGKPVFPSRILERFPGLRSGKIWKEEHDKIMIRAVLKHGYGRWQAIVDDKELGIQELICKELNFPHISLSAAEQAGLQGQNGSGGSNPGAQTNQNPGSVITGNNNASADGAQVNSMFYYRDMQRRLVEFVKKRVLLLEKAMNYEYAEEYYGLGGSSSIPTEEPEAEPKIADTVGVSFIEVDDEMLDGLPKTDPITSEEIMGAAVDNNQARVEIAQHYNQMCKLLDENARESVQAYVNNQPPSTKVNESFRALKSINGNINTILSITSDQSKSHEDDTKPDLNNVEMKDTAEETKPLRGGVVDLNVVEGEENIAEASGSVDVKMEEAKEEEKPKNMVVD

SEQ ID NO: 8324 - protein, 3571 aa, Arabidopsis thaliana
MTSSSHNIELEAAKFLHKLIQDSKDEPAKLATKLYVILQHMKTSGKENTMPYQVISRAMDTVVNQHGLDIEALKSSCLPHPGGTQTEDSGSAHLAGSSQAVGVSNEGKATLVENEMTKYDAFTSGRQLGGSNSASQTFYQGSGTQSNRSFDRESPSNLDSTSGISQPHNRSETMNQRDVKSSGKRKRGESSLSWDQNMDNSQIFDSHKIDDQTGEVSKIEMPGNSGDIRNLHVGLSSDAFTTPQCGWQSSEATAIRPAIHKEPGNNVAGEGFLPSGSPFREQQLKQLRAQCLVFLALRNGLVPKKLHVEIALRNTFREEDGFRGELFDPKGRTHTSSDLGGIPDVSALLSRTDNPTGRLDEMDFSSKETERSRLGEKSFANTVFSDGQKLLASRIPSSQAQTQVAVSHSQLTFSPGLTKNTPSEMVGWTGVIKTNDLSTSAVQLDEFHSSDEEEGNLQPSPKYTMSQKWIMGRQNKRLLVDRSWSLKQQKADQAIGSRFNELKESVSLSDDISAKTKSVIELKKLQLLNLQRRLRSEFVYNFFKPIATDVEHLKSYKKHKHGRRIKQLEKYEQKMKEERQRRIRERQKEFFGGLEVHKEKLEDLFKVRRERLKGFNRYAKEFHKRKERLHREKIDKIQREKINLLKINDVEGYLRMVQDAKSDRVKQLLKETEKYLQKLGSKLKEAKLLTSRFENEADETRTSNATDDETLIENEDESDQAKHYLESNEKYYLMAHSIKENINEQPSSLVGGKLREYQMNGLRWLVSLYNNHLNGILADEMGLGKTVQVISLICYLMETKNDRGPFLVVVPSSVLPGWQSEINFWAPSIHKIVYCGTPDERRKLFKEQIVHQKFNVLLTTYEYLMNKHDRPKLSKIHWHYIIIDEGHRIKNASCKLNADLKHYVSSHRLLLTGTPLQNNLEELWALLNFLLPNIFNSSEDFSQWFNKPFQSNGESSALLSEEENLLIINRLHQVLRPFVLRRLKHKVENELPEKIERLIRCEASAYQKLLMKRVEDNLGSIGNAKSRAVHNSVMELRNICNHPYLSQLHSEEVNNIIPKHFLPPIVRLCGKLEMLDRMLPKLKATDHRVLFFSTMTRLLDVMEDYLTLKGYKYLRLDGQTSGGDRGALIDGFNKSGSPFFIFLLSIRAGGVGVNLQAADTVILFDTDWNPQVDLQAQARAHRIGQKKDVLVLRFETVNSVEEQVRASAEHKLGVANQSITAGFFDNNTSAEDRKEYLESLLRESKKEEDAPVLDDDALNDLIARRESEIDIFESIDKQRKENEMETWNTLVHGPGSDSFAHIPSIPSRLVTEDDLKLLYETMKLNDVPMVAKESTVGMKRKDGSMGGLDTHQYGRGKRAREVRSYEEKLTEEEFEKLCQTESPDSPQGKGEGSERSLANDTSNIPVENSSDTLLPTSPTQAITVQPMEPVRPQSHTLKEETQPIKRGRGRPKRTDKALTPVSLSAVSRTQATGNAISSAATGLDFVSSDKRLEAASHPTSSLALTSPDLSGPPGFQSLPASPAPTPIRGRGRGRSRGRGAGRGRRVEGVLHGSNSSITQRTETATSLASDAEATKFALPRSASEIVSRVPKANEGSTSNPDQVSPVHSATTALRSDKAADKDLDAPPGFDSGSHVQTLNVLENSSERKAFAVKKRPLIQGVSSQHPGPNKQPLDLPVSTSSTLLGGGPVQNQNAVSSVCDGSKSPSEGRTYTALQGVTTAPSDATLPMSSQPSDATLPMSSQPVGSTVEAQEANVPSLPAALPAKRRVRNLPSRGETPKRQGKRRGQPLPATDASSARSTGLTPQIEVKVGNLSGTKAKFDAVAKEQPHFSQSVAPDIHSSGSLSQEIRRDTSGTGGSARKQTADVTDVARVMKEIFSETSLLKHKVGEPSATTRTNVPDAQSPGEMNLHTVETHKAEDSSGLKNQEALYNLSKADKLVSDIPHPVPGDLTTSGSVANKDVDIGSSKVAAENELVKIPGGDVDSSVIQLSLGNTLTAKSSLEKCTADQLLGEKLSQEGETTPASDGETCHLAEETASSLSYVRSEPTASASTTAEPLPTDKLEKNISFQDEVKTLNGDKREAILLSSEEQTNVNSKIETNSEELQASRTDEVPHVDGKSVDVANQTVKEDEAKHSVEIQSSMLEPDELPNAGQKGHSSIDLQPLVLVTSNENAMSLDDKDYDPISKSADIEQDPEESVFVQGVGRPKVGTADTQMEDTNDAKLLVGCSVESEEKEKTLQSLIPGDDADTEQDPEESVSDQRPKVGSAYTQMEDTDEAKLLMGCSVESEEKEKTLQSHIPGDDADTEKNPEESVSVQGVDRPKVGTTDTQMEDTNDAKLLVGCSVASEEKEKTLQSHIPGDDADTEQNPEESVSVQGVNRPKVGNANTQMEDTDEAKVLVGCSVESEEKEKTLQSHIPGDDADTEQNPEESVSNFDRPKDGTADTHMEDIDDAKLLVGCSVESEEKEKSLQSHMPSDDAVLHAPFENTKDSKGDDLHGESLVSCPTMEVMEQKGFESETHARTDSGGIDRGNEVSENMSDGVKMNISSVQVPDASHDLNVSQDQTDIPLVGGIDPEHVQENVDVPASPHGAAPNIVIFQSEGHLSPSILPDDVAGQLESMSNDEKTNISSEQVPDVSHDLKVSQDQTDIPPVGGIVPENLQEIVDVPASPHGVVPDVVVSQSEEIQSPSILPDDVPGQPDDGNCEKMDTMQNNTSIDIGITSGKTCQPSSSTQPEDENRNSLSHCEPSEVVEQRDSRDQVCIGSVESQVEISSAILENRSADIQPPQSILVDQKDIEESKEPGIESADVSLHQLADIQAEPSNLVDQMDIEESKEPGTESADVSLHQLADIQPGPSILVDQMDTEKSKEPGTESADVSLHQLADIQPGPSILVDQMDTEKSKEPGTESADVSLHQLADIQPGPSILVDQMDTEEFKNPDVSLHQLADIEPSLSISAVQKNIEDKDQSHVETAGSELVDVSAECSTEPQVQLPPSSEPVGDMHVHLGASKSEIVAEGTDFSSSLPKTEEENAKSQLADTEPSSSLTAVQKNIEDQVETAGCEFVVVSTGCSTEPQVQLPPSAEPVVAEGTEFPSSLLMTGVDNSSHLMTGVDNAKTHLADVVPSSSPTTMEKNIEAQDQDQVTTGGCGLVDVLTECSSEPQLQLPPSAEPVISEGTELATLPLTEEENADSQLANIEPSSSPSVVEKNIEAQDQDQVKTAGCELVSTGCSSEPQVHLPPSAEPDGDIHVHLKETEKSESMVVVGEGTAFPSSLPVTEEGNAESQLADTEPFTSPTVVEKNIKDQEQVETTGCGLVDDSTGCSSEPQVQLPPSAEPMEGTHMHLEETKKSETVVTEIQLADIDPSFSLIVVQTNIEDQDQIETGGCDLINVPSGCSTEPQIQLSSSAEPEEGMHIHLEAAMNSETVVTEGSELPSSLPMTEDENADGQLAEVEPSVSLTVEQTNIEEKDHIETAECELVDVSPGCSSQPEVKFPPSPDAVGGMDVHLETVVTEDTDSNSSLPKTEEKDAENPSDRLDGESDGTTVATVEGTCVESNSLVAEESNIEVPKDNEDV

SEQ ID NO: 8325 - protein, 1187 aa, Arabidopsis thaliana
MEEDEDQFLLSSLGVTSANPEDLEQKILDEATKKPDNDEGGSVEEKSTQLEGTNLLSSSQNELLNKLRAVKFEIDAVASTVENVDEIAAEKGLKKDDESDLQGLHSGSALQHALATDRLRSLKKRKIQLEKELTGLHGQSASSSADHGNLLRDLVKEKPSLKRKLKEIRKPSRRDGKKVKVVSFREDTDFDAVFDGASAGFVETERDELVRKGILTPFHKLDGFERRLQQPGPSNSRNLPEGDDENEDSSIIDRAVQSMSLAAKARPTTKLLDAEDLPKLEPPTAPFRRLRKLYKTPNSPDNEAKKRKAGKKSKKTRPLPEKKWRKRISREDSSLQGSGDGRRILTTSSCEEEELDDFDDADDNERSSVQLEGGLNIPECIFRKLFDYQRVGVQWLWELHCQRAGGIIGDEMGLGKTIQVLSFLGSLHFSKMYKPSIIICPVTLLRQWRREAQKWYPDFHVEILHDSAQDSGHGKGQGKASESDYDSESSVDSDHEPKSKNTKKWDSLLNRVLNSESGLLITTYEQLRLQGEKLLNIEWGYAVLDEGHRIRNPNSDITLVCKQLQTVHRIIMTGAPIQNKLTELWSLFDFVFPGKLGVLPVFEAEFSVPITVGGYANASPLQVSTAYRCAVVLRDLIMPYLLRRMKADVNAHLTKKTEHVLFCSLTVEQRSTYRAFLASSEVEQIFDGNRNSLYGIDVMRKICNHPDLLEREHSHQNPDYGNPERSGKMKVVAEVLKVWKQQGHRVLLFSQTQQMLDILESFLVANEYSYRRMDGLTPVKQRMALIDEFNNSEDMFVFVLTTKVGGLGTNLTGANRVIIFDPDWNPSNDMQARERAWRIGQKKDVTVYRLITRGTIEEKVYHRQIYKHFLTNKILKNPQQRRFFKARDMKDLFILKDDGDSNASTETSNIFSQLAEEINIVGVQSDKKPESDTQLALHKTAEGSSEQTDVEMTDKTGEAMDEETNILKSLFDAHGIHSAVNHDAIMNANDEEEKMRLEHQASQVAQRAAEALRQSRMLRSRESISVPTWTGRSGCAGAPSSVRRRFGSTVNSRLTQTGDKPSAIKNGISAGLSSGKAPSSAELLNRIRGSREQAIGVGLEQPQSSFPSSSGSSSRVGSLQPEVLIRKICSFVQQKGGSADTTSIVNHFRDIVSFNDKQLFKNLLKEIATLEKDQNRSFWVLKSEYKD

SEQ ID NO: 8326 - protein, 3574 aa, Arabidopsis thaliana
MTSSSHNIELEAAKFLHKLIQDSKDEPAKLATKLYVILQHMKTSGKENTMPYQVISRAMDTVVNQHGLDIEALKSSCLPHPGGTQTEDSGSAHLAGSSQAVGVSNEGKATLVENEMTKYDAFTSGRQLGGSNSASQTFYQGSGTQSNRSFDRESPSNLDSTSGISQPHNRSETMNQRDVKSSGKRKRGESSLSWDQNMDNSQIFDSHKIDDQTGEVSKIEMPGNSGDIRNLHVGLSSDAFTTPQCGWQSSEATAIRPAIHKEPGNNVAGEGFLPSGSPFREQQLKQLRAQCLVFLALRNGLVPKKLHVEIALRNTFREEDGFRGELFDPKGRTHTSSDLGGIPDVSALLSRTDNPTGRLDEMDFSSKETERSRLGEKSFANTVFSDGQKLLASRIPSSQAQTQVAVSHSQLTFSPGLTKNTPSEMVGWTGVIKTNDLSTSAVQLDEFHSSDEEEGNLQPSPKYTMSQKWIMGRQNKRLLVDRSWSLKQQKADQAIGSRFNELKESVSLSDDISAKTKSVIELKKLQLLNLQRRLRSEFVYNFFKPIATDVEHLKSYKKHKHGRRIKQLEKYEQKMKEERQRRIRERQKEFFGGLEVHKEKLEDLFKVRRERLKGFNRYAKEFHKRKERLHREKIDKIQREKINLLKINDVEGYLRMVQDAKSDRVKQLLKETEKYLQKLGSKLKEAKLLTSRFENEADETRTSNATDDETLIENEDESDQAKHYLESNEKYYLMAHSIKENINEQPSSLVGGKLREYQMNGLRWLVSLYNNHLNGILADEMGLGKTVQVISLICYLMETKNDRGPFLVVVPSSVLPGWQSEINFWAPSIHKIVYCGTPDERRKLFKEQIVHQKFNVLLTTYEYLMNKHDRPKLSKIHWHYIIIDEGHRIKNASCKLNADLKHYVSSHRLLLTGTPLQNNLEELWALLNFLLPNIFNSSEDFSQWFNKPFQSNGESSAEEALLSEEENLLIINRLHQVLRPFVLRRLKHKVENELPEKIERLIRCEASAYQKLLMKRVEDNLGSIGNAKSRAVHNSVMELRNICNHPYLSQLHSEEVNNIIPKHFLPPIVRLCGKLEMLDRMLPKLKATDHRVLFFSTMTRLLDVMEDYLTLKGYKYLRLDGQTSGGDRGALIDGFNKSGSPFFIFLLSIRAGGVGVNLQAADTVILFDTDWNPQVDLQAQARAHRIGQKKDVLVLRFETVNSVEEQVRASAEHKLGVANQSITAGFFDNNTSAEDRKEYLESLLRESKKEEDAPVLDDDALNDLIARRESEIDIFESIDKQRKENEMETWNTLVHGPGSDSFAHIPSIPSRLVTEDDLKLLYETMKLNDVPMVAKESTVGMKRKDGSMGGLDTHQYGRGKRAREVRSYEEKLTEEEFEKLCQTESPDSPQGKGEGSERSLANDTSNIPVENSSDTLLPTSPTQAITVQPMEPVRPQSHTLKEETQPIKRGRGRPKRTDKALTPVSLSAVSRTQATGNAISSAATGLDFVSSDKRLEAASHPTSSLALTSPDLSGPPGFQSLPASPAPTPIRGRGRGRSRGRGAGRGRRVEGVLHGSNSSITQRTETATSLASDAEATKFALPRSASEIVSRVPKANEGSTSNPDQVSPVHSATTALRSDKAADKDLDAPPGFDSGSHVQTLNVLENSSERKAFAVKKRPLIQGVSSQHPGPNKQPLDLPVSTSSTLLGGGPVQNQNAVSSVCDGSKSPSEGRTYTALQGVTTAPSDATLPMSSQPSDATLPMSSQPVGSTVEAQEANVPSLPAALPAKRRVRNLPSRGETPKRQGKRRGQPLPATDASSARSTGLTPQIEVKVGNLSGTKAKFDAVAKEQPHFSQSVAPDIHSSGSLSQEIRRDTSGTGGSARKQTADVTDVARVMKEIFSETSLLKHKVGEPSATTRTNVPDAQSPGEMNLHTVETHKAEDSSGLKNQEALYNLSKADKLVSDIPHPVPGDLTTSGSVANKDVDIGSSKVAAENELVKIPGGDVDSSVIQLSLGNTLTAKSSLEKCTADQLLGEKLSQEGETTPASDGETCHLAEETASSLSYVRSEPTASASTTAEPLPTDKLEKNISFQDEVKTLNGDKREAILLSSEEQTNVNSKIETNSEELQASRTDEVPHVDGKSVDVANQTVKEDEAKHSVEIQSSMLEPDELPNAGQKGHSSIDLQPLVLVTSNENAMSLDDKDYDPISKSADIEQDPEESVFVQGVGRPKVGTADTQMEDTNDAKLLVGCSVESEEKEKTLQSLIPGDDADTEQDPEESVSDQRPKVGSAYTQMEDTDEAKLLMGCSVESEEKEKTLQSHIPGDDADTEKNPEESVSVQGVDRPKVGTTDTQMEDTNDAKLLVGCSVASEEKEKTLQSHIPGDDADTEQNPEESVSVQGVNRPKVGNANTQMEDTDEAKVLVGCSVESEEKEKTLQSHIPGDDADTEQNPEESVSNFDRPKDGTADTHMEDIDDAKLLVGCSVESEEKEKSLQSHMPSDDAVLHAPFENTKDSKGDDLHGESLVSCPTMEVMEQKGFESETHARTDSGGIDRGNEVSENMSDGVKMNISSVQVPDASHDLNVSQDQTDIPLVGGIDPEHVQENVDVPASPHGAAPNIVIFQSEGHLSPSILPDDVAGQLESMSNDEKTNISSEQVPDVSHDLKVSQDQTDIPPVGGIVPENLQEIVDVPASPHGVVPDVVVSQSEEIQSPSILPDDVPGQPDDGNCEKMDTMQNNTSIDIGITSGKTCQPSSSTQPEDENRNSLSHCEPSEVVEQRDSRDQVCIGSVESQVEISSAILENRSADIQPPQSILVDQKDIEESKEPGIESADVSLHQLADIQAEPSNLVDQMDIEESKEPGTESADVSLHQLADIQPGPSILVDQMDTEKSKEPGTESADVSLHQLADIQPGPSILVDQMDTEKSKEPGTESADVSLHQLADIQPGPSILVDQMDTEEFKNPDVSLHQLADIEPSLSISAVQKNIEDKDQSHVETAGSELVDVSAECSTEPQVQLPPSSEPVGDMHVHLGASKSEIVAEGTDFSSSLPKTEEENAKSQLADTEPSSSLTAVQKNIEDQVETAGCEFVVVSTGCSTEPQVQLPPSAEPVVAEGTEFPSSLLMTGVDNSSHLMTGVDNAKTHLADVVPSSSPTTMEKNIEAQDQDQVTTGGCGLVDVLTECSSEPQLQLPPSAEPVISEGTELATLPLTEEENADSQLANIEPSSSPSVVEKNIEAQDQDQVKTAGCELVSTGCSSEPQVHLPPSAEPDGDIHVHLKETEKSESMVVVGEGTAFPSSLPVTEEGNAESQLADTEPFTSPTVVEKNIKDQEQVETTGCGLVDDSTGCSSEPQVQLPPSAEPMEGTHMHLEETKKSETVVTEIQLADIDPSFSLIVVQTNIEDQDQIETGGCDLINVPSGCSTEPQIQLSSSAEPEEGMHIHLEAAMNSETVVTEGSELPSSLPMTEDENADGQLAEVEPSVSLTVEQTNIEEKDHIETAECELVDVSPGCSSQPEVKFPPSPDAVGGMDVHLETVVTEDTDSNSSLPKTEEKDAENPSDRLDGESDGTTVATVEGTCVESNSLVAEESNIEVPKDNEDV

SEQ ID NO: 8327 - protein, 3529 aa, Arabidopsis thaliana
MTSSSHNIELEAAKFLHKLIQDSKDEPAKLATKLYVILQHMKTSGKENTMPYQVISRAMDTVVNQHGLDIEALKSSCLPHPGGTQTEDSGSAHLAGSSQAVGVSNEGKATLVENEMTKYDAFTSGRQLGGSNSASQTFYQGSGTQSNRSFDRESPSNLDSTSGISQPHNRSETMNQRDVKSSGKRKRGESSLSWDQNMDNSQIFDSHKIDDQTGEVSKIEMPGNSGDIRNLHVGLSSDAFTTPQCGWQSSEATAIRPAIHKEPGNNVAGEGFLPSGSPFREQQLKQLRAQCLVFLALRNGLVPKKLHVEIALRNTFREEDGFRGELFDPKGRTHTSSDLGGIPDVSALLSRTDNPTGRLDEMDFSSKETERSRLGEKSFANTVFSDGQKLLASRIPSSQAQTQVAVSHSQLTFSPGLTKNTPSEMVGWTGVIKTNDLSTSAVQLDEFHSSDEEEGNLQPSPKYTMSQKWIMGRQNKRLLVDRSWSLKQQKADQAIGSRFNELKESVSLSDDISAKTKSVIELKKLQLLNLQRRLRSEFVYNFFKPIATDVEHLKSYKKHKHGRRIKQLEKYEQKMKEERQRRIRERQKEFFGGLEVHKEKLEDLFKVRRERLKGFNRYAKEFHKRKERLHREKIDKIQREKINLLKINDVEGYLRMVQDAKSDRVKQLLKETEKYLQKLGSKLKEAKLLTSRFENEADETRTSNATDDETLIENEDESDQAKHYLESNEKYYLMAHSIKENINEQPSSLVGGKLREYQMNGLRWLVSLYNNHLNGILADEMGLGKTVQVISLICYLMETKNDRGPFLVVVPSSVLPGWQSEINFWAPSIHKIVYCGTPDERRKLFKEQIVHQKFNVLLTTYEYLMNKHDRPKLSKIHWHYIIIDEGHRIKNASCKLNADLKHYVSSHRLLLTGTPLQNNLEELWALLNFLLPNIFNSSEDFSQWFNKPFQSNGESSAEEALLSEEENLLIINRLHQVLRPFVLRRLKHKVENELPEKIERLIRCEASAYQKLLMKRVEDNLGSIGNAKSRAVHNSVMELRNICNHPYLSQLHSEEVNNIIPKHFLPPIVRLCGKLEMLDRMLPKLKATDHRVLFFSTMTRLLDVMEDYLTLKGYKYLRLDGQTSGGDRGALIDGFNKSGSPFFIFLLSIRAGGVGVNLQAADTVILFDTDWNPQVDLQAQARAHRIGQKKDVLVLRFETVNSVEEQVRASAEHKLGVANQSITAGFFDNNTSAEDRKEYLESLLRESKKEEDAPVLDDDALNDLIARRESEIDIFESIDKQRKENEMETWNTLVHGPGSDSFAHIPSIPSRLVTEDDLKLLYETMKLNDVPMVAKESTVGMKRKDGSMGGLDTHQYGRGKRAREVRSYEEKLTEEEFEKLCQTESPDSPQGKGEGSERSLANDTSNIPVENSSDTLLPTSPTQAITVQPMEPVRPQSHTLKEETQPIKRGRGRPKRTDKALTPVSLSAVSRTQATGNAISSAATGLDFVSSDKRLEAASHPTSSLALTSPDLSGPPGFQSLPASPAPTPIRGRGRGRSRGRGAGRGRRVEGVLHGSNSSITQRTETATSLASDAEATKFALPRSASEIVSRVPKANEGSTSNPDQVSPVHSATTALRSDKAADKDLDAPPGFDSGSHVQTLNVLENSSERKAFAVKKRPLIQGVSSQHPGPNKQPLDLPVSTSSTLLGGGPVQNQNAVSSVCDGSKSPSEGRTYTALQGVTTAPSDATLPMSSQPSDATLPMSSQPVGSTVEAQEANVPSLPAALPAKRRVRNLPSRGETPKRQGKRRGQPLPATDASSARSTGLTPQIEVKVGNLSGTKAKFDAVAKEQPHFSQSVAPDIHSSGSLSQEIRRDTSGTGGSARKQTADVTDVARVMKEIFSETSLLKHKVGEPSATTRTNVPDAQSPGEMNLHTVETHKAEDSSGLKNQEALYNLSKADKLVSDIPHPVPGDLTTSGSVANKDVDIGSSKVAAENELVKIPGGDVDSSVIQLSLGNTLTAKSSLEKCTADQLLGEKLSQEGETTPASDGETCHLAEETASSLSYVRSEPTASASTTAEPLPTDKLEKNISFQDEVKTLNGDKREAILLSSEEQTNVNSKIETNSEELQASRTDEVPHVDGKSVDVANQTVKEDEAKHSVEIQSSMLEPDELPNAGQKGHSSIDLQPLVLVTSNENAMSLDDKDYDPISKSADIEQDPEESVFVQGVGRPKVGTADTQMEDTNDAKLLVGCSVESEEKEKTLQSLIPGDDADTEQDPEESVSDQRPKVGSAYTQMEDTDEAKLLMGCSVESEEKEKTLQSHIPGDDADTEKNPEESVSVQGVDRPKVGTTDTQMEDTNDAKLLVGCSVASEEKEKTLQSHIPGDDADTEQNPEESVSVQGVNRPKVGNANTQMEDTDEAKVLVGCSVESEEKEKTLQSHIPGDDADTEQNPEESVSNFDRPKDGTADTHMEDIDDAKLLVGCSVESEEKEKSLQSHMPSDDAVLHAPFENTKDSKGDDLHGESLVSCPTMEVMEQKGFESETHARTDSGGIDRGNEVSENMSDGVKMNISSVQVPDASHDLNVSQDQTDIPLVGGIDPEHVQENVDVPASPHGAAPNIVIFQSEGHLSPSILPDDVAGQLESMSNDEKTNISSEQVPDVSHDLKVSQDQTDIPPVGGIVPENLQEIVDVPASPHGVVPDVVVSQSEEIQSPSILPDDVPGQPDDGNCEKMDTMQNNTSIDIGITSGKTCQPSSSTQPEDENRNSLSHCEPSEVVEQRDSRDQVCIGSVESQVEISSAILENRSADIQPPQSILVDQKDIEESKEPGIESADVSLHQLADIQAEPSNLVDQMDIEESKEPGTESADVSLHQLADIQPGPSILVDQMDTEKSKEPGTESADVSLHQLADIQPGPSILVDQMDTEKSKEPGTESADVSLHQLADIQPGPSILVDQMDTEEFKNPDVSLHQLADIEPSLSISAVQKNIEDKDQSHVETAGSELVDVSAECSTEPQVQLPPSSEPVGDMHVHLGASKSEIVAEGTDFSSSLPKTEEENAKSQLADTEPSSSLTAVQKNIEDQVETAGCEFVVVSTGCSTEPQVQLPPSAEPVVAEGTEFPSSLLMTGVDNSSHLMTGVDNAKTHLADVVPSSSPTTMEKNIEAQDQDQVTTGGCGLVDVLTECSSEPQLQLPPSAEPVISEGTELATLPLTEEENADSQLANIEPSSSPSVVEKNIEAQDQDQVKTAGCELVSTGCSSEPQVHLPPSAEPDGDIHVHLKETEKSESMVVVGEGTAFPSSLPVTEEGNAESQLADTEPFTSPTVVEKNIKDQEQVETTGCGLVDDSTGCSSEPQVQLPPSAEPMEGGCDLINVPSGCSTEPQIQLSSSAEPEEGMHIHLEAAMNSETVVTEGSELPSSLPMTEDENADGQLAEVEPSVSLTVEQTNIEEKDHIETAECELVDVSPGCSSQPEVKFPPSPDAVGGMDVHLETVVTEDTDSNSSLPKTEEKDAENPSDRLDGESDGTTVATVEGTCVESNSLVAEESNIEVPKDNEDV

SEQ ID NO: 8328 - protein, 1359 aa, Arabidopsis thaliana
MSSLVERLRIRSDRKPVYNLDDSDDDDFVPKKDRTFEQVEAIVRTDAKENACQACGESTNLVSCNTCTYAFHAKCLVPPLKDASVENWRCPECVSPLNEIDKILDCEMRPTKSSEQGSSDAEPKPIFVKQYLVKVPEKEFQKAYKSNHRLKTRVNNFHRQMESFNNSEDDFVAIRPEWTTVDRILACREEDGELEYLVKYKELSYDECYWESESDISTFQNEIQRFKDVNSRTRRSKDVDHKRNPRDFQQFDHTPEFLKDVMIYLFPAIEGLLHPYQLEGLNFLRFSWSKQTHVILADEMGLGKTIQSIALLASLFEENLIPHLVIAPLSTLRNWEREFATWAPQMNVVMYFGTAQARAVIREHEFYLSKDQKKIKKKKSGQISSESKQKRIKFDVLLTSYEMINLDSAVLKPIKWECMIVDEGHRLKNKDSKLFSSLTQYSSNHRILLTGTPLQNNLDELFMLMHFLDAGKFGSLEEFQEEFKDINQEEQISRLHKMLAPHLLRRVKKDVMKDMPPKKELILRVDLSSLQKEYYKAIFTRNYQVLTKKGGAQISLNNIMMELRKVCCHPYMLEGVEPVIHDANEAFKQLLESCGKLQLLDKMMVKLKEQGHRVLIYTQFQHMLDLLEDYCTHKKWQYERIDGKVGGAERQIRIDRFNAKNSNKFCFLLSTRAGGLGINLATADTVIIYDSDWNPHADLQAMARAHRLGQTNKVMIYRLINRGTIEERMMQLTKKKMVLEHLVVGKLKTQNINQEELDDIIRYGSKELFASEDDEAGKSGKIHYDDAAIDKLLDRDLVEAEEVSVDDEEENGFLKAFKVANFEYIDENEAAALEAQRVAAESKSSAGNSDRASYWEELLKDKFELHQAEELNALGKRKRSRKQLVSIEEDDLAGLEDVSSDGDESYEAESTDGEAAGQGVQTGRRPYRRKGRDNLEPTPLMEGEGRSFRVLGFNQSQRAIFVQTLMRYGILFLKHIAEEIDENSPTFSDGVPKEGLRIEDVLVRIALLILVQEKVKFVEDHPGKPVFPSRILERFPGLRSGKIWKEEHDKIMIRAVLKHGYGRWQAIVDDKELGIQELICKELNFPHISLSAAEQAGLQGQNGSGGSNPGAQTNQNPGSVITGNNNASADGAQVNSMFYYRDMQRRLVEFVKKRVLLLEKAMNYEYAEEYYGLGGSSSIPTEEPEAEPKIADTVGVSFIEVDDEMLDGLPKTDPITSEEIMGAAVDNNQARVEIAQHYNQMCKLLDENARESVQAYVNNQPPSTKVNESFRALKSINGNINTILSITSDQSKSHEDDTKPDLNNVEMKDTAEETKPLRGGVVDLNVVEGEENIAEASGSVDVKMEEAKEEEKPKNMVVD

SEQ ID NO: 8329 - protein, 3574 aa, Arabidopsis thaliana
MTSSSHNIELEAAKFLHKLIQDSKDEPAKLATKLYVILQHMKTSGKENTMPYQVISRAMDTVVNQHGLDIEALKSSCLPHPGGTQTEDSGSAHLAGSSQAVGVSNEGKATLVENEMTKYDAFTSGRQLGGSNSASQTFYQGSGTQSNRSFDRESPSNLDSTSGISQPHNRSETMNQRDVKSSGKRKRGESSLSWDQNMDNSQIFDSHKIDDQTGEVSKIEMPGNSGDIRNLHVGLSSDAFTTPQCGWQSSEATAIRPAIHKEPGNNVAGEGFLPSGSPFREQQLKQLRAQCLVFLALRNGLVPKKLHVEIALRNTFREEDGFRGELFDPKGRTHTSSDLGGIPDVSALLSRTDNPTGRLDEMDFSSKETERSRLGEKSFANTVFSDGQKLLASRIPSSQAQTQVAVSHSQLTFSPGLTKNTPSEMVGWTGVIKTNDLSTSAVQLDEFHSSDEEEGNLQPSPKYTMSQKWIMGRQNKRLLVDRSWSLKQQKADQAIGSRFNELKESVSLSDDISAKTKSVIELKKLQLLNLQRRLRSEFVYNFFKPIATDVEHLKSYKKHKHGRRIKQLEKYEQKMKEERQRRIRERQKEFFGGLEVHKEKLEDLFKVRRERLKGFNRYAKEFHKRKERLHREKIDKIQREKINLLKINDVEGYLRMVQDAKSDRVKQLLKETEKYLQKLGSKLKEAKLLTSRFENEADETRTSNATDDETLIENEDESDQAKHYLESNEKYYLMAHSIKENINEQPSSLVGGKLREEQMNGLRWLVSLYNNHLNGILADEMGLGKTVQVISLICYLMETKNDRGPFLVVVPSSVLPGWQSEINFWAPSIHKIVYCGTPDERRKLFKEQIVHQKFNVLLTTYEYLMNKHDRPKLSKIHWHYIIIDEGHRIKNASCKLNADLKHYVSSHRLLLTGTPLQNNLEELWALLNFLLPNIFNSSEDFSQWFNKPFQSNGESSAEEALLSEEENLLIINRLHQVLRPFVLRRLKHKVENELPEKIERLIRCEASAYQKLLMKRVEDNLGSIGNAKSRAVHNSVMELRNICNHPYLSQLHSEEVNNIIPKHFLPPIVRLCGKLEMLDRMLPKLKATDHRVLFFSTMTRLLDVMEDYLTLKGYKYLRLDGQTSGGDRGALIDGFNKSGSPFFIFLLSIRAGGVGVNLQAADTVILFDTDWNPQVDLQAQARAHRIGQKKDVLVLRFETVNSVEEQVRASAEHKLGVANQSITAGFFDNNTSAEDRKEYLESLLRESKKEEDAPVLDDDALNDLIARRESEIDIFESIDKQRKENEMETWNTLVHGPGSDSFAHIPSIPSRLVTEDDLKLLYETMKLNDVPMVAKESTVGMKRKDGSMGGLDTHQYGRGKRAREVRSYEEKLTEEEFEKLCQTESPDSPQGKGEGSERSLANDTSNIPVENSSDTLLPTSPTQAITVQPMEPVRPQSHTLKEETQPIKRGRGRPKRTDKALTPVSLSAVSRTQATGNAISSAATGLDFVSSDKRLEAASHPTSSLALTSPDLSGPPGFQSLPASPAPTPIRGRGRGRSRGRGAGRGRRVEGVLHGSNSSITQRTETATSLASDAEATKFALPRSASEIVSRVPKANEGSTSNPDQVSPVHSATTALRSDKAADKDLDAPPGFDSGSHVQTLNVLENSSERKAFAVKKRPLIQGVSSQHPGPNKQPLDLPVSTSSTLLGGGPVQNQNAVSSVCDGSKSPSEGRTYTALQGVTTAPSDATLPMSSQPSDATLPMSSQPVGSTVEAQEANVPSLPAALPAKRRVRNLPSRGETPKRQGKRRGQPLPATDASSARSTGLTPQIEVKVGNLSGTKAKFDAVAKEQPHFSQSVAPDIHSSGSLSQEIRRDTSGTGGSARKQTADVTDVARVMKEIFSETSLLKHKVGEPSATTRTNVPDAQSPGEMNLHTVETHKAEDSSGLKNQEALYNLSKADKLVSDIPHPVPGDLTTSGSVANKDVDIGSSKVAAENELVKIPGGDVDSSVIQLSLGNTLTAKSSLEKCTADQLLGEKLSQEGETTPASDGETCHLAEETASSLSYVRSEPTASASTTAEPLPTDKLEKNISFQDEVKTLNGDKREAILLSSEEQTNVNSKIETNSEELQASRTDEVPHVDGKSVDVANQTVKEDEAKHSVEIQSSMLEPDELPNAGQKGHSSIDLQPLVLVTSNENAMSLDDKDYDPISKSADIEQDPEESVFVQGVGRPKVGTADTQMEDTNDAKLLVGCSVESEEKEKTLQSLIPGDDADTEQDPEESVSDQRPKVGSAYTQMEDTDEAKLLMGCSVESEEKEKTLQSHIPGDDADTEKNPEESVSVQGVDRPKVGTTDTQMEDTNDAKLLVGCSVASEEKEKTLQSHIPGDDADTEQNPEESVSVQGVNRPKVGNANTQMEDTDEAKVLVGCSVESEEKEKTLQSHIPGDDADTEQNPEESVSNFDRPKDGTADTHMEDIDDAKLLVGCSVESEEKEKSLQSHMPSDDAVLHAPFENTKDSKGDDLHGESLVSCPTMEVMEQKGFESETHARTDSGGIDRGNEVSENMSDGVKMNISSVQVPDASHDLNVSQDQTDIPLVGGIDPEHVQENVDVPASPHGAAPNIVIFQSEGHLSPSILPDDVAGQLESMSNDEKTNISSEQVPDVSHDLKVSQDQTDIPPVGGIVPENLQEIVDVPASPHGVVPDVVVSQSEEIQSPSILPDDVPGQPDDGNCEKMDTMQNNTSIDIGITSGKTCQPSSSTQPEDENRNSLSHCEPSEVVEQRDSRDQVCIGSVESQVEISSAILENRSADIQPPQSILVDQKDIEESKEPGIESADVSLHQLADIQAEPSNLVDQMDIEESKEPGTESADVSLHQLADIQPGPSILVDQMDTEKSKEPGTESADVSLHQLADIQPGPSILVDQMDTEKSKEPGTESADVSLHQLADIQPGPSILVDQMDTEEFKNPDVSLHQLADIEPSLSISAVQKNIEDKDQSHVETAGSELVDVSAECSTEPQVQLPPSSEPVGDMHVHLGASKSEIVAEGTDFSSSLPKTEEENAKSQLADTEPSSSLTAVQKNIEDQVETAGCEFVVVSTGCSTEPQVQLPPSAEPVVAEGTEFPSSLLMTGVDNSSHLMTGVDNAKTHLADVVPSSSPTTMEKNIEAQDQDQVTTGGCGLVDVLTECSSEPQLQLPPSAEPVISEGTELATLPLTEEENADSQLANIEPSSSPSVVEKNIEAQDQDQVKTAGCELVSTGCSSEPQVHLPPSAEPDGDIHVHLKETEKSESMVVVGEGTAFPSSLPVTEEGNAESQLADTEPFTSPTVVEKNIKDQEQVETTGCGLVDDSTGCSSEPQVQLPPSAEPMEGTHMHLEETKKSETVVTEIQLADIDPSFSLIVVQTNIEDQDQIETGGCDLINVPSGCSTEPQIQLSSSAEPEEGMHIHLEAAMNSETVVTEGSELPSSLPMTEDENADGQLAEVEPSVSLTVEQTNIEEKDHIETAECELVDVSPGCSSQPEVKFPPSPDAVGGMDVHLETVVTEDTDSNSSLPKTEEKDAENPSDRLDGESDGTTVATVEGTCVESNSLVAEESNIEVPKDNEDV

SEQ ID NO: 8330 - protein, 1339 aa, Arabidopsis thaliana
MTSSSHNIELEAAKFLHKLIQDSKDEPAKLATKLYVILQHMKTSGKENTMPYQVISRAMDTVVNQHGLDIEALKSSCLPHPGGTQTEDSGSAHLAGSSQAVGVSNEGKATLVENEMTKYDAFTSGRQLGGSNSASQTFYQGSGTQSNRSFDRESPSNLDSTSGISQPHNRSETMNQRDVKSSGKRKRGESSLSWDQNMDNSQIFDSHKIDDQTGEVSKIEMPGNSGDIRNLHVGLSSDAFTTPQCGWQSSEATAIRPAIHKEPGNNVAGEGFLPSGSPFREQQLKQLRAQCLVFLALRNGLVPKKLHVEIALRNTFREEDGFRGELFDPKGRTHTSSDLGGIPDVSALLSRTDNPTGRLDEMDFSSKETERSRLGEKSFANTVFSDGQKLLASRIPSSQAQTQVAVSHSQLTFSPGLTKNTPSEMVGWTGVIKTNDLSTSAVQLDEFHSSVLLTNLIDNSSNMDIWHIADEEEGNLQPSPKYTMSQKWIMGRQNKRLLVDRSWSLKQQKADQAIGSRFNELKESVSLSDDISAKTKSVIELKKLQLLNLQRRLRSEFVYNFFKPIATDVEHLKSYKKHKHGRRIKQLEKYEQKMKEERQRRIRERQKEFFGGLEVHKEKLEDLFKVRRERLKGFNRYAKEFHKRKERLHREKIDKIQREKINLLKINDVEGYLRMVQDAKSDRVKQLLKETEKYLQKLGSKLKEAKLLTSRFENEADETRTSNATDDETLIENEDESDQAKASYISAFFHLFLMVMIHTIQHYLESNEKYYLMAHSIKENINEQPSSLVGGKLREYQMNGLRWLVSLYNNHLNGILADEMGLGKTVQMGLGKTVQVISLICYLMETKNDRGPFLVVVPSSVLPGWQSEINFWAPSIHKIVYCGTPDERRKLFKEQIVHQKFNVLLTTYEYLMNKHDRPKLSKIHWHYIIIDEGHRIKNASCKLNADLKHYVSSHRLLLTGTPLQNNLEELWALLNFLLPNIFNSSEDFSQWFNKPFQSNGESSALLSEEENLLIINRLHQVLRPFVLRRLKHKVENELPEKIERLIRCEASAYQKLLMKRVEDNLGSIGNAKSRAVHNSVMELRNICNHPYLSQLHSEEHFLPPIVRLCGKLEMLDRMLPKLKATDHRVLFFSTMTRLLDVMEDYLTLKGYKYLRLDGQTSGGDRGALIDGFNKSGSPFFIFLLSIRAGGVGVNLQAADTVILFDTDWNPQVDLQAQARAHRIGQKKDVLVLRFETVNSVEEQVRASAEHKLGVANQSITAGFFDNNTSAEDRKEYLESLLRESKKEEDAPVLDDDALNDLIARRESEIDIFESIDKQRKENEMVCLFLLTLFSGYIVL

SEQ ID NO: 8331 - protein, 1090 aa, Arabidopsis thaliana
MAENTASHRRKPRSLNDRHYSILQDLSAPPRQPPSSSHGEDEETKKSMIKLAGRRRLCKALPKEDEADGYDDPDLVDFYSPVKGETSLDSAGIGNKFTSWDESKEANTELAGEPNFSIITDFCSPSPQLKQKEEMQGDGGRNEIMGILDDLTSKLGTMSIQKKKDSQSNDFDACGVKSQVDKFDFEDAKSSFSLLSDLSKSSPDVVTTYNAGVNSIKDKQGKSGFAIREEQTSKEFSREWEERISNVGKQNSYSGRHFDDNSEDNRQGYNLDRGKSQCKEVDQSMKTTRHIEVSEKIRTVGRSNAAKLRDLDEDDDDDDCLILSGKKAAEMKINKPARSYNAKRHGYDERSLEDEGSITLTGLNLSYTLPGKIATMLYPHQREGLNWLWSLHTQGKGGILGDDMGLGKTMQICSFLAGLFHSKLIKRALVVAPKTLLPHWMKELATVGLSQMTREYYGTSTKAREYDLHHILQGKGILLTTYDIVRNNTKALQGDDHYTDEDDEDGNKWDYMILDEGHLIKNPNTQRAKSLLEIPSSHRIIISGTPIQNNLKELWALFNFSCPGLLGDKNWFKQNYEHYILRGTDKNATDREQRIGSTVAKNLREHIQPFFLRRLKSEVFGDDGATSKLSKKDEIVVWLRLTACQRQLYEAFLNSEIVLSAFDGSPLAALTILKKICDHPLLLTKRAAEDVLEGMDSTLTQEEAGVAERLAMHIADNVDTDDFQTKNDSISCKLSFIMSLLENLIPEGHRVLIFSQTRKMLNLIQDSLTSNGYSFLRIDGTTKAPDRLKTVEEFQEGHVAPIFLLTSQVGGLGLTLTKADRVIVVDPAWNPSTDNQSVDRAYRIGQTKDVIVYRLMTSATVEEKIYRKQVYKGGLFKTATEHKEQIRYFSQQDLRELFSLPKGGFDVSPTQQQLYEEHYNQIKLDEKLESHVKFLETLGIAGVSHHSLLFSKTAPIQAIQKDEEEQIRRETALLLGRASASISQDTVINGADYAFKPKDVNLDKRINISPVDDKELSESVIKARLNRLTMLLQNKGTVSRLPDGGAKIQKQIAELTRELKDMKAAERINMPQVIDLEEDISRKMQKGLNL

SEQ ID NO: 8332 - protein, 861 aa, Arabidopsis thaliana
MSKESSPPKVPSTTMEYERRLEAAAEIILEKEAKFSNTPPDCSEFGVTATLKPHQVEGVSWLIQKYLLGVNVVLELDQMGLGKTLQAISFLSYLKFRQGLPGPFLVLCPLSVTDGWVSEINRFTPNLEVLRYVGDKYCRLDMRKSMYDHGHFLPFDVLLTTYDIALVDQDFLSQIPWQYAIIDEAQRLKNPNSVLYNVLLEQFLIPRRLLITGTPIQNNLTELWALMHFCMPLVFGTLDQFLSAFKETGDGLDVSNDKETYKSLKFILGAFMLRRTKSLLIESGNLVLPPLTELTVMVPLVSLQKKIYTSILRKELPGLLELSSGGSNHTSLQNIVIQLRKACSHPYLFPGIEPEPFEEGEHLVQASGKLLVLDQLLKRLHDSGHRVLLFSQMTSTLDILQDFMELRRYSYERLDGSVRAEERFAAIKNFSAKTERGLDSEVDGSNAFVFMISTRAGGVGLNLVAADTVIFYEQDWNPQVDKQALQRAHRIGQISHVLSINLVTEHSVEEVILRRAERKLQLSHNVVGDNMEEKEEDGGDLRSLVFGLQRFDPEEIHNEESDNLKMVEISSLAEKVVAIRQNVEPDKEERRFEINSSDTLLGNTSSASLDSELDEASYLSWVEKLKEAARSSKDEKIIELGNRKNLSEERNLRIEAARKKAEEKKLATWGAHGYQSLSVEEPILPDDVDSSSDAGSVNFVFGDCTNPSTVSHEPAIIFSCVDDSGNWGRGGMFDALSKLSNTVPTAYHRASEFKDLHLGDLHLIKIDDNDDQQNTQASKPLWVAVAVTQSYNSRRKVPRSSISIPDLESCLAKASFSASQKSASLHMPRIGYQDGSDRSQWYTVERLLRKYSSIFTVKIFV

SEQ ID NO: 8333 - protein, 2228 aa, Arabidopsis thaliana
MKQKRRKLPSILDILDQKVDSSMAFDSPEYTSSSKPSKQRLKTDSTPERNSSKRKGNDGNYFECVICDLGGDLLCCDSCPRTYHTACLNPPLKRIPNGKWICPKCSPNSEALKPVNRLDAIAKRARTKTKKRNSKAGPKCERASQIYCSSIISGEQSSEKGKSISAEESKSTGKEVYSSPMDGCSTAELGHASADDRPDSSSHGEDDLGKPVIPTADLPSDAGLTLLSCEDLSESKLSDTEKTHEAPVEKLEHASSEIVENKTVAEMETGKGKRKKRKRELNDGESLERCKTDKKRAKKSLSKVGSSSQTTKSPESSKKKKKKNRVTLKSLSKPQSKTETPEKVKKLPKEERRAVRATNKSSSCLEDTNSLPVGNLQVHRVLGCRIQGLTKTSLCSALSDDLCSDNLQATDQRDSLVQDTNAELVVAEDRIDSSSETGKSSRDSRLRDKDMDDSALGTEGMVEVKEEMLSEDISNATLSRHVDDEDMKVSETHVSVERELLEEAHQETGEKSTVADEEIEEPVAAKTSDLIGETVSYEFLVKWVDKSNIHNTWISEAELKGLAKRKLENYKAKYGTAVINICEDKWKQPQRIVALRVSKEGNQEAYVKWTGLAYDECTWESLEEPILKHSSHLIDLFHQYEQKTLERNSKGNPTRERGEVVTLTEQPQELRGGALFAHQLEALNWLRRCWHKSKNVILADEMGLGKTVSASAFLSSLYFEFGVARPCLVLVPLSTMPNWLSEFSLWAPLLNVVEYHGSAKGRAIIRDYEWHAKNSTGTTKKPTSYKFNVLLTTYEMVLADSSHLRGVPWEVLVVDEGHRLKNSESKLFSLLNTFSFQHRVLLTGTPLQNNIGEMYNLLNFLQPSSFPSLSSFEERFHDLTSAEKVEELKKLVAPHMLRRLKKDAMQNIPPKTERMVPVELTSIQAEYYRAMLTKNYQILRNIGKGVAQQSMLNIVMQLRKVCNHPYLIPGTEPESGSLEFLHDMRIKASAKLTLLHSMLKVLHKEGHRVLIFSQMTKLLDILEDYLNIEFGPKTFERVDGSVAVADRQAAIARFNQDKNRFVFLLSTRACGLGINLATADTVIIYDSDFNPHADIQAMNRAHRIGQSKRLLVYRLVVRASVEERILQLAKKKLMLDQLFVNKSGSQKEFEDILRWGTEELFNDSAGENKKDTAESNGNLDVIMDLESKSRKKGGGLGDVYQDKCTEGNGKIVWDDIAIMKLLDRSNLQSASTDAADTELDNDMLGSVKPVEWNEETAEEQVGAESPALVTDDTGEPSSERKDDDVVNFTEENEWDRLLRMRLEFPLSLSSASWLWSWQHIWEKYQSEEEAALGRGKRLRKAVSYREAYAPHTSGPVNESGGEDEKEPEPELKKEYTPAGRALKEKFTKLRERQKNLIARRNSVEESLPSGNVDQVTEVANQDEESPTSMDLDDSKASQQCDAQKRKASSSDPKPDLLSQHHHGAECLPSLPPNNLPVLGLCAPNFTQSESSRRNYSRPGSRQNRPITGPHFPFNLPQTSNLVEREANDQEPPMGKLKPQNIKEEPFQQPLSNMDGWLPHRQFPPSGDFERPRSSGAAFADFQEKFPLLNLPFDDKLLPRFPFQPRTMGTSHQDIMANLSMRKRFEGTGHSMQDLFGGTPMPFLPNMKIPPMDPPVFNQQEKDLPPLGLDQFPSALSSIPENHRKVLENIMLRTGSGIGHVQKKKTRVDAWSEDELDSLWIGIRRHGYGNWETILRDPRLKFSKFKTPEYLAARWEEEQRKFLDSLSSLPSKSSRTDKSTKSSLFPGLPQGIMNRALHGKYATPPRFQSHLTDIKLGFGDLASPLPLFEPSDHLGFRSEHFPPMANLCTDNLPGEPSAGPSERAGTSTNIPNEKPFPLNSLGMGNLGSLGLDSLSSLNTLRAEEKRDAIKRGKLPLFLDMPLPQMLDSSNNVFLGRSANPSFLHPNRGLNPSNPMGRDIMGISSSENKLPHWLRNVVTVPTVKSPEPPTLPPTVSAIAQSVRVLYGEDSTTIPPFVIPEPPPPAPRDPRHSLRKKRKRKLHSSSQKTTDIGSSSHNAVESSSQGNPQTSATPPLPPPSLAGETSGSSQPKLPPHNLNSTEPLSSEAIIIPPPEEDSVIAAAPSEAPGPSLEGITGTTKSISLESQSSEPETINQDGDLDPETDEKVESERTPLHSDEKQEEQESENALNKQCEPIEAESQNTNAEEEAEAQEEDEESMKMVTGNSLSDD

SEQ ID NO: 8334 - protein, 874 aa, Arabidopsis thaliana
MSLLHTFKETLKPCGSFPSSSSLRVSSTQELEPSRKPPKSSLSQQLLRLDDSYFLPSKHESKISKTQVEDFDHNEDDHKRNIKFDEEEVDEDDERSIEFGRPGLSRAEFDYSGPYEPLMLSSIGEIPIIHVIFLPKSLTFAHVPASINCRLLEHQREGVKFMYNLYKNNHGGILGDDMGLGKTIQTIAFLAAVYGKDGDAGESCLLESDKGPVLIICPSSIIHNWESEFSRWASFFKVSVYHGSNRDMILEKLKARGVEVLVTSFDTFRIQGPVLSGINWEIVIADEAHRLKNEKSKLYEACLEIKTKKRIGLTGTVMQNKISELFNLFEWVAPGSLGTREHFRDFYDEPLKLGQRATAPERFVQIADKRKQHLGSLLRKYMLRRTKEETIGHLMMGKEDNVVFCQMSQLQRRVYQRMIQLPEIQCLVNKDNPCACGSPLKQSECCRRIVPDGTIWSYLHRDNHDGCDSCPFCLVLPCLMKLQQISNHLELIKPNPKDEPEKQKKDAEFVSTVFGTDIDLLGGISASKSFMDLSDVKHCGKMRALEKLMASWISKGDKILLFSYSVRMLDILEKFLIRKGYSFARLDGSTPTNLRQSLVDDFNASPSKQVFLISTKAGGLGLNLVSANRVVIFDPNWNPSHDLQAQDRSFRYGQKRHVVVFRLLSAGSLEELVYTRQVYKQQLSNIAVAGKMETRYFEGVQDCKEFQGELFGISNLFRDLSDKLFTSDIVELHRDSNIDENKKRSLLETGVSEDEKEEEVMCSYKPEMEKPILKDLGIVYAHRNEDIINIGETTTSTSQRLNGDGNSADRKKKKRKGCSEEEDMSSSNREQKREKYKMLAEFKGMEILEFSRWVLSASPFDREKLLQDFLERVK

SEQ ID NO: 8335 - protein, 1738 aa, Arabidopsis thaliana
MAFFRNYSNDTVSHNVLDENEERQNAATFQSSPLNEDVDGTYSERGFDMNMDVQYQSDPEPGCSIRQPNETAVDNVADPVDSHYQSSTKRLGVTGRWGSTFWKDCQPMGQREGSDPAKDSQSGYKEAYHSEDNHSNDRSEKLDSENENDNENEEEDNEMNKHQSGQADVPADEMLSDEYYEQDEDNQSDHVHYKGYSNPTNSRSLPKAGSAVHSNSRTSRAIHKNIHYSDSNHDHNGDADMDYEEEEDEDDPEDADFEPYDAADDGGASKKHGQGWDVSDEDPESDEEIDLSDYEDDYGTKKPKVRQQSKGFRKSSAGLERKSFHVSSRQKRKTSYQDDDSEEDSENDNDEGFRSLARRGTTLRQNNGRSTNTIGQSSEVRSSTRSVRKVSYVESEDSEDIDDGKNRKNQKDDIEEEDADVIEKVLWHQLKGMGEDVQTNNKSTVPVLVSQLFDTEPDWNEMEFLIKWKGQSHLHCQWKTLSDLQNLSGFKKVLNYTKKVTEEIRYRTALSREEIEVNDVSKEMDLDIIKQNSQVERIIADRISKDGLGDVVPEYLVKWQGLSYAEATWEKDVDIAFAQVAIDEYKAREVSIAVQGKMVEQQRTKGKGENSFSNAELWLLFSVASLRKLDEQPEWLIGGTLRDYQLEGLNFLVNSWLNDTNVILADEMGLGKTVQSVSMLGFLQNTQQIPGPFLVVVPLSTLANWAKEFRKWLPGMNIIVYVGTRASREVRNKTNDVHKVGRPIKFNALLTTYEVVLKDKAVLSKIKWIYLMVDEAHRLKNSEAQLYTALLEFSTKNKLLITGTPLQNSVEELWALLHFLDPGKFKNKDEFVENYKNLSSFNESELANLHLELRPHILRRVIKDVEKSLPPKIERILRVEMSPLQKQYYKWILERNFHDLNKGVRGNQVSLLNIVVELKKCCNHPFLFESADHGYGGDINDNSKLDKIILSSGKLVILDKLLVRLRETKHRVLIFSQMVRMLDILAEYLSLRGFQFQRLDGSTKAELRQQAMDHFNAPASDDFCFLLSTRAGGLGINLATADTVVIFDSDWNPQNDLQAMSRAHRIGQQEVVNIYRFVTSKSVEEEILERAKRKMVLDHLVIQKLNAEGRLEKRETKKGSNFDKNELSAILRFGAEELFKEDKNDEESKKRLLSMDIDEILERAEQVEEKHTDETEHELLGAFKVANFCNAEDDGSFWSRWIKPDSVVTAEEALAPRAARNTKSYVDPSHPDRTSKRKKKGSEPPEHTERSQKRRKTEYFVPSTPLLEGTSAQVRGWSYGNLPKRDAQRFYRTVMKFGNHNQMACIAEEVGGVVEAAPEEAQVELFDALIDGCKESVETGNFEPKGPVLDFFGVPVKANELLKRVQGLQLLSKRISRYNDPISQFRVLSYLKPSNWSKGCGWNQIDDARLLLGILYHGFGNWEKIRLDESLGLTKKIAPVELQHHETFLPRAPNLKERATALLEMELAAAGGKNTNAKASRKNSKKVKDNLINQFKAPARDRRGKSGPANVSLLSTKDGPRKTQKAEPLVKEEGEMSDDGEVYEQFKEQKWMEWCEDVLADEIKTLGRLQRLQTTSADLPKEKVLFKIRRYLEILGRRIDAIVLEHEEDLYKQDRMTMRLWNYVSTFSNLSGDRLNQIYSKLKQEKEEEEGVGPSHLNGSRNFQRQQKFKTAGNSQGSQQVHKGIDTAKFEAWKRRRRTENDVQTERPTITNSNSLGILGPGPLDRSHRARQTGFPPR

SEQ ID NO: 8336 - protein, 1245 aa, Arabidopsis thaliana
MSNSVMSNSRYYTLAHAVNEVVVRQPSMLQAGTLRDYQLVGLQWMLSLYNNKLNGILADEMGLGKTVQVMALIAYLMEFKGNYGPHLIIVPNAVLVNWKSELHTWLPSVSCIYYVGTKDQRSKLFSQVKFEKFNVLVTTYEFIMYDRSKLSKVDWKYIIIDEAQRMKDRESVLARDLDRYRCQRRLLLTGTPLQNDLKELWSLLNLLLPDVFDNRKAFHDWFAQPFQKEGPAHNIEDDWLETEKKVIVIHRLHQILEPFMLRRRVEDVEGSLPAKVSVVLRCRMSAIQSAVYDWIKATGTLRVDPDDEKLRAQKNPIYQAKIYRTLNNRCMELRKACNHPLLNYPYFNDFSKDFLVRSCGKLWILDRILIKLQRTGHRVLLFSTMTKLLDILEEYLQWRRLVYRRIDGTTSLEDRESAIVDFNDPDTDCFIFLLSIRAAGRGLNLQTADTVVIYDPDPNPKNEEQAVARAHRIGQTREVKVIYMEAVVEKLSSHQKEDELRSGGSVDLEDDMAGKDRYIGSIEGLIRNNIQQYKIDMADEVINAGRFDQRTTHEERRMTLETLLHDEERYQETVHDVPSLHEVNRMIARSEEEVELFDQMDEEFDWTEEMTNHEQVPKWLRASTREVNATVADLSKKPSKNMLSSSNLIVQPGGPGGERKRGRPKSKKINYKEIEDDIAGYSEESSEERNIDSGNEEEGDIRQFDDDELTGALGDHQTNKGEFDGENPVCGYDYPPGSGSYKKNPPRDDAGSSGSSPESHRSKEMASPVSSQKFGSLSALDTRPGSVSKRLLDDLEEGEIAASGDSHIDLQRSGSWAHDRDEGDEEQVLQPTIKRKRSIRLRPRQTAERVDGSEMPAAQPLQVDRSYRSKLRTVVDSHSSRQDQSDSSSRLRSVPAKKVASTSKLHVSSPKSGRLNATQLTVEDNAEASRETWDGTSPISSSNAGARMSHIIQKRCKIVISKLQRRIDKEGQQIVPMLTNLWKRIQNGYAAGGVNNLLELREIDHRVERLEYAGVMELASDVQLMLRGAMQFYGFSHEVRSEAKKVHNLFFDLLKMSFPDTDFREARNALSFSGSAPTLVSTPTPRGAGISQGKRQKLVNEPETEPSSPQRSQQRENSRIRVQIPQKETKLGGTTSHTDESPILAHPGELVICKKKRKDREKSGPKTRTGGSSSPVSPPPAMIGRGLRSPVSGGVPRETRLAQQQRWPNQPTHPNNSGAAGDSVGWANPVKRLRTDSGKRRPSHL

SEQ ID NO: 8337 - protein, 1496 aa, Arabidopsis thaliana
MDPSRRPPKDSPYANLFDLEPLMKFRIPKPEDEVDYYGSSSQDESRSTQGGVVANYSNGSKSRMNASSKKRKRWTEAEDAEDDDDLYNQHVTEEHYRSMLGEHVQKFKNRSKETQGNPPHLMGFPVLKSNVGSYRGRKPGNDYHGRFYDMDNSPNFAADVTPHRRGSYHDRDITPKIAYEPSYLDIGDGVIYKIPPSYDKLVASLNLPSFSDIHVEEFYLKGTLDLRSLAELMASDKRSGVRSRNGMGEPRPQYESLQARMKALSPSNSTPNFSLKVSEAAMNSAIPEGSAGSTARTILSEGGVLQVHYVKILEKGDTYEIVKRSLPKKLKAKNDPAVIEKTERDKIRKAWINIVRRDIAKHHRIFTTFHRKLSIDAKRFADGCQREVRMKVGRSYKIPRTAPIRTRKISRDMLLFWKRYDKQMAEERKKQEKEAAEAFKREQEQRESKRQQQRLNFLIKQTELYSHFMQNKTDSNPSEALPIGDENPIDEVLPETSAAEPSEVEDPEEAELKEKVLRAAQDAVSKQKQITDAFDTEYMKLRQTSEMEGPLNDISVSGSSNIDLHNPSTMPVTSTVQTPELFKGTLKEYQMKGLQWLVNCYEQGLNGILADEMGLGKTIQAMAFLAHLAEEKNIWGPFLVVAPASVLNNWADEISRFCPDLKTLPYWGGLQERTILRKNINPKRMYRRDAGFHILITSYQLLVTDEKYFRRVKWQYMVLDEAQAIKSSSSIRWKTLLSFNCRNRLLLTGTPIQNNMAELWALLHFIMPMLFDNHDQFNEWFSKGIENHAEHGGTLNEHQLNRLHAILKPFMLRRVKKDVVSELTTKTEVTVHCKLSSRQQAFYQAIKNKISLAELFDSNRGQFTDKKVLNLMNIVIQLRKVCNHPELFERNEGSSYLYFGVTSNSLLPHPFGELEDVHYSGGQNPIIYKIPKLLHQEVLQNSETFCSSVGRGISRESFLKHFNIYSPEYILKSIFPSDSGVDQVVSGSGAFGFSRLMDLSPSEVGYLALCSVAERLLFSILRWERQFLDELVNSLMESKDGDLSDNNIERVKTKAVTRMLLMPSKVETNFQKRRLSTGPTRPSFEALVISHQDRFLSSIKLLHSAYTYIPKARAPPVSIHCSDRNSAYRVTEELHQPWLKRLLIGFARTSEANGPRKPNSFPHPLIQEIDSELPVVQPALQLTHRIFGSCPPMQSFDPAKLLTDSGKLQTLDILLKRLRAGNHRVLLFAQMTKMLNILEDYMNYRKYKYLRLDGSSTIMDRRDMVRDFQHRSDIFVFLLSTRAGGLGINLTAADTVIFYESDWNPTLDLQAMDRAHRLGQTKDETVEEKILHRASQKNTVQQLVMTGGHVQGDDFLGAADVVSLLMDDAEAAQLEQKFRELPLQDRQKKKTKRIRIDAEGDATLEELEDVDRQDNGQEPLEEPEKPKSSNKKRRAASNPKARAPQKAKEEANGEDTPQRTKRVKRQTKSINESLEPVFSASVTESNKGFDPSSSAN

SEQ ID NO: 8338 - protein, 1053 aa, Arabidopsis thaliana
MAENTASHRRKPRSLNDRHYSILQDLSAPPRQPPSSSHGEDEETKKSMIKLAGRRRLCKALPKEDEADGYDDPDLVDFYSPVKGETSLDSAGIGNKFTSWDESKEANTELAGEPNFSIITDFCSPSPQLKQKEEMQGDGGRNEIMGILDDLTSKLGTMSIQKKKDSQSNDFDACGVKSQVDKFDFEDAKSSFSLLSDLSKSSPDVVTTYNAGVNSIKDKQGKSGFAIREEQTSKEFSREWEERISNVGKQNSYSGRHFDDNSEDNRQGYNLDRGKSQCKEVDQSMKTTRHIEVSEKIRTVGRSNAAKLRDLDEDDDDDDCLILSGKKAAEMKINKPARSYNAKRHGYDERSLEDEGSITLTGLNLSYTLPGKIATMLYPHQREGLNWLWSLHTQGKGGILGDDMGLGKTMQICSFLAGLFHSKLIKRALVVAPKTLLPHWMKELATVGLSQMTREYYGTSTKAREYDLHHILQGKGILLTTYDIVRNNTKALQGDDHYTDEDDEDGNKWDYMILDEGHLIKNPNTQRAKSLLEIPSSHRIIISGTPIQNNLKALSFNRFKQNYEHYILRGTDKNATDREQRIGSTVAKNLREHIQPFFLRRLKSEVFGDDGATSKLSKKDEIVVWLRLTACQRQLYEAFLNSEIVLSAFDGSPLAALTILKKICDHPLLLTKRAAEDVLEGMDSTLTQEEAGVAERLAMHIADNVDTDDFQTKNDSISCKLSFIMSLLDSLTSNGYSFLRIDGTTKAPDRLKTVEEFQEGHVAPIFLLTSQVGGLGLTLTKADRVIVVDPAWNPSTDNQSVDRAYRIGQTKDVIVYRLMTSATVEEKIYRKQVYKGGLFKTATEHKEQIRYFSQQDLRELFSLPKGGFDVSPTQQQLYEEHYNQIKLDEKLESHVKFLETLGIAGVSHHSLLFSKTAPIQAIQKDEEEQIRRETALLLGRASASISQDTVINGADYAFKPKDVNLDKRINISPVDDKELSESVIKARLNRLTMLLQNKGTVSRLPDGGAKIQKQIAELTRELKDMKAAERINMPQVIDLEEDISRKMQKGLNL

SEQ ID NO: 8339 - protein, 2044 aa, Arabidopsis thaliana
MASKGGKSKPDIVMASKSGKSKPDNESRAKRQKTLEAPKEPRRPKTHWDHVLEEMAWLSKDFESERKWKLAQAKKVALRASKGMLDQASREERKLKEEEQRLRKVALNISKDMKKFWMKVEKLVLYKHQLVRNEKKKKAMDKQLEFLLGQTERYSTMLAENLVEPYKQGQNTPSKPLLTIESKSDEERAEQIPPEINSCLESGSPELDEDYDLKSEDETDEKHFTKRERQEELEALQNEVDLPVEELLRRYTSGRVSRETSPVKDENEDNLTSVSRVTSPVKDENQDNLASVGQDHGEDKNNLAASEETEGNPSVRRSNDSYGHLAISETHSHDLEPGMTTASVKSRKEDHTYDFNDEQEDVDFVLANGEEKDDEATLAVEEELAKADNEDHVEEIALLQKESEMPIEVLLARYKEDFGGKDISEDESESSFAVSEDSIVDSDENRQQADLDDDNVDLTECKLDPEPCSENVEGTFHEVAEDNDKDSSDKIADAAAAARSAQPTGFTYSTTKVRTKLPFLLKHSLREYQHIGLDWLVTMYEKKLNGILADEMGLGKTIMTIALLAHLACDKGIWGPHLIVVPTSVMLNWETEFLKWCPAFKILTYFGSAKERKLKRQGWMKLNSFHVCITTYRLVIQDSKMFKRKKWKYLILDEAHLIKNWKSQRWQTLLNFNSKRRILLTGTPLQNDLMELWSLMHFLMPHVFQSHQEFKDWFCNPIAGMVEGQEKINKEVIDRLHNVLRPFLLRRLKRDVEKQLPSKHEHVIFCRLSKRQRNLYEDFIASTETQATLTSGSFFGMISIIMQLRKVCNHPDLFEGRPIVSSFDMAGIDVQLSSTICSLLLESPFSKVDLEALGFLFTHLDFSMTSWEGDEIKAISTPSELIKQRVNLKDDLEAIPLSPKNRKNLQGTNIFEEIRKAVFEERIQESKDRAAAIAWWNSLRCQRKPTYSTSLRTLLTIKGPLDDLKANCSSYMYSSILADIVLSPIERFQKMIELVEAFTFAIPAARVPSPTCWCSKSDSPVFLSPSYKEKVTDLLSPLLSPIRPAIVRRQVYFPDRRLIQFDCGKLQELAMLLRKLKFGGHRALIFTQMTKMLDVLEAFINLYGYTYMRLDGSTPPEERQTLMQRFNTNPKIFLFILSTRSGGVGINLVGADTVIFYDSDWNPAMDQQAQDRCHRIGQTREVHIYRLISESTIEENILKKANQKRVLDNLVIQNGEYNTEFFKKLDPMELFSGHKALTTKDEKETSKHCGADIPLSNADVEAALKQAEDEADYMALKRVEQEEAVDNQEFTEEPVERPEDDELVNEDDIKADEPADQGLVAAGPAKEEMSLLHSDIRDERAVITTSSQEDDTDVLDDVKQMAAAAADAGQAISSFENQLRPIDRYAIRFLELWDPIIVEAAMENEAGFEEKEWELDHIEKYKEEMEAEIDDGEEPLVYEKWDADFATEAYRQQVEVLAQHQLMEDLENEAREREAAEVAEMVLTQNESAHVLKPKKKKKAKKAKYKSLKKGSLAAESKHVKSVVKIEDSTDDDNEEFGYVSSSDSDMVTPLSRMHMKGKKRDLIVDTDEEKTSKKKAKKHKKSLPNSDIKYKQTSALLDELEPSKPSDSMVVDNELKLTNRGKTVGKKFITSMPIKRVLMIKPEKLKKGNLWSRDCVPSPDSWLPQEDAILCAMVHEYGPNWNFVSGTLYGMTAGGAYRGRYRHPAYCCERYRELIQRHILSASDSAVNEKNLNTGSGKALLKVTEENIRTLLNVAAEQPDTEMLLQKHFSCLLSSIWRTSTRTGNDQMLSLNSPIFNRQFMGSVNHTQDLARKPWQGMKVTSLSRKLLESALQDSGPSQPDNTISRSRLQETQPINKLGLELTLEFPRGNDDSLNQFPPMISLSIDGSDSLNYVNEPPGEDVLKGSRVAAENRYRNAANACIEDSFGWASNTFPANDLKSRTGTKAQSLGKHKLSASDSAKSTKSKHRKLLAEQLEGAWVRPNDPNLKFDFTPGDREEEEEQEVDEKANSAEIEMISCSQWYDPFFTSGLDDCSLASDISEIE

SEQ ID NO: 8340 - protein, 2061 aa, Arabidopsis thaliana
MASKGGKSKPDIVMASKSGKSKPDNESRAKRQKTLEAPKEPRRPKTHWDHVLEEMAWLSKDFESERKWKLAQAKKVALRASKGMLDQASREERKLKEEEQRLRKVALNISKDMKKFWMKVEKLVLYKHQLVRNEKKKKAMDKQLEFLLGQTERYSTMLAENLVEPYKQGQNTPSKPLLTIESKSDEERAEQIPPEINSCLESGSPELDEDYDLKSEDETEDDEDTIEEDEKHFTKRERQEELEALQNEVDLPVEELLRRYTSGRVSRETSPVKDENEDNLTSVSRVTSPVKDENQDNLASVGQDHGEADKNNLAASEETEGNPSVRRSNDSYGHLAISETHSHDLEPGMTTASVKSRKEDHTYDFNDEQEDVDFVLANGEEKDDEATLAVEEELAKADNEDHVEEKFPLLPQIALLQKESEMPIEVLLARYKEDFGGKDISEDESESSFAVSEDSIVDSDENRQQADLDDDNVDLTECKLDPEPCSENVEGTFHEVAEDNDKDSSDKIADAAAAARSAQPTGFTYSTTKVRTKLPFLLKHSLREYQHIGLDWLVTMYEKKLNGILADEMGLGKTIMTIALLAHLACDKGIWGPHLIVVPTSVMLNWETEFLKWCPAFKILTYFGSAKERKLKRQGWMKLNSFHVCITTYRLVIQDSKMFKRKKWKYLILDEAHLIKNWKSQRWQTLLNFNSKRRILLTGTPLQNDLMELWSLMHFLMPHVFQSHQEFKDWFCNPIAGMVEGQEKINKEVIDRLHNVLRPFLLRRLKRDVEKQLPSKHEHVIFCRLSKRQRNLYEDFIASTETQATLTSGSFFGMISIIMQLRKVCNHPDLFEGRPIVSSFDMAGIDVQLSSTICSLLLESPFSKVDLEALGFLFTHLDFSMTSWEGDEIKAISTPSELIKQRVNLKDDLEAIPLSPKNRKNLQGTNIFEEIRKAVFEERIQESKDRAAAIAWWNSLRCQRKPTYSTSLRTLLTIKGPLDDLKANCSSYMYSSILADIVLSPIERFQKMIELVEAFTFAIPAARVPSPTCWCSKSDSPVFLSPSYKEKVTDLLSPLLSPIRPAIVRRQVYFPDRRLIQFDCGKLQELAMLLRKLKFGGHRALIFTQMTKMLDVLEAFINLYGYTYMRLDGSTPPEERQTLMQRFNTNPKIFLFILSTRSGGVGINLVGADTVIFYDSDWNPAMDQQAQDRCHRIGQTREVHIYRLISESTIEENILKKANQKRVLDNLVIQNGEYNTEFFKKLDPMELFSGHKALTTKDEKETSKHCGADIPLSNADVEAALKQAEDEADYMALKRVEQEEAVDNQEFTEEPVERPEDDELVNEDDIKADEPADQGLVAAGPAKEEMSLLHSDIRDERAVITTSSQEDDTDVLDDVKQMAAAAADAGQAISSFENQLRPIDRYAIRFLELWDPIIVEAAMENEAGFEEKEWELDHIEKYKEEMEAEIDDGEEPLVYEKWDADFATEAYRQQVEVLAQHQLMEDLENEAREREAAEVAEMVLTQNESAHVLKPKKKKKAKKAKYKSLKKGSLAAESKHVKSVVKIEDSTDDDNEEFGYVSSSDSDMVTPLSRMHMKGKKRDLIVDTDEEKTSKKKAKKHKKSLPNSDIKYKQTSALLDELEPSKPSDSMVVDNELKLTNRGKTVGKKFITSMPIKRVLMIKPEKLKKGNLWSRDCVPSPDSWLPQEDAILCAMVHEYGPNWNFVSGTLYGMTAGGAYRGRYRHPAYCCERYRELIQRHILSASDSAVNEKNLNTGSGKALLKVTEENIRTLLNVAAEQPDTEMLLQKHFSCLLSSIWRTSTRTGNDQMLSLNSPIFNRQFMGSVNHTQDLARKPWQGMKVTSLSRKLLESALQDSGPSQPDNTISRSRLQETQPINKLGLELTLEFPRGNDDSLNQFPPMISLSIDGSDSLNYVNEPPGEDVLKGSRVAAENRYRNAANACIEDSFGWASNTFPANDLKSRTGTKAQSLGKHKLSASDSAKSTKSKHRKLLAEQLEGAWVRPNDPNLKFDFTPGDREEEEEQEVDEKANSAEIEMISCSQWYDPFFTSGLDDCSLASDISEIE

SEQ ID NO: 8341 - protein, 959 aa, Arabidopsis thaliana
MEEEDEEILSSSDCDDSSDSYKDDSQDSEGENDNPECEDLAVVSLSSDADRKSKNVKDLLRGNLVVQRQPLLPRVLSVSDGAAVCRKPFKPPCSHGYDSTGQLSRRLSARKRFVPWGSSTPVVVALPTKLEASTNIERDEEEEVVCLPPDIEPLVLWQSEEDGMSNVTTIMVHSVLVKFLRPHQREGVQFMFDCVSGLHGSANINGCILADDMGLGKTLQSITLLYTLLCQGFDGTPMVKKAIIVTPTSLVSNWEAEIKKWVGDRIQLIALCESTRDDVLSGIDSFTRPRSALQVLIISYETFRMHSSKFCQSESCDLLICDEAHRLKNDQTLTNRALASLTCKRRVLLSGTPMQNDLEEFFAMVNFTNPGSLGDAAHFRHYYEAPIICGREPTATEEEKNLAADRSAELSSKVNQFILRRTNALLSNHLPPKIIEVVCCKMTTLQSTLYNHFISSKNLKRALADNAKQTKVLAYITALKKLCNHPKLIYDTIKSGNPGTVGFENCLEFFPAEMFSGRSGAWTGGDGAWVELSGKMHVLSRLLANLRRKTDDRIVLVSNYTQTLDLFAQLCRERRYPFLRLDGSTTISKRQKLVNRLNDPTKDEFAFLLSSKAGGCGLNLIGANRLVLFDPDWNPANDKQAAARVWRDGQKKRVYVYRFLSTGTIEEKVYQRQMSKEGLQKVIQHEQTDNSTRQGNLLSTEDLRDLFSFHGDVRYVFLLKSGNVLCPLRTSFLYPLLGTDFVPQDDTHSNGLSQSLFSGNVARSEIHEKMSCSRCQNDASGTENIEEGNENNVDDNACQIDQEDIGGFAKDAGCFNLLKNSERQVGTPLEEDLGSWGHHFTSKSVPDAILQASAGDEVTFVFTNQVDGKLVPIESNVSPKTVESEEHNRNQPVNKRAFNKPQQRPREPLQPLSLNETTKRVKLSTYKRLHGNSNIDDAQIKMSLQRPNLVSVNHDDDFV

SEQ ID NO: 8342 - protein, 852 aa, Arabidopsis thaliana
MEEEDEEILSSSDCDDSSDSYKDDSQDSEGENDNPECEDLAVVSLSSDADRKSKNVKDLLSNVTTIMVHSVLVKFLRPHQREGVQFMFDCVSGLHGSANINGCILADDMGLGKTLQSITLLYTLLCQGFDGTPMVKKAIIVTPTSLVSNWEAEIKKWVGDRIQLIALCESTRDDVLSGIDSFTRPRSALQVLIISYETFRMHSSKFCQSESCDLLICDEAHRLKNDQTLTNRALASLTCKRRVLLSGTPMQNDLEEFFAMVNFTNPGSLGDAAHFRHYYEAPIICGREPTATEEEKNLAADRSAELSSKVNQFILRRTNALLSNHLPPKIIEVVCCKMTTLQSTLYNHFISSKNLKRALADNAKQTKVLAYITALKKLCNHPKLIYDTIKSGNPGTVGFENCLEFFPAEMFSGRSGAWTGGDGAWVELSGKMHVLSRLLANLRRKTDDRIVLVSNYTQTLDLFAQLCRERRYPFLRLDGSTTISKRQKLVNRLNDPTKDEFAFLLSSKAGGCGLNLIGANRLVLFDPDWNPANDKQAAARVWRDGQKKRVYVYRFLSTGTIEEKVYQRQMSKEGLQKVIQHEQTDNSTRQVLAGMGTYFLQRIYEIYFPSMGMLGNVLCPLRTSFLYPLLGTDFVPQDDTHSNGLSQSLFSGNVARSEIHEKMSCSRCQNDASGTENIEEGNENNVDDNACQIDQEDIGGFAKDAGCFNLLKNSERQVGTPLEEDLGSWGHHFTSKSVPDAILQASAGDEVTFVFTNQVDGKLVPIESNVSPKTVESEEHNRNQPVNKRAFNKPQQRPREPLQPLSLNETTKRVKLSTYKRLHGNSNIDDAQIKMSLQRPNLVSVNHDDDFV

SEQ ID NO: 8343 - protein, 763 aa, Arabidopsis thaliana
MKRDFDEISEEEWSQHSFNASRVLKRPRTPKKTRAATNPTPSIESFAFRRPSTAMTIESNSSDGDCVEIEDLGDSDSDVKIVNGEDLLLEDEEEVEETKVVMRAARVGRRFVIEDEEASDDDDDEAESSASEDEFGGGGGGSGGRRGEDEDVVGKALQKCAKISADLRKELYGTSSGVTDRYSEVETSTVRIVTQNDIDDACKAEDSDFQPILKPYQLVGVNFLLLLYKKGIEGAILADEMGLGKTIQAITYLTLLSRLNNDPGPHLVVCPASVLENWERELRKWCPSFTVLQYHGAARAAYSRELNSLSKAGKPPPFNVLLVCYSLFERHSEQQKDDRKVLKRWRWSCVLMDEAHALKDKNSYRWKNLMSVARNANQRLMLTGTPLQNDLHELWSLLEFMLPDIFTTENVDLKKLLNAEDTELITRMKSILGPFILRRLKSDVMQQLVPKIQRVEYVLMERKQEDAYKEAIEEYRAASQARLVKLSSKSLNSLAKALPKRQISNYFTQFRKIANHPLLIRRIYSDEDVIRIARKLHPIGAFGFECSLDRVIEEVKGFNDFRIHQLLFQYGVNDTKGTLSDKHVMLSAKCRTLAELLPSMKKSGHRVLIFSQWTSMLDILEWTLDVIGVTYRRLDGSTQVTDRQTIVDTFNNDKSIFACLLSTRAGGQGLNLTGADTVIIHDMDFNPQIDRQAEDRCHRIGQTKPVTIFRLVTKSTVDENIYEIAKRKLVLDAAVLESGVHVDDNGDTPEKTMGEILASLLMG

SEQ ID NO: 8344 - protein, 627 aa, Arabidopsis thaliana
MTEDDDFDEQNAVIAEAAEQPLDLIIPLLKYQKEFLAWATIQELSAVRGGILADEMGMGKTIQAISLVLARREVDRAKSREAVGHTLVLVPPVALSQWLDEISRLTSPGSTRVLQYHGPKRDKNVQKLMNYDFVLTTSPIVENEYRKDEGVDETMSPLHSIKWNRIIVDEAHDIKNRSSRTAKAVFALEATYRWALSGTPLQNDVDELYSLIRFLRVSPYSYYFCKKCDCEVLDRSAHRKCPSCPHNANQHISWWKENVDKRRNRACIFLKQNVLKDILLRRTKLGRAADLALPSRIISLRRDALSVVEADFYESLYKVSKTTFDGYIQAGTLMNNYAHIFGLLIRLRQAVDHPYLVSYSSPSGANANLLDANKNEKECGFGHDPSKDYFVTSSEHQASKTKLKGFRASSILNRINLDDFKTSTKIEALREEIRFMVERDWSAKAIVFSQFTSFLDLISYALGKSGVSCVQLVGSMSKAAKDAALKNFKEEPDCRVLLMSLQAGGVALNLTAASHVFMMDPWWNPAVERQAQDRIHRIGQCKPVRVVRFIMEKTVEEKILTLQKKKEDLFERFLILNDTLLSTLLVSYCQLYEAYMKTYLLCYSTLGDSEEAVVQKLGEDDIKSLFA

SEQ ID NO: 8345 - protein, 678 aa, Arabidopsis thaliana
MAGLRSVHVGSETKVVSKNECAHVTLWTGTAQGDLGVAMEPHSHHKNAILPSSSQDENLKEEEVPDDDDSVGGEVQGEVNANDYIPNPAAPANTKRKWQIMKEKVQMTEDDDFDEQNAVIAEAAEQPLDLIIPLLKYQKEFLAWATIQELSAVRGGILADEMGMGKTIQAISLVLARREVDRAKSREAVGHTLVLVPPVALSQWLDEISRLTSPGSTRVLQYHGPKRDKNVQKLMNYDFVLTTSPIVENEYRKDEGVDETMSPLHSIKWNRIIVDEAHDIKNRSSRTAKAVFALEATYRWALSGTPLQNDVDELYSLVSYSFLNFFYSTYASFAFRHTHITFARNVTVKFLIGGNILPLSIPVRIENVPAVLIMQINTSLGGKRRDALSVVEADFYESLYKVSKTTFDGYIQAGTLMNNYAHIFGLLIRLRQAVDHPYLVSYSSPSGANANLLDANKNEKECGFGHDPSKDYFVTSSEHQASKTKLKGFRASSILNRINLDDFKTSTKIEALREEIRFMVERDWSAKAIVFSQFTSFLDLISYALGKSGVSCVQLVGSMSKAAKDAALKNFKEEPDCRVLLMSLQAGGVALNLTAASHVFMMDPWWNPAVERQAQDRIHRIGQCKPVRVVRFIMEKTVEEKILTLQKKKEDLFESTLGDSEEAVVQKLGEDDIKSLFA

SEQ ID NO: 8346 - protein, 1029 aa, Arabidopsis thaliana
MGTKVSDDLVSTVRSVVGSDYSDMDIIRALHMANHDPTAAINIIFDTPSFAKPDVATPTPSGSNGGKRVDSGLKGCTFGDSGSVGANHRVEEENESVNGGGEESVSGNEWWFVGCSELAGLSTCKGRKLKSGDELVFTFPHSKGLKPETTPGKRGFGRGRPALRGASDIVRFSTKDSGEIGRIPNEWARCLLPLVRDKKIRIEGSCKSAPEALSIMDTILLSVSVYINSSMFQKHSATSFKTASNTAEESMFHPLPNLFRLLGLIPFKKAEFTPEDFYSKKRPLSSKDGSAIPTSLLQLNKVKNMNQDANGDENEQCISDGDLDNIVGVGDSSGLKEMETPHTLLCELRPYQKQALHWMTQLEKGNCTDEAATMLHPCWEAYCLADKRELVVYLNSFTGDATIHFPSTLQMARGGILADAMGLGKTVMTISLLLAHSWKAASTGFLCPNYEGDKVISSSVDDLTSPPVKATKFLGFDKRLLEQKSVLQNGGNLIVCPMTLLGQWKTEIEMHAKPGSLSVYVHYGQSRPKDAKLLSQSDVVITTYGVLTSEFSQENSADHEGIYAVRWFRIVLDEAHTIKNSKSQISLAAAALVADRRWCLTGTPIQNNLEDLYSLLRFLRIEPWGTWAWWNKLVQKPFEEGDERGLKLVQSILKPIMLRRTKSSTDREGRPILVLPPADARVIYCELSESERDFYDALFKRSKVKFDQFVEQGKVLHNYASILELLLRLRQCCDHPFLVMSRGDTAEYSDLNKLSKRFLSGKSSGLEREGKDVPSEAFVQEVVEELRKGEQGECPICLEALEDAVLTPCAHRLCRECLLASWRNSTSGLCPVCRNTVSKQELITAPTESRFQVDVEKNWVESSKITALLEELEGLRSSGSKSILFSQWTAFLDLLQIPLSRNNFSFVRLDGTLSQQQREKVLKEFSEDGSILVLLMSLKAGGVGINLTAASNAFVMDPWWNPAVEEQAVMRIHRIGQTKEVKIRRFIVKGTVEERMEAVQARKQRMISGALTDQEVRSARIEELKMLFT

SEQ ID NO: 8347 - protein, 1277 aa, Arabidopsis thaliana
MAIVDDAEMRLTESEAVSSSDDRKIVADTPDFIDESSLVIRTTTGVRISALPAEQSLVDSDGSNSEVTLPAKDEVISDGFTCVNKEIVESDSFREQNLEIGEPDLDVENRKEAMIIDSIENSVVEIVSSASGDDCNVKVEVVEPELLVENLVVAKEEEEMIVDSIEDSVVEIVSTASGCDCNVKVEVVDPELCVDNLVVVKEEEMIADSIAESVVETVSRGLDYECVDVKVKEEPDLGTKLEEDSVFPNVLEKKDEVIKVLEDQPSEINKKLEQENDDLFSSGDSDGTSAKRRKMEMESYAPVGVESCILAPTPLRVVKPEKLDTPEVIDLESEKSYTHVKMEPVEEIKVEAVKMSSQVEDVKFSREQKSVYVKKEPVGARKVKVEDGDFPVEKDWYLVGRSLVTATSTSKGRKLEDNEIVNFTFSSVAKWKVPNIVRFSTKRCGEIGRLPMEWSNWAVSLLRSGKVKMLGRCVAAPPFLTMMQEIMLYVSFYIHSSIFTDVSKSTWRIGSSPNLESTLHPLLQLFKHLTIKPYQKAEFTPEELNSRKRSLNLEDDYDERAALLAIAKRRKGCQQSLEQNKDEEEAPESYMNRVVGAADSYNLEEMEAPSTLTCNLRPYQKQALYWMSESEKGIDVEKAAETLHPCWEAYRICDERAPSIYLNIFSGEATIQFPTATQMARGGILADAMGLGKTVMTIALILARPGRGNPENEDVLVADVNADKRNRKEIHMALTTVKAKGGTLIICPMALLSQWKDELETHSKPDTVSVLVYYGGDRTHDAKAIASHDVVLTTYGVLTSAYKQDMANSIFHRIDWYRIVLDEAHTIKSWKTQAAKATFELSSHCRWCLTGTPLQNKLEDLYSLLCFLHVEPWCNWAWWSKLIQKPYENGDPRGLKLIKAILRPLMLRRTKETRDKEGSLILELPPTDVQVIECEQSEAERDFYTALFKRSKVQFDQFVAQGKVLHNYANILELLLRLRQCCNHPFLVMSRADSQQYADLDSLARRFLDNNPDSVSQNAPSRAYIEEVIQDLRDGNSKECPICLESADDPVLTPCAHRMCRECLLTSWRSPSCGLCPICRTILKRTELISCPTDSIFRVDVVKNWKESSKVSELLKCLEKIKKSGSGEKSIVFSQWTSFLDLLEIPLRRRGFEFLRFDGKLAQKGREKVLKEFNETKQKTILLMSLKAGGVGLNLTAASSVFLMDPWWNPAVEEQAIMRIHRIGQKRTVFVRRFIVKDTVEERMQQVQARKQRMIAGALTDEEVRSARLEELKMLFR

SEQ ID NO: 8348 - protein, 1067 aa, Arabidopsis thaliana
MANLLQRLRRRTGPKPDYIEDKLDEYIREEQVEETGGSNQDCPLGEIEKILDREWRPTASNNPNSSDNGTPTLVVVKQYLVKWKGLSYLHCSWVPEQEFEKAYKSHPHLKLKLRVTRFNAAMDVFIAENGAHEFIAIRPEWKTVDRIIACREGDDGEEYLVKYKELSYRNSYWESESDISDFQNEIQRFKDINSSSRRDKYVENERNREEFKQFDLTPEFLTGTLHTYQLEGLNFLRYSWSKKTNVILADEMGLGKTIQSIAFLASLFEENLSPHLVVAPLSTIRNWEREFATWAPHMNVVMYTGDSEARDVIWEHEFYFSEGRKRLKKDVLKDKVPPKKELILRVDMSSQQKEVYKAVITNNYQVLTKKRDAKISNVLMKLRQVCSHPYLLPDFEPRFEDANEAFTKLLEASGKLQLLDKMMVKLKEQGHRVLIYTQFQHTLYLLEDYFTFKNWNYERIDGKISGPERQVRIDRFNAENSNRFCFLLSTRAGGIGINLATADTVIIYDSDWNPHADLQAMARVHRLGQTNKVMIYRLIHKGTVEERMMEITKNKMLLEHLVVGKQHLCQDELDDIIKYGSKELFSEENDEAGRSGKIHYDDAAIEQLLDRNHVDAVEVSLDDEEETDFLKNFKVASFEYVDDENEAAALEEAQAIENNSSVRNADRTSHWKDLLKDKYEVQQAEELSALGKRKRNGKQVMYAEDDLDGLEEISDEEDEYCLDDLKVTSDEEEEADEPEAARQRKPRTVTRPYRKRARDNSEEIPLMEGEGRYLMVLGFNETERDIFLRTFKRYGILFLKHIAENPTDNSTNFKVITAMVYADGVPKEGISSDELLVSMTFMMLVKEKCQFLDNHPTAPVFSNYVISKYNLRNGAFSKEEHDRILIPAVSKHGYGRWVAIVEDEEIGFQEVACKDLNIPFPPDTKSARKRICDHVGKRVKKMEDAIKYEYAEKILAEQAKAETKGTSFVDAEKEMLKNDPITSKKNSATAVDNKQGRVEMAQSYDQSVNEKSGESFQTYLDIQPLNRMPRESFKPLEPINEEISTRLSVGTDHDVEMDAADNIIVLD

SEQ ID NO: 8349 - protein, 1447 aa, Arabidopsis thaliana
MEANEESLKGKIEKLEGKEVIVESKEDEMDIIIEENREAEQEVMEVKARDGRGEQNDVLMEENNNQGEQKDEEMQDASSRSESSDFNSDEDEQILSRRDDELDLEKPLSEEEIDELISDLLAVESKLDEAVAAEMMTFKDEWEATLDELETESATLLEQLDGAGIELPKLYEMIESQAPNGCYTEAWKQRAHWVGTQVTKETVESLANAERFLHTHRPVRKRHGKLLEEGASGFLEKKLADGAVKESLAGTSELDWSSLNKVFSEKRDESVSFGSKQWASVYLASTPHQAAAMGLEFPGVNEVEEIEEIDASLADPFLADAIDNERELALTEEQKTNYIRVKEEDDITCDRVLQLRLKRKRRKKRSKQVIRCAAENMDDDSVYLDGNNTTPNFAKDQVKSPETSTQVHNSEVNIEENGNFSNSDVDKMTPSTHINVDAKRDDSQNPANNFRCTACNKVAVEVHSHPLLEVIVCMDCKRSIEDRVSKVDDSLERHCEWCGHIADLIDCRTCEKLFCASCIKRNIGEEYMSEAQSSGWDCCCCSPIPLQRLTLELEKAMRDKKSIELSSDSSSDSSSDNNSVDTDADVNVTISSKKKSKKKIRRIIDDAELGKDTRTKIAIEKARQERLRSLQFSARYKTISSMGDVKSIPEGAEVEVLGDAHSGYIVNVVREIGEEAVRVPRSISAKLKVHQVTGIRFMWENIIQSISRVKSGDKGLGCILAHTMGLGKTFQVIAFLYTAMRCVDLGLKTALIVTPVNVLHNWRSEFEKWMPSEVKPLRIFMLGDVSRERRFDLLTKWRKKGGVFLMGYTNFRNLSLGRGVKDLNAARGICNALRDGPDILVCDEAHIIKNTKADTTQALKQVKCQRRIALTGSPLQNNLMEYYCMVDFVREGFLGSSPEFRNRFQNPIENGQHMNSTAEDVKIMNQRSHILYEQLKGFVQRMDMNVVKKDLPPKTVFVISVKLSPLQRILYQRFLELYGFSDGRTDERMRKNFFAAYQVLAQILNHPGIPQLRSEDSKNGRRGSIVDIPDDCSSDENIDYNMVTGEKQRTMNDLQDKVDGYLQKDWWVDLLQKNNYKVSDFSGKMILLLDILSMSADVGDKALVFSQSIPTLDLIELYLSRVPRHGKQGKFWKKGKDWYRIDGKTESSERQKLVDRFNEPDNKRVKCTLISTRAGSLGINLYAANRVIIVDGSWNPTYDLQAIFRAWRYGQKKPVFAYRLMARGTIEEKIYKRQVTKEGLAARVVDRQQVHRTISKEEMLHLFEFDDDDEKSEAVTEISKQNEAGHSNLVEQAILWTKKATLSRVGGDKLMENLLQRHGPNWISSFHEHETLLQENEEERLTKEEKDMAWEVYRRALEWEEVQRVPFSESPVVPKPSPSTQTEPLPQPKGFNRSRFVNRNCTRIAHQLTLISQGLKVGSSTVCGECGRVIRWEDVIPASKLSAVIVN
